United States Patent Application Publication US 2013/0309769 A1 - sequence listing, part 5

SEQ ID NO: 4761 - DNA, 5886 bp, Homo sapiens
caccgagcaccagcttctccgacgccgggaagccgctgtcgccgccgctacctctccctgttgccgccgcctcagatctcttcatgccgctgtaagctcggaggccaaggatgcggagtaggcttcccccagcgcttgccgccctgggcgcggccctgctcctgtcttccattgaggcagaagggatggagtgtctcaccagagctgaggcagacattgtgttgctggtggatggatcatggagcatcggccgggcaaattttagaaccgtgaggagtttcatttctcgtattgtggaagtctttgacattggccccaaaagagtacaaattgctcttgctcagtatagtggggatcccagaacagagtggcagttaaatgcacacagagacaagaagagcttgttgcaagctgtggcaaacttgccgtacaaaggaggcaatactctcacaggcatggctttgaatttcattcgccaacagaacttcaggacccaagctggcatgagacctcgagctcgaaaaattggtgtgctcattactgatggaaaatcacaagacgatgttgaagcaccttcaaagaaactcaaggatgagggagtggagctgtttgctattggtattaaaaatgctgatgaagtcgaattaaagatgattgcaactgatcctgatgatacccatgcatacaatgtggcagattttgagtcactctccaggatagtggatgatctcaccattaatttgtgtaacagtgtcaaaggtccaggtgatttggaagcaccttctaacttagttatttctgagcgaacccatcgttcttttagagtgagctggacaccaccttctgacagtgtggatcgatataaggtggaatactatccagtttctggagggaaacgtcaagaattttatgtgagtcgaatggaaactagcacagtgctgaaagatctgaaacctgaaactgaatatgttgtcaatgtgtattctgtggtagaagatgaatatagtgagcctctgaaggggacagaaaaaaccttgccagtgcctgtagtcagcctgaatatttatgatgttggccctaccaccatgcatgtgcagtggcagcctgtgggaggagctactggctacatcttgtcatacaaacctgttaaggacacagagccaacaagacccaaagaggtgcgtttggggccaacagtgaatgacatgcagctgactgaccttgttcccaacacggagtatgcagtcacagtccaggctgtcctgcacgacctcactagtgaacctgtcactgttcgggaagtcaccttgcctttacccagacctcaggatctgaaactcagagatgtgactcacagcactatgaatgtcttttgggaacctgtgcctggaaaagtgcgtaaatatattgttcgatacaaaacaccagaagaggatgtcaaagaggtagaggtggacagatcagagaccagcacttccctcaaagacctcttctcacagaccttgtacacagtcagcgtttctgcagtacatgacgagggggagtctcctccagtgactgctcaagaaactacccgacccgtgccagccccaacaaacttaaagattactgaagtaacatcagagggtttcagagggacttgggatcatggagcttcagatgtgtctctctacagaataacttgggcaccttttggaagctcagataagatggagaccatcttaaatggagatgaaaacactttggtgttcgaaaacctgaaccccaacaccatctatgaagtttccattactgccatctatcctgatgagtcagaaagtgatgacctgattggcagtgagcgcacactgcctatcttaacaacacaagctcccaaaagtggcccacgaaaccttcaagtgtacaatgcaacatctaacagcctgactgttaagtgggatcctgctagtggtcgtgtgcagaaatataggatcacttatcagccttccacaggggaaggcaatgagcaaacgaccacaataggaggacggcagaacagtgtggtcctgcagaaactgaagccagacactccttacactatcaccgtatcctctctgtatcctgatggtgaaggaggtcggatgacgggaagaggcaagaccaaacctctaaacactgtaaggaacctgagagtgtatgacccttctaccagcaccttgaatgtccgctgggaccatgcagagggaaatcctcgtcagtacaagctcttctatgcaccagcagcaggtggtccagaggaactggtaccaatccccgggaataccaattatgccattcttaggaatctgcagccagatacctcatacactgtgactgtagttcccgtttatactgaaggtgatgggggacgcacatcagatactggaaggacattgatgagaggactggcaagaaatgtccaagtatacaatcctacacctaacagcctcgatgttcgctgggaccctgcaccaggacctgtgctgcaatatcgcgttgtgtattctcctgtggatggcacaagaccctcagaatctatagtagtgccaggaaacacgcgcatggtgcatctggagcggctgattccggacacactctattccgtgaaccttgtggctctgtactcggatggagagggaaatcccagccctgcccagggccgaacgctaccacgcagtggaccaaggaacctgagagtctttggtgaaacaaccaatagcctctcggtagcctgggatcatgctgatgggccagttcagcagtacaggatcatctattctcccactgttggtgatccaattgatgaatataccacagtcccaggcagaagaaacaatgtaatactgcagcccctgcaacctgacactccatataaaattactgttattgctgtttatgaagatggagatggtggccatctaacaggaaatggaagaactgtgggactccttcctcctcagaacatacacatctctgacgaatggtatacaagattcagggtgtcctgggatccttcaccttctccagttcttggatataaaatagtatataagccagtgggttccaatgagcccatggaagcctttgttggagaaatgacatcatataccttacacaatctcaatcccagcaccacctacgatgtgaatgtttatgctcaatatgattctggactcagtgtccccttgacagatcaaggcactacattatatttaaatgtaacagatctgaaaacttaccagattgggtgggatacattctgtgtcaaatggtcacctcaccgggcagccacctcctacaggctaaaactaagccctgcagatggaacaaggggacaagaaattacagtgcgtggatcagaaaccagtcactgcttcactggcctttcaccagacactgattatggtgtcactgtttttgtgcagacaccaaatctcgagggaccaggagtctctgttaaagaacataccactgtgaaaccaacagaagcccctacagagccacccacacctcctccccctcccaccattccaccagcccgggatgtatgcaaaggggccaaggcagatattgtgttcttgactgatgcctcctggagcattggggacgataattttaacaaagttgtaaaattcatcttcaatactgtgggaggctttgatgaaatcagtcctgctgggattcaggtttcatttgtgcaatacagcgatgaggtcaagtctgagttcaagctgaacacgtacaatgacaaggccctagcccttggggccctccagaatattaggtacagaggaggaaacacaagaacaggcaaggccctcacgtttatcaaggagaaagtcttgacttgggagagcggcatgaggaagaatgtccctaaggtgttggttgtggtcacggacggtcggtcccaggatgaggtcaagaaggcggctttggtcatccagcagtcagggttcagtgtctttgtagttggtgtggctgatgtcgactacaatgagcttgccaacattgccagcaaaccaagtgaacggcacgtgttcattgtggacgactttgaatcttttgagaagatcgaagacaatcttattacatttgtttgtgaaactgccacttcaagttgtcctctcatttatttggatggctacacctcaccaggttttaaaatgcttgaagcatacaacctgacagaaaagaattttgcttctgtacaaggagtatctttggagtcagggtctttccccagctactcagcatacaggattcagaagaatgcgtttgtgaatcagcctacagcagacctacacccaaatggactccctccttcatacacgattatattattattcagacttctcccagaaactcccagtgacccttttgcaatttggcaaatcacagacagagactacaaaccacaagttggagtgattgcagatccttctagcaagacgttatcattctttaacaaggatacaagaggcgaggtgcaaactgttacatttgacacagaagaagtaaagacattattttatggaagttttcacaaggttcatattgtagtgacctcaaaaagtgttaagatttacattgactgctatgaaattatagaaaaagacatcaaggaagctggaaatataacaactgatggttatgaaattcttggaaaactccttaaaggggaaaggaaatcagccgcattccaaatccagagttttgacattgtctgcagtccagtgtggaccagtagagacagatgctgtgatattccctctaggagagatgagggaaaatgccctgcttttccaaattcttgcacatgtacacaggacagcgttggacctccaggacctccaggccctgcaggaggacctggtgctaaaggtcccagaggtgaaagaggtatcagtggggcaattgggccccctggtcctcgtggagacataggtcctccaggcccccagggtcctccaggccctcagggacccaatggactctctattccgggagagcaaggtcgccaagggatgaaaggtgatgctggagagccaggacttccaggccgaacaggaaccccaggattacctggcccaccaggaccaatgggacctccaggagacagaggcttcactggaaaagacggtgcaatgggacccaggggcccaccagggccgccgggaagcccaggctccccaggagtcacaggaccaagtgggaagccaggaaaacctggagatcatggcagaccaggtccatctgggttgaaaggagaaaaaggtgataggggagacattgcttcccagaacatgatgcgagcagttgcaagacaagtctgtgaacaattgataagtggtcagatgaacagattcaatcagatgctgaatcagattccaaatgattaccagtccagtcgcaaccagccaggcccgccgggtccaccgggacctcctggtagcgcaggagccagaggagaacctgggcctggggggcggccaggcttcccgggcacaccagggatgcagggaccccctggggaacgaggtttgccaggagagaaaggtgaaaggggtactggatcttcaggacctcgggggctgcctggcccccaaggtccacaaggagaatccagaacaggtccaccagggtccacaggttcaagaggtccccctggcccccctggccgtcctggaaactcaggtatccgaggacccccaggtcctcctggatactgtgattcttctcagtgtgccagcatcccatacaacgggcaaagctatccaggttccggctaacacattttctaagtcgccagtgctgcttacagtttgaatacatgaaaatcctgtttctgagatgtttgcgcacgtg

SEQ ID NO: 4762 - DNA, 7047 bp, Homo sapiens; identical to SEQ ID NO: 1624

SEQ ID NO: 4763 - DNA, 6763 bp, Homo sapiens
ctttgtagctcctggagattcaattctttcttgccagggtctttctacctctgcctcacatattccctccatctcttcattccacttccctcatccccaccccccactcccctccatcctcaatacacaaatgctcctaggcaccctccttctgatcctgtacatcttaatgttgtgccggatgtttcttctcgtgggagctcccaaagcaaacaccacccagcctgggattgtggaaggagggcaggtcctcaaatgtgactggtcttctacccgccggtgccagccaattgaatttgatgcaacaggcaatagagattatgccaaggatgatccattggaatttaagtcccatcagtggtttggagcatctgtgaggtcgaaacaggataaaattttggcctgtgccccattgtaccattggagaactgagatgaaacaggagcgagagcctgttggaacatgctttcttcaagatggaacaaagactgttgagtatgctccatgtagatcacaagatattgatgctgatggacagggattttgtcaaggaggattcagcattgattttactaaagctgacagagtacttcttggtggtcctggtagcttttattggcaaggtcagcttatttcggatcaagtggcagaaatcgtatctaaatacgaccccaatgtttacagcatcaagtataataaccaattagcaactcggactgcacaagctatttttgatgacagctatttgggttattctgtggctgtcggagatttcaatggtgatggcatagatgactttgtttcaggagttccaagagcagcaaggactttgggaatggtttatatttatgatgggaagaacatgtcctccttatacaattttactggcgagcagatggctgcatatttcggattttctgtagctgccactgacattaatggagatgattatgcagatgtgtttattggagcacctctcttcatggatcgtggctctgatggcaaactccaagaggtggggcaggtctcagtgtctctacagagagcttcaggagacttccagacgacaaagctgaatggatttgaggtctttgcacggtttggcagtgccatagctcctttgggagatctggaccaggatggtttcaatgatattgcaattgctgctccatatgggggtgaagataaaaaaggaattgtttatatcttcaatggaagatcaacaggcttgaacgcagtcccatctcaaatccttgaagggcagtgggctgctcgaagcatgccaccaagctttggctattcaatgaaaggagccacagatatagacaaaaatggatatccagacttaattgtaggagcttttggtgtagatcgagctatcttatacagggccagaccagttatcactgtaaatgctggtcttgaagtgtaccctagcattttaaatcaagacaataaaacctgctcactgcctggaacagctctcaaagtttcctgttttaatgttaggttctgcttaaaggcagatggcaaaggagtacttcccaggaaacttaatttccaggtggaacttcttttggataaactcaagcaaaagggagcaattcgacgagcactgtttctctacagcaggtccccaagtcactccaagaacatgactatttcaagggggggactgatgcagtgtgaggaattgatagcgtatctgcgggatgaatctgaatttagagacaaactcactccaattactatttttatggaatatcggttggattatagaacagctgctgatacaacaggcttgcaacccattcttaaccagttcacgcctgctaacattagtcgacaggctcacattctacttgactgtggtgaagacaatgtctgtaaacccaagctggaagtttctgtagatagtgatcaaaagaagatctatattggggatgacaaccctctgacattgattgttaaggctcagaatcaaggagaaggtgcctacgaagctgagctcatcgtttccattccactgcaggctgatttcatcggggttgtccgaaacaatgaagccttagcaagactttcctgtgcatttaagacagaaaaccaaactcgccaggtggtatgtgaccttggaaacccaatgaaggctggaactcaactcttagctggtcttcgtttcagtgtgcaccagcagtcagagatggatacttctgtgaaatttgacttacaaatccaaagctcaaatctatttgacaaagtaagcccagttgtatctcacaaagttgatcttgctgttttagctgcagttgagataagaggagtctcgagtcctgatcatatctttcttccgattccaaactgggagcacaaggagaaccctgagactgaagaagatgttgggccagttgttcagcacatctatgagctgagaaacaatggtccaagttcattcagcaaggcaatgctccatcttcagtggccttacaaatataataataacactctgttgtatatccttcattatgatattgatggaccaatgaactgcacttcagatatggagatcaaccctttgagaattaagatctcatctttgcaaacaactgaaaagaatgacacggttgccgggcaaggtgagcgggaccatctcatcactaagcgggatcttgccctcagtgaaggagatattcacactttgggttgtggagttgctcagtgcttgaagattgtctgccaagttgggagattagacagaggaaagagtgcaatcttgtacgtaaagtcattactgtggactgagacttttatgaataaagaaaatcagaatcattcctattctctgaagtcgtctgcttcatttaatgtcatagagtttccttataagaatcttccaattgaggatatcaccaactccacattggttaccactaatgtcacctggggcattcagccagcgcccatgcctgtgcctgtgtgggtgatcattttagcagttctagcaggattgttgctactggctgttttggtatttgtaatgtacaggatgggcttttttaaacgggtccggccacctcaagaagaacaagaaagggagcagcttcaacctcatgaaaatggtgaaggaaactcagaaacttaactgcagtttttaagttatgctacatcttgacccactagaattagcaactttattatagatttaaactttcttcatgaggagtaaaaatccaaggctttactgctgatagtgctaattggcattaaccacaaaatgagaattatatttgtcaaccttctccttataaataagttcagacatacatttaataacatagggtgacttgtgtttttaggtatttaaataataaaatttcaagggatagtttttattcaatgtatataagacaggtagtgcctgatttactactttatataaaatagtacctccttcagttactgtttctgatttaatgtacggaactttatttgttgttgttgttgttgttgttgttgttgttttaaagcagtccaaatttggaccttagcaatcatgtcttttgtataggtacttaatgttaatacatattacactacagtttacttttcagaatactaaagactttataactgcatgaacttggatttttttaatcactcatatggtagaattttataaacacatacatgataccatccaaattcttgcttttaataacaaaggtacaatattttgttttagtatgaaaatctggtagatcctattacacttctgtttatattaaatccacaatattttattacatttttaacttgtataaattttaggtcaaatccttcaagccaacctatactaaaaattagttccataatcacaaatggctcttttgtgtaattgtttaatttcacctgaatatcataatgcttaaagccatatggagttggaaattatttccaaagcatatttattccattgttttagtctggctatttacagtataaaaaaagcatttttattaaaatactgtgtagttctttgagatagttgcttatgcatatagtaagtattacattcttagagtagagcagagtttttagttagtattaatttattttcctccattcatgtacttttccttatatttccaaaactgttactgagaatgggtcaagatcagtgagaaatctttacagttgacaggaacctggaccccttaccccaactttatgagtaatgcttggaataaaaactcttaaggcaactcactgatttacttctagcaatagcatgatgttacaggaatattacctctgtttaagcaaggtaatgtgtaaaatcagtctcggctgtcagaataacttctaaaaggtatttttataagcagttcaagttactgaaaaccttttaaacctttctgaagttcgttagtataaattacttttctaggattattaataaaagccacataggtggcaagttgtagttttatatggctctgtagagtggtgaaccttctagaggaatatatgatttattcacagttcctcaaggcctggggatgatgatcagttatacctatttttgtgcaattacatcatgttgtacattagaaatggagagtttaatagctctttaactgctgtcctcattaggtaatgataaatatttcccttaaataattgactattttgctgtgttttaaaaatgattgaaatttatcttgccatatctcataatttcatgcacaagttgactgagctaatcttgagaatatattcgtaaaataggagcacatttagttgaggtatacaaggtaggactctagacaaaaccttctattttagctttagtgaatttcaaaagtaatgggtcttggagtatagatttttattagtagcttgaaagagcttaatcatatgcagtaagtatttttattaccaataaatttaaaattttttaagaaaaatatttttatcctagggccaagtgttgcctgccaccaatcagtaagttagtctataacaaattttaccctaacagttttaccacctagtaacagtcatttctgaaaatatgttggatagaaagtcactctttggcaaaagtgttagaatttgcttttgtgccatctattccttttatggcatctatcttgaaagtaatcttgtattggagattgaaagatgctgtaatttagaaattaacatgatatcttaaattacctttatgaaatatagttttgtataatagcatagattttccttcaaaaaatgaacatttatatatctacaaaaatatggagaagagtaatttgaaagcctactttctgaagaaaatggtgggatttttttttatcatgattaaatatcaaaaaattgccctatgaaaactttaaatctctaaaacatttgaaatactaccatatttgtgatttattgagaataaaaatccattttgaaatgtaaaatttttatgatctgattcagttttaagaaaacatgaatgaactagaagatattaaaaacatttgacattggtaagaaatattgatactgatattgatttttatataggtatttatttcagaattgatattttgagaaaaatacatgtgagtcattttttctgtttctcttttctcttaacgattatcactgtaattctgaatctgaaaggtaaaacaattagtcaaaatattattgccatcattctacctgtgttatgaaactacttattcatagttaattctcattaacacttacatttccataaagaaaactcaagtattaataaaagagactttactggcttaagagggctgtgaaagatttttgatagtgaatcatgaccctaagggagagatttgtgtgataaaagtattgtatataatagatcagcgatttttgtaaggcaaacagaatttgtaagttggcagatcttcctaagttgcaaaatgtaatgatgagcttggtggagaagaatgagtcgttcttggaatacctatgtgcagccactacccatctcaatgtcaccttgtttgcattcttggatagcttgtatatgtagtagtttgatgaataatttaaagaaaaacacctaaaatttgaaaaatgattgtaggatcaaaaaaggcagatgaaattacttaatactcagtgttttggagagtattccttttagtttgttggttggctggtttgaacgatagaaatatgcagcatgcaatatatgcttatatttcattttaatttctgatatataatgaacttcttgggagaggtactgaatctttgatgttttttgtcattgttctcaagtgcaatataacaatgtaaccaaatctagataatttcaaagttgtcattaatttagtaagcctaatataaacaaatatttgtattatttttgttagcaggaaagagtgattaagtgaggttatttacccctaaatggtccattctgcattgtatttcaggctggaaatgaattattctttaccagttttgaaacactttgaaatatcctaaggtaacttggaagctgtgtagtatatcaaattaatttgctacctaataacatagaaagtaaatatctttgtggtcacccacattgggtgagacagaaaatgaatctgttctaaaatttgtaatttgctaacttgatttgagttagtgaaaactggtacagtgttctgcttgatttacaacatgtaacttgtgactgtacaataaacataagcatatggtaccaaaaaaaaaaaaaaaa

SEQ ID NO: 4764 - DNA, 6939 bp, Homo sapiens
agcctcagacgctgcgtggagcggcggagccggagggaagcaaaggaccgtctgcgctgctgtccccgccccgcgcgctctgcgcccctcgtccctggcggtcgctccgaagctcagccctcttgcctgccccggagctgtcccgggctagccgagaagagagcggccggcaagtttgggcgcgcgcaggcggcgggccgcgggcactgggcgcctcgctggggcggggggaggtggctaccgctcccggcttggcgtcccgcgcgcacttcggcgatggcttttccgccgcggcgacggctgcgcctcggtccccgcggcctcccgcttcttctctcgggactcctgctacctctgtgccgcgccttcaacctagacgtggacagtcctgccgagtactctggccccgagggaagttacttcggcttcgccgtggatttcttcgtgcccagcgcgtcttcccggatgtttcttctcgtgggagctcccaaagcaaacaccacccagcctgggattgtggaaggagggcaggtcctcaaatgtgactggtcttctacccgccggtgccagccaattgaatttgatgcaacaggcaatagagattatgccaaggatgatccattggaatttaagtcccatcagtggtttggagcatctgtgaggtcgaaacaggataaaattttggcctgtgccccattgtaccattggagaactgagatgaaacaggagcgagagcctgttggaacatgctttcttcaagatggaacaaagactgttgagtatgctccatgtagatcacgtcagcttatttcggatcaagtggcagaaatcgtatctaaatacgaccccaatgtttacagcatcaagtataataaccaattagcaactcggactgcacaagctatttttgatgacagctatttgggttattctgtggctgtcggagatttcaatggtgatggcatagatgactttgtttcaggagttccaagagcagcaaggactttgggaatggtttatatttatgatgggaagaacatgtcctccttatacaattttactggcgagcagatggctgcatatttcggattttctgtagctgccactgacattaatggagatgattatgcagatgtgtttattggagcacctctcttcatggatcgtggctctgatggcaaactccaagaggtggggcaggtctcagtgtctctacagagagcttcaggagacttccagacgacaaagctgaatggatttgaggtctttgcacggtttggcagtgccatagctcctttgggagatctggaccaggatggtttcaatgatattgcaattgctgctccatatgggggtgaagataaaaaaggaattgtttatatcttcaatggaagatcaacaggcttgaacgcagtcccatctcaaatccttgaagggcagtgggctgctcgaagcatgccaccaagctttggctattcaatgaaaggagccacagatatagacaaaaatggatatccagacttaattgtaggagcttttggtgtagatcgagctatcttatacagggccagaccagttatcactgtaaatgctggtcttgaagtgtaccctagcattttaaatcaagacaataaaacctgctcactgcctggaacagctctcaaagtttcctgttttaatgttaggttctgcttaaaggcagatggcaaaggagtacttcccaggaaacttaatttccaggtggaacttcttttggataaactcaagcaaaagggagcaattcgacgagcactgtttctctacagcaggtccccaagtcactccaagaacatgactatttcaagggggggactgatgcagtgtgaggaattgatagcgtatctgcgggatgaatctgaatttagagacaaactcactccaattactatttttatggaatatcggttggattatagaacagctgctgatacaacaggcttgcaacccattcttaaccagttcacgcctgctaacattagtcgacaggctcacattctacttgactgtggtgaagacaatgtctgtaaacccaagctggaagtttctgtagatagtgatcaaaagaagatctatattggggatgacaaccctctgacattgattgttaaggctcagaatcaaggagaaggtgcctacgaagctgagctcatcgtttccattccactgcaggctgatttcatcggggttgtccgaaacaatgaagccttagcaagactttcctgtgcatttaagacagaaaaccaaactcgccaggtggtatgtgaccttggaaacccaatgaaggctggaactcaactcttagctggtcttcgtttcagtgtgcaccagcagtcagagatggatacttctgtgaaatttgacttacaaatccaaagctcaaatctatttgacaaagtaagcccagttgtatctcacaaagttgatcttgctgttttagctgcagttgagataagaggagtctcgagtcctgatcatatctttcttccgattccaaactgggagcacaaggagaaccctgagactgaagaagatgttgggccagttgttcagcacatctatgagctgagaaacaatggtccaagttcattcagcaaggcaatgctccatcttcagtggccttacaaatataataataacactctgttgtatatccttcattatgatattgatggaccaatgaactgcacttcagatatggagatcaaccctttgagaattaagatctcatctttgcaaacaactgaaaagaatgacacggttgccgggcaaggtgagcgggaccatctcatcactaagcgggatcttgccctcagtgaaggagatattcacactttgggttgtggagttgctcagtgcttgaagattgtctgccaagttgggagattagacagaggaaagagtgcaatcttgtacgtaaagtcattactgtggactgagacttttatgaataaagaaaatcagaatcattcctattctctgaagtcgtctgcttcatttaatgtcatagagtttccttataagaatcttccaattgaggatatcaccaactccacattggttaccactaatgtcacctggggcattcagccagcgcccatgcctgtgcctgtgtgggtgatcattttagcagttctagcaggattgttgctactggctgttttggtatttgtaatgtacaggatgggcttttttaaacgggtccggccacctcaagaagaacaagaaagggagcagcttcaacctcatgaaaatggtgaaggaaactcagaaacttaactgcagtttttaagttatgctacatcttgacccactagaattagcaactttattatagatttaaactttcttcatgaggagtaaaaatccaaggctttactgctgatagtgctaattggcattaaccacaaaatgagaattatatttgtcaaccttctccttataaataagttcagacatacatttaataacatagggtgacttgtgtttttaggtatttaaataataaaatttcaagggatagtttttattcaatgtatataagacaggtagtgcctgatttactactttatataaaatagtacctccttcagttactgtttctgatttaatgtacggaactttatttgttgttgttgttgttgttgttgttgttgttttaaagcagtccaaatttggaccttagcaatcatgtcttttgtataggtacttaatgttaatacatattacactacagtttacttttcagaatactaaagactttataactgcatgaacttggatttttttaatcactcatatggtagaattttataaacacatacatgataccatccaaattcttgcttttaataacaaaggtacaatattttgttttagtatgaaaatctggtagatcctattacacttctgtttatattaaatccacaatattttattacatttttaacttgtataaattttaggtcaaatccttcaagccaacctatactaaaaattagttccataatcacaaatggctcttttgtgtaattgtttaatttcacctgaatatcataatgcttaaagccatatggagttggaaattatttccaaagcatatttattccattgttttagtctggctatttacagtataaaaaaagcatttttattaaaatactgtgtagttctttgagatagttgcttatgcatatagtaagtattacattcttagagtagagcagagtttttagttagtattaatttattttcctccattcatgtacttttccttatatttccaaaactgttactgagaatgggtcaagatcagtgagaaatctttacagttgacaggaacctggaccccttaccccaactttatgagtaatgcttggaataaaaactcttaaggcaactcactgatttacttctagcaatagcatgatgttacaggaatattacctctgtttaagcaaggtaatgtgtaaaatcagtctcggctgtcagaataacttctaaaaggtatttttataagcagttcaagttactgaaaaccttttaaacctttctgaagttcgttagtataaattacttttctaggattattaataaaagccacataggtggcaagttgtagttttatatggctctgtagagtggtgaaccttctagaggaatatatgatttattcacagttcctcaaggcctggggatgatgatcagttatacctatttttgtgcaattacatcatgttgtacattagaaatggagagtttaatagctctttaactgctgtcctcattaggtaatgataaatatttcccttaaataattgactattttgctgtgttttaaaaatgattgaaatttatcttgccatatctcataatttcatgcacaagttgactgagctaatcttgagaatatattcgtaaaataggagcacatttagttgaggtatacaaggtaggactctagacaaaaccttctattttagctttagtgaatttcaaaagtaatgggtcttggagtatagatttttattagtagcttgaaagagcttaatcatatgcagtaagtatttttattaccaataaatttaaaattttttaagaaaaatatttttatcctagggccaagtgttgcctgccaccaatcagtaagttagtctataacaaattttaccctaacagttttaccacctagtaacagtcatttctgaaaatatgttggatagaaagtcactctttggcaaaagtgttagaatttgcttttgtgccatctattccttttatggcatctatcttgaaagtaatcttgtattggagattgaaagatgctgtaatttagaaattaacatgatatcttaaattacctttatgaaatatagttttgtataatagcatagattttccttcaaaaaatgaacatttatatatctacaaaaatatggagaagagtaatttgaaagcctactttctgaagaaaatggtgggatttttttttatcatgattaaatatcaaaaaattgccctatgaaaactttaaatctctaaaacatttgaaatactaccatatttgtgatttattgagaataaaaatccattttgaaatgtaaaatttttatgatctgattcagttttaagaaaacatgaatgaactagaagatattaaaaacatttgacattggtaagaaatattgatactgatattgatttttatataggtatttatttcagaattgatattttgagaaaaatacatgtgagtcattttttctgtttctcttttctcttaacgattatcactgtaattctgaatctgaaaggtaaaacaattagtcaaaatattattgccatcattctacctgtgttatgaaactacttattcatagttaattctcattaacacttacatttccataaagaaaactcaagtattaataaaagagactttactggcttaagagggctgtgaaagatttttgatagtgaatcatgaccctaagggagagatttgtgtgataaaagtattgtatataatagatcagcgatttttgtaaggcaaacagaatttgtaagttggcagatcttcctaagttgcaaaatgtaatgatgagcttggtggagaagaatgagtcgttcttggaatacctatgtgcagccactacccatctcaatgtcaccttgtttgcattcttggatagcttgtatatgtagtagtttgatgaataatttaaagaaaaacacctaaaatttgaaaaatgattgtaggatcaaaaaaggcagatgaaattacttaatactcagtgttttggagagtattccttttagtttgttggttggctggtttgaacgatagaaatatgcagcatgcaatatatgcttatatttcattttaatttctgatatataatgaacttcttgggagaggtactgaatctttgatgttttttgtcattgttctcaagtgcaatataacaatgtaaccaaatctagataatttcaaagttgtcattaatttagtaagcctaatataaacaaatatttgtattatttttgttagcaggaaagagtgattaagtgaggttatttacccctaaatggtccattctgcattgtatttcaggctggaaatgaattattctttaccagttttgaaacactttgaaatatcctaaggtaacttggaagctgtgtagtatatcaaattaatttgctacctaataacatagaaagtaaatatctttgtggtcacccacattgggtgagacagaaaatgaatctgttctaaaatttgtaatttgctaacttgatttgagttagtgaaaactggtacagtgttctgcttgatttacaacatgtaacttgtgactgtacaataaacataagcatatggtaccaaaaaaaaaaaaaaaa

SEQ ID NO: 4765 - DNA, 4351 bp, Homo sapiens; identical to SEQ ID NO: 1913

SEQ ID NO: 4766 - DNA, 4303 bp, Homo sapiens
cccgccccttcgcggcgcttcctagttcggctggttcttctgtcgccggcttcagcagcccgcgcccgggcaggaatagaagatgaacaaacccataacaccatcaacatatgtgcgctgcctcaatgttggactaattaggaagctgtcagattttattgatcctcaagaaggatggaagaagttagctgtagctattaaaaaaccatctggtgatgatagatacaatcagtttcacataaggagatttgaagcattacttcaaactggaaaaagtcccacttctgaattactgtttgactggggcaccacaaattgcacagttggtgatcttgtggatcttttgatccaaaatgaattttttgctcctgcgagtcttttgctcccagatgctgttcccaaaactgctaatacactaccttctaaagaagctataacagttcagcaaaaacagatgcctttctgtgacaaagacaggacattgatgacacctgtgcagaatcttgaacaaagctatatgccacctgactcctcaagtccagaaaataaaagtttagaagttagtgatacacgttttcacagtttttcattttatgaattgaagaatgtcacaaataactttgatgaacgacccatttctgttggtggtaataaaatgggagagggaggatttggagttgtatataaaggctacgtaaataacacaactgtggcagtgaagaagcttgcagcaatggttgacattactactgaagaactgaaacagcagtttgatcaagaaataaaagtaatggcaaagtgtcaacatgaaaacttagtagaactacttggtttctcaagtgatggagatgacctctgcttagtatatgtttacatgcctaatggttcattgctagacagactctcttgcttggatggtactccaccactttcttggcacatgagatgcaagattgctcagggtgcagctaatggcatcaattttctacatgaaaatcatcatattcatagagatattaaaagtgcaaatatcttactggatgaagcttttactgctaaaatatctgactttggccttgcacgggcttctgagaagtttgcccagacagtcatgactagcagaattgtgggaacaacagcttatatggcaccagaagctttgcgtggagaaataacacccaaatctgatatttacagctttggtgtggttttactagaaataataactggacttccagctgtggatgaacaccgtgaacctcagttattgctagatattaaagaagaaattgaagatgaagaaaagacaattgaagattatattgataaaaagatgaatgatgctgattccacttcagttgaagctatgtactctgttgctagtcaatgtctgcatgaaaagaaaaataagagaccagacattaagaaggttcaacagctgctgcaagagatgacagcttcttaaaactttattggaaaagactcttgactttttatatacacctatctcaaccatttttttaactgatttttttcctaaatattcttctttacctttaacaaggcataggctgttgcaggacagtggttattaaagcatgggttgaacttccaaaatataaaaatagagccaccatatcaacacttagccctacccattagtatcacccccagttcttacagtaatccctgagaaatctccttcaagcatcaccaaacacagtttgaaaattacagggttagcaaaaagagcctgggctgtatgtagggtggaaacactctgatctgaagcccagctgactccactactaatttgctgtaaagctttggacatacacttagctgctgtgagccactaataacattgggctaatatctgctgtgcttctctgacaggtagtcatgaaaatcaaatgatgcaaaatatatacaagcactttgtaaattgtaaaatgatacaaaatttaaagtttatagagccagttacaaaatcctattagtcatatatttatagattgtgttcacagcaatcatttaaccacaaataaaatatcccttgatgatactgccataatgatatgtccattattagattatgttacatgacaaagttgaaggaatttggcagatgcagttaaggttcctaaacaactcactttgagactgttgaaagggcctgacctaatcaagtgaacccttgcaagaagaattctccttgtaagccttgaagaagtatgtgagagggccacattggctaaaacctaaaggtggcctctaggagatgagacctaccttccagttgtcagcaagcaggaaaaaaaaattgggacctcagttgcaaccacaaggaactgaattctgccaaaaatctgagtcagcttagaagagtactccaagcttcagatgataaccacagcctgggctgacacctggatttcagctttgcatgatcctcagtatgagaatctatctgttctgtgctggacttctaatatatagaactgtgagataatgggtcacattggctggatgtggtggctcatacctgtaaatcccagcactttgggaggccgaggcaggcagatcacctgaggtcaagagttcaagaccggcctggccaacatggtgaaaccccgtctctactaaaaatacaaaaattagacgagcgtggtggtggacacctgtagtcccagctacttgggaggctgaggcaggagactagctggaaccagggaggtagaggttgcagtgagctgagatcgtgccactgcactccagcctgggtgacagagtgagactccatcataaataaataaataaataaatgggtcacattaagcctttaagtttgtggtaatttattattcagtaatagaaaacaaatacagatactctcccatgatgtttttcccatgatgatttcccatgatatttacaggttttgcccacatttgaggggtatgtggaaattatacagagcatgtacagcgggaggcttatagtgtacgtactgaaatgtggggttggagccccaacacagagaccccagcaggacactgcctagtagagctatgggaagggtgctgccaccctccagacttgagaattgtagagccaccagcagcttgcactctgagcttggaaaagccacaggcactcaacttcaaccatgagggaagccacgcaccctgcaaagccacaggagtggagctgcccacggcctcgagggcccaccccttgcaccagtgtgccaggatgtgggacatggaatcaaggaatatgttagggcttttttttttttttttttgagacggagtcttgctctgttgcccaggctggagtgcagtggcacgatctcggctcactgcaagctctgcctcccaggttcacgccattcccctgcctcagcctccccagtagctgggactacaggtgcccgccaccatgcccagctaattttttttgtatttttagtagagatggggtttcactgtgttagccaggatggtcttgatctcctgacctcgtgatcacccgcctcggcctcccaaagtgccagtatttaaagtttaatgtcttcccagctgggtttcagacttgccaggatcctgttgcccctttctttagccaatttctcccttttgggacaagaatgttttacttattgcctgtaccaccaactgtatcttggaaataaataacttatattttatttcagaggctcataggcggcaggaacttaccttgagtctcaaatgagacttaggacttttgagtgatgctagaatgagttaagactttgggaagggatgattatattttgcaatgtgagaaagacattagatttggggggctgggggtagaatgacattgtttagatgtttgtctccttcaaatttcatgtttaaatgtaatccccagtgttgggggtggaggtggggcctgatgggaagtgtttgggtcatggtggatgatccctcatgaatggcttagagccactggtgatgagtgagttctcactcagttcgtgtgagatctggtggcttaaaagagtctgctccccctttgccttccattgtgattgtaaccttcctggggccttcatcaaaggccaggcaaatattggtgccgtgctagtatggcctgcagaaccgtaagccaaaacaaaccttttttctttataaattacccagcctcagttattcctttatagtgatgcaaaacgggctaactatataaatttgtaatttttaagttatagattgtttttattaaacacttatgaatactgttaaaaaaaaaa

SEQ ID NO: 4767 - DNA, 4205 bp, Homo sapiens
cccgccccttcgcggcgcttcctagttcggctggttcttctgtcgccggcttcagcagcccgcgcccgggcaggggcctggagcagtatctagcacaaagtagacactcagtaaatatttggaatagaagatgaacaaacccataacaccatcaacatatgtgcgctgcctcaatgttggactaattaggaagctgtcagattttattgatcctcaagaaggatggaagaagttagctgtagctattaaaaaaccatctggtgatgatagatacaatcagtttcacataagatgctgttcccaaaactgctaatacactaccttctaaagaagctataacagttcagcaaaaacagatgcctttctgtgacaaagacaggacattgatgacacctgtgcagaatcttgaacaaagctatatgccacctgactcctcaagtccagaaaataaaagtttagaagttagtgatacacgttttcacagtttttcattttatgaattgaagaatgtcacaaataactttgatgaacgacccatttctgttggtggtaataaaatgggagagggaggatttggagttgtatataaaggctacgtaaataacacaactgtggcagtgaagaagcttgcagcaatggttgacattactactgaagaactgaaacagcagtttgatcaagaaataaaagtaatggcaaagtgtcaacatgaaaacttagtagaactacttggtttctcaagtgatggagatgacctctgcttagtatatgtttacatgcctaatggttcattgctagacagactctcttgcttggatggtactccaccactttcttggcacatgagatgcaagattgctcagggtgcagctaatggcatcaattttctacatgaaaatcatcatattcatagagatattaaaagtgcaaatatcttactggatgaagcttttactgctaaaatatctgactttggccttgcacgggcttctgagaagtttgcccagacagtcatgactagcagaattgtgggaacaacagcttatatggcaccagaagctttgcgtggagaaataacacccaaatctgatatttacagctttggtgtggttttactagaaataataactggacttccagctgtggatgaacaccgtgaacctcagttattgctagatattaaagaagaaattgaagatgaagaaaagacaattgaagattatattgataaaaagatgaatgatgctgattccacttcagttgaagctatgtactctgttgctagtcaatgtctgcatgaaaagaaaaataagagaccagacattaagaaggttcaacagctgctgcaagagatgacagcttcttaaaactttattggaaaagactcttgactttttatatacacctatctcaaccatttttttaactgatttttttcctaaatattcttctttacctttaacaaggcataggctgttgcaggacagtggttattaaagcatgggttgaacttccaaaatataaaaatagagccaccatatcaacacttagccctacccattagtatcacccccagttcttacagtaatccctgagaaatctccttcaagcatcaccaaacacagtttgaaaattacagggttagcaaaaagagcctgggctgtatgtagggtggaaacactctgatctgaagcccagctgactccactactaatttgctgtaaagctttggacatacacttagctgctgtgagccactaataacattgggctaatatctgctgtgcttctctgacaggtagtcatgaaaatcaaatgatgcaaaatatatacaagcactttgtaaattgtaaaatgatacaaaatttaaagtttatagagccagttacaaaatcctattagtcatatatttatagattgtgttcacagcaatcatttaaccacaaataaaatatcccttgatgatactgccataatgatatgtccattattagattatgttacatgacaaagttgaaggaatttggcagatgcagttaaggttcctaaacaactcactttgagactgttgaaagggcctgacctaatcaagtgaacccttgcaagaagaattctccttgtaagccttgaagaagtatgtgagagggccacattggctaaaacctaaaggtggcctctaggagatgagacctaccttccagttgtcagcaagcaggaaaaaaaaattgggacctcagttgcaaccacaaggaactgaattctgccaaaaatctgagtcagcttagaagagtactccaagcttcagatgataaccacagcctgggctgacacctggatttcagctttgcatgatcctcagtatgagaatctatctgttctgtgctggacttctaatatatagaactgtgagataatgggtcacattggctggatgtggtggctcatacctgtaaatcccagcactttgggaggccgaggcaggcagatcacctgaggtcaagagttcaagaccggcctggccaacatggtgaaaccccgtctctactaaaaatacaaaaattagacgagcgtggtggtggacacctgtagtcccagctacttgggaggctgaggcaggagactagctggaaccagggaggtagaggttgcagtgagctgagatcgtgccactgcactccagcctgggtgacagagtgagactccatcataaataaataaataaataaatgggtcacattaagcctttaagtttgtggtaatttattattcagtaatagaaaacaaatacagatactctcccatgatgtttttcccatgatgatttcccatgatatttacaggttttgcccacatttgaggggtatgtggaaattatacagagcatgtacagcgggaggcttatagtgtacgtactgaaatgtggggttggagccccaacacagagaccccagcaggacactgcctagtagagctatgggaagggtgctgccaccctccagacttgagaattgtagagccaccagcagcttgcactctgagcttggaaaagccacaggcactcaacttcaaccatgagggaagccacgcaccctgcaaagccacaggagtggagctgcccacggcctcgagggcccaccccttgcaccagtgtgccaggatgtgggacatggaatcaaggaatatgttagggcttttttttttttttttttgagacggagtcttgctctgttgcccaggctggagtgcagtggcacgatctcggctcactgcaagctctgcctcccaggttcacgccattcccctgcctcagcctccccagtagctgggactacaggtgcccgccaccatgcccagctaattttttttgtatttttagtagagatggggtttcactgtgttagccaggatggtcttgatctcctgacctcgtgatcacccgcctcggcctcccaaagtgccagtatttaaagtttaatgtcttcccagctgggtttcagacttgccaggatcctgttgcccctttctttagccaatttctcccttttgggacaagaatgttttacttattgcctgtaccaccaactgtatcttggaaataaataacttatattttatttcagaggctcataggcggcaggaacttaccttgagtctcaaatgagacttaggacttttgagtgatgctagaatgagttaagactttgggaagggatgattatattttgcaatgtgagaaagacattagatttggggggctgggggtagaatgacattgtttagatgtttgtctccttcaaatttcatgtttaaatgtaatccccagtgttgggggtggaggtggggcctgatgggaagtgtttgggtcatggtggatgatccctcatgaatggcttagagccactggtgatgagtgagttctcactcagttcgtgtgagatctggtggcttaaaagagtctgctccccctttgccttccattgtgattgtaaccttcctggggccttcatcaaaggccaggcaaatattggtgccgtgctagtatggcctgcagaaccgtaagccaaaacaaaccttttttctttataaattacccagcctcagttattcctttatagtgatgcaaaacgggctaactatataaatttgtaatttttaagttatagattgtttttattaaacacttatgaatactgttaaaaaaaaaa

SEQ ID NO: 4768 - DNA, 4157 bp, Homo sapiens
cccgccccttcgcggcgcttcctagttcggctggttcttctgtcgccggcttcagcagcccgcgcccgggcaggaatagaagatgaacaaacccataacaccatcaacatatgtgcgctgcctcaatgttggactaattaggaagctgtcagattttattgatcctcaagaaggatggaagaagttagctgtagctattaaaaaaccatctggtgatgatagatacaatcagtttcacataagatgctgttcccaaaactgctaatacactaccttctaaagaagctataacagttcagcaaaaacagatgcctttctgtgacaaagacaggacattgatgacacctgtgcagaatcttgaacaaagctatatgccacctgactcctcaagtccagaaaataaaagtttagaagttagtgatacacgttttcacagtttttcattttatgaattgaagaatgtcacaaataactttgatgaacgacccatttctgttggtggtaataaaatgggagagggaggatttggagttgtatataaaggctacgtaaataacacaactgtggcagtgaagaagcttgcagcaatggttgacattactactgaagaactgaaacagcagtttgatcaagaaataaaagtaatggcaaagtgtcaacatgaaaacttagtagaactacttggtttctcaagtgatggagatgacctctgcttagtatatgtttacatgcctaatggttcattgctagacagactctcttgcttggatggtactccaccactttcttggcacatgagatgcaagattgctcagggtgcagctaatggcatcaattttctacatgaaaatcatcatattcatagagatattaaaagtgcaaatatcttactggatgaagcttttactgctaaaatatctgactttggccttgcacgggcttctgagaagtttgcccagacagtcatgactagcagaattgtgggaacaacagcttatatggcaccagaagctttgcgtggagaaataacacccaaatctgatatttacagctttggtgtggttttactagaaataataactggacttccagctgtggatgaacaccgtgaacctcagttattgctagatattaaagaagaaattgaagatgaagaaaagacaattgaagattatattgataaaaagatgaatgatgctgattccacttcagttgaagctatgtactctgttgctagtcaatgtctgcatgaaaagaaaaataagagaccagacattaagaaggttcaacagctgctgcaagagatgacagcttcttaaaactttattggaaaagactcttgactttttatatacacctatctcaaccatttttttaactgatttttttcctaaatattcttctttacctttaacaaggcataggctgttgcaggacagtggttattaaagcatgggttgaacttccaaaatataaaaatagagccaccatatcaacacttagccctacccattagtatcacccccagttcttacagtaatccctgagaaatctccttcaagcatcaccaaacacagtttgaaaattacagggttagcaaaaagagcctgggctgtatgtagggtggaaacactctgatctgaagcccagctgactccactactaatttgctgtaaagctttggacatacacttagctgctgtgagccactaataacattgggctaatatctgctgtgcttctctgacaggtagtcatgaaaatcaaatgatgcaaaatatatacaagcactttgtaaattgtaaaatgatacaaaatttaaagtttatagagccagttacaaaatcctattagtcatatatttatagattgtgttcacagcaatcatttaaccacaaataaaatatcccttgatgatactgccataatgatatgtccattattagattatgttacatgacaaagttgaaggaatttggcagatgcagttaaggttcctaaacaactcactttgagactgttgaaagggcctgacctaatcaagtgaacccttgcaagaagaattctccttgtaagccttgaagaagtatgtgagagggccacattggctaaaacctaaaggtggcctctaggagatgagacctaccttccagttgtcagcaagcaggaaaaaaaaattgggacctcagttgcaaccacaaggaactgaattctgccaaaaatctgagtcagcttagaagagtactccaagcttcagatgataaccacagcctgggctgacacctggatttcagctttgcatgatcctcagtatgagaatctatctgttctgtgctggacttctaatatatagaactgtgagataatgggtcacattggctggatgtggtggctcatacctgtaaatcccagcactttgggaggccgaggcaggcagatcacctgaggtcaagagttcaagaccggcctggccaacatggtgaaaccccgtctctactaaaaatacaaaaattagacgagcgtggtggtggacacctgtagtcccagctacttgggaggctgaggcaggagactagctggaaccagggaggtagaggttgcagtgagctgagatcgtgccactgcactccagcctgggtgacagagtgagactccatcataaataaataaataaataaatgggtcacattaagcctttaagtttgtggtaatttattattcagtaatagaaaacaaatacagatactctcccatgatgtttttcccatgatgatttcccatgatatttacaggttttgcccacatttgaggggtatgtggaaattatacagagcatgtacagcgggaggcttatagtgtacgtactgaaatgtggggttggagccccaacacagagaccccagcaggacactgcctagtagagctatgggaagggtgctgccaccctccagacttgagaattgtagagccaccagcagcttgcactctgagcttggaaaagccacaggcactcaacttcaaccatgagggaagccacgcaccctgcaaagccacaggagtggagctgcccacggcctcgagggcccaccccttgcaccagtgtgccaggatgtgggacatggaatcaaggaatatgttagggcttttttttttttttttttgagacggagtcttgctctgttgcccaggctggagtgcagtggcacgatctcggctcactgcaagctctgcctcccaggttcacgccattcccctgcctcagcctccccagtagctgggactacaggtgcccgccaccatgcccagctaattttttttgtatttttagtagagatggggtttcactgtgttagccaggatggtcttgatctcctgacctcgtgatcacccgcctcggcctcccaaagtgccagtatttaaagtttaatgtcttcccagctgggtttcagacttgccaggatcctgttgcccctttctttagccaatttctcccttttgggacaagaatgttttacttattgcctgtaccaccaactgtatcttggaaataaataacttatattttatttcagaggctcataggcggcaggaacttaccttgagtctcaaatgagacttaggacttttgagtgatgctagaatgagttaagactttgggaagggatgattatattttgcaatgtgagaaagacattagatttggggggctgggggtagaatgacattgtttagatgtttgtctccttcaaatttcatgtttaaatgtaatccccagtgttgggggtggaggtggggcctgatgggaagtgtttgggtcatggtggatgatccctcatgaatggcttagagccactggtgatgagtgagttctcactcagttcgtgtgagatctggtggcttaaaagagtctgctccccctttgccttccattgtgattgtaaccttcctggggccttcatcaaaggccaggcaaatattggtgccgtgctagtatggcctgcagaaccgtaagccaaaacaaaccttttttctttataaattacccagcctcagttattcctttatagtgatgcaaaacgggctaactatataaatttgtaatttttaagttatagattgtttttattaaacacttatgaatactgttaaaaaaaaaa

SEQ ID NO: 4769 - DNA, 3987 bp, Homo sapiens
cccgccccttcgcggcgcttcctagttcggctggttcttctgtcgccggcttcagcagcccgcgcccgggcagatgctgttcccaaaactgctaatacactaccttctaaagaagctataacagttcagcaaaaacagatgcctttctgtgacaaagacaggacattgatgacacctgtgcagaatcttgaacaaagctatatgccacctgactcctcaagtccagaaaataaaagtttagaagttagtgatacacgttttcacagtttttcattttatgaattgaagaatgtcacaaataactttgatgaacgacccatttctgttggtggtaataaaatgggagagggaggatttggagttgtatataaaggctacgtaaataacacaactgtggcagtgaagaagcttgcagcaatggttgacattactactgaagaactgaaacagcagtttgatcaagaaataaaagtaatggcaaagtgtcaacatgaaaacttagtagaactacttggtttctcaagtgatggagatgacctctgcttagtatatgtttacatgcctaatggttcattgctagacagactctcttgcttggatggtactccaccactttcttggcacatgagatgcaagattgctcagggtgcagctaatggcatcaattttctacatgaaaatcatcatattcatagagatattaaaagtgcaaatatcttactggatgaagcttttactgctaaaatatctgactttggccttgcacgggcttctgagaagtttgcccagacagtcatgactagcagaattgtgggaacaacagcttatatggcaccagaagctttgcgtggagaaataacacccaaatctgatatttacagctttggtgtggttttactagaaataataactggacttccagctgtggatgaacaccgtgaacctcagttattgctagatattaaagaagaaattgaagatgaagaaaagacaattgaagattatattgataaaaagatgaatgatgctgattccacttcagttgaagctatgtactctgttgctagtcaatgtctgcatgaaaagaaaaataagagaccagacattaagaaggttcaacagctgctgcaagagatgacagcttcttaaaactttattggaaaagactcttgactttttatatacacctatctcaaccatttttttaactgatttttttcctaaatattcttctttacctttaacaaggcataggctgttgcaggacagtggttattaaagcatgggttgaacttccaaaatataaaaatagagccaccatatcaacacttagccctacccattagtatcacccccagttcttacagtaatccctgagaaatctccttcaagcatcaccaaacacagtttgaaaattacagggttagcaaaaagagcctgggctgtatgtagggtggaaacactctgatctgaagcccagctgactccactactaatttgctgtaaagctttggacatacacttagctgctgtgagccactaataacattgggctaatatctgctgtgcttctctgacaggtagtcatgaaaatcaaatgatgcaaaatatatacaagcactttgtaaattgtaaaatgatacaaaatttaaagtttatagagccagttacaaaatcctattagtcatatatttatagattgtgttcacagcaatcatttaaccacaaataaaatatcccttgatgatactgccataatgatatgtccattattagattatgttacatgacaaagttgaaggaatttggcagatgcagttaaggttcctaaacaactcactttgagactgttgaaagggcctgacctaatcaagtgaacccttgcaagaagaattctccttgtaagccttgaagaagtatgtgagagggccacattggctaaaacctaaaggtggcctctaggagatgagacctaccttccagttgtcagcaagcaggaaaaaaaaattgggacctcagttgcaaccacaaggaactgaattctgccaaaaatctgagtcagcttagaagagtactccaagcttcagatgataaccacagcctgggctgacacctggatttcagctttgcatgatcctcagtatgagaatctatctgttctgtgctggacttctaatatatagaactgtgagataatgggtcacattggctggatgtggtggctcatacctgtaaatcccagcactttgggaggccgaggcaggcagatcacctgaggtcaagagttcaagaccggcctggccaacatggtgaaaccccgtctctactaaaaatacaaaaattagacgagcgtggtggtggacacctgtagtcccagctacttgggaggctgaggcaggagactagctggaaccagggaggtagaggttgcagtgagctgagatcgtgccactgcactccagcctgggtgacagagtgagactccatcataaataaataaataaataaatgggtcacattaagcctttaagtttgtggtaatttattattcagtaatagaaaacaaatacagatactctcccatgatgtttttcccatgatgatttcccatgatatttacaggttttgcccacatttgaggggtatgtggaaattatacagagcatgtacagcgggaggcttatagtgtacgtactgaaatgtggggttggagccccaacacagagaccccagcaggacactgcctagtagagctatgggaagggtgctgccaccctccagacttgagaattgtagagccaccagcagcttgcactctgagcttggaaaagccacaggcactcaacttcaaccatgagggaagccacgcaccctgcaaagccacaggagtggagctgcccacggcctcgagggcccaccccttgcaccagtgtgccaggatgtgggacatggaatcaaggaatatgttagggcttttttttttttttttttgagacggagtcttgctctgttgcccaggctggagtgcagtggcacgatctcggctcactgcaagctctgcctcccaggttcacgccattcccctgcctcagcctccccagtagctgggactacaggtgcccgccaccatgcccagctaattttttttgtatttttagtagagatggggtttcactgtgttagccaggatggtcttgatctcctgacctcgtgatcacccgcctcggcctcccaaagtgccagtatttaaagtttaatgtcttcccagctgggtttcagacttgccaggatcctgttgcccctttctttagccaatttctcccttttgggacaagaatgttttacttattgcctgtaccaccaactgtatcttggaaataaataacttatattttatttcagaggctcataggcggcaggaacttaccttgagtctcaaatgagacttaggacttttgagtgatgctagaatgagttaagactttgggaagggatgattatattttgcaatgtgagaaagacattagatttggggggctgggggtagaatgacattgtttagatgtttgtctccttcaaatttcatgtttaaatgtaatccccagtgttgggggtggaggtggggcctgatgggaagtgtttgggtcatggtggatgatccctcatgaatggcttagagccactggtgatgagtgagttctcactcagttcgtgtgagatctggtggcttaaaagagtctgctccccctttgccttccattgtgattgtaaccttcctggggccttcatcaaaggccaggcaaatattggtgccgtgctagtatggcctgcagaaccgtaagccaaaacaaaccttttttctttataaattacccagcctcagttattcctttatagtgatgcaaaacgggctaactatataaatttgtaatttttaagttatagattgtttttattaaacacttatgaatactgttaaaaaaaaaa

SEQ ID NO: 4770 - DNA, 3595 bp, Homo sapiens; identical to SEQ ID NO: 626

SEQ ID NO: 4771 - DNA, 2738 bp, Homo sapiens; identical to SEQ ID NO: 1725

SEQ ID NO: 4772 - DNA, 11628 bp, Homo sapiens
aacctctccgcgcgaagacggcttcagccctgcagggaaagaaaagtgcaatgattctggactgagacgcgcttgggcagaggctatgtaatcgtgtctgtgttgaggacttcgcttcgaggagggaagaggagggatcggctcgctcctccggcggcggcggcggcggcgactctgcaggcggagtttcgcggcggcggcaccagggttacgccagccccgcggggaggtctctccatccagcttctgcagcggcgaaagccccagcgcccgagcgcctgagccggcggggagcaagtaaagctagaccgatctccggggagccccggagtaggcgagcggcggccgccagctagttgagcgcaccccccgcccgccccagcggcgccgcggcgggcggcgtccaggcggcatggagaaggacggcctgtgccgcgctgaccagcagtacgaatgcgtggcggagatcggggagggcgcctatgggaaggtgttcaaggcccgcgacttgaagaacggaggccgtttcgtggcgttgaagcgcgtgcgggtgcagaccggcgaggagggcatgccgctctccaccatccgcgaggtggcggtgctgaggcacctggagaccttcgagcaccccaacgtggtcaggttgtttgatgtgtgcacagtgtcacgaacagacagagaaaccaaactaactttagtgtttgaacatgtcgatcaagacttgaccacttacttggataaagttccagagcctggagtgcccactgaaaccataaaggatatgatgtttcagcttctccgaggtctggactttcttcattcacaccgagtagtgcatcgcgatctaaaaccacagaacattctggtgaccagcagcggacaaataaaactcgctgacttcggccttgcccgcatctatagtttccagatggctctaacctcagtggtcgtcacgctgtggtacagagcacccgaagtcttgctccagtccagctacgccacccccgtggatctctggagtgttggctgcatatttgcagaaatgtttcgtagaaagcctctttttcgtggaagttcagatgttgatcaactaggaaaaatcttggacgtgattggactcccaggagaagaagactggcctagagatgttgcccttcccaggcaggcttttcattcaaaatctgcccaaccaattgagaagtttgtaacagatatcgatgaactaggcaaagacctacttctgaagtgtttgacatttaacccagccaaaagaatatctgcctacagtgccctgtctcacccatacttccaggacctggaaaggtgcaaagaaaacctggattcccacctgccgcccagccagaacacctcggagctgaatacagcctgaggcctcagcagccgccttaagctgatcctgcggagaacacccttggtggcttatgggtccccctcagcaagccctacagagctgtggaggattgctatctggaggccttccagctgctgtcttctggacaggctctgcttctccaaggaaaccgcctagtttactgttttgaaatcaatgcaagagtgattgcagctttatgttcatttgtttgtttgtttgtctgtttgtttcaagaacctggaaaaattccagaagaagagaagctgctgaccaattgtgctgccatttgatttttctaaccttgaatgctgccagtgtggagtgggtaatccaggcacagctgagttatgatgtaatctctctgcagctgccgggcctgatttggtacttttgagtgtgtgtgtgcatgtgtgtgtgtgtgtgtgtgtgtgtgtgtgtgtatgtgagagattctgtgatcttttaaagtgttactttttgtaaacgacaagaataattcaattttaaagactcaaggtggtcagtaaataacaggcatttgttcactgaaggtgattcaccaaaatagtcttctcaaattagaaagttaaccccatgtcctcagcatttcttttctggccaaaagcagtaaatttgctagcagtaaaagatgaagttttatacacacagcaaaaaggagaaaaaattctagtatattttaagagatgtgcatgcattctatttagtcttcagaatgctgaatttacttgttgtaagtctattttaaccttctgtatgacatcatgctttatcatttcttttggaaaatagcctgtaagctttttattacttgctataggtttagggagtgtacctcagatagattttaaaaaaaagaatagaaagcctttatttcctggtttgaaattcctttcttccctttttttgttgttgttattgttgtttgttgttgttattttgtttttgtttttaggaatttgtcagaaactctttcctgttttggtttggagagtagttctctctaactagagacaggagtggccttgaaattttcctcatctattacactgtactttctgccacacactgccttgttggcaaagtatccatcttgtctatctcccggcacttctgaaatatattgctaccattgtataactaataacagattgcttaagctgttcccatgcaccacctgtttgcttgctttcaatgaacctttcataaattcgcagtctcagcttatggtttatggcctcgattctgcaaacctaacagggtcacatatgttctctaatgcagtccttctacctggtgtttacttttgttacctaaataatgagtaggatcttgttttgttttatcaccagcacacagattgctataaactgttactttgtgaattacatttttatagaagatattttcagtgtctttacctgagggtatgtctttagctatgttttagggccatacatttactctatcaaatgatcttttctccatcccccaggctgtgcttatttctagtgccttgtgctcactcctgctctctacagagccagcctggcctgggcattgtaaacagcttttcctttttctcttactgttttctctacagtcctttatatttcataccatctctgccttataagtggtttagtgctcagttggctctagtaaccagaggacacagaaagtatcttttggaaagtttagccacctgtgctttctgactcagagtgcatgcaacagttagatcatgcaacagttagattatgtttagggttaggattttcaaagaatggaggttgctgcactcagaaaataattcagatcatgtttatgcattattaagttgtactgaattctttgcagcttaatgtgatatatgactatcttgaacaagagaaaaaactaggagatgtttctcctgaagagcttttggggttgggaactattcttttttaattgctgtactacttaacattgttctaattcagtagcttgaggaacaggaacattgttttctagagcaagataataaaggagatgggccatacaaatgttttctactttcgttgtgacaacattgattaggtgttgtcagtactataaatgcttgagatataatgaatccacagcattcaaggtcaggtctactcaaagtctcacatggaaaagtgagttctgcctttcctttgatcgagggtcaaaatacaaagacatttttgctagggcctacaaattgaatttaaaaactcactgcactgattcatctgagctttttggttagtattcatggctagagtgaacatagctttagtttttgctgttgtaaaagtgttttcataagttcactcaagaaaaatgcagctgttctgaactggaatttttcagcattctttagaattttaaatgagtagagagctcaacttttattcctagcatctgcttttgactcatttctaggcagtgcttatgaagaaaaattaaagcacaaacattctggcattcaatcgttggcagattatcttctgatgacacagaatgaaagggcatctcagcctctctgaactttgtaaaaatctgtccccagttcttccatcggtgtagttgttgcatttgagtgaatactctcttgatttatgtattttatgtccagattcgccatttctgaaatccagatccaacacaagcagtcttgccgttagggcattttgaagcagatagtagagtaagaacttagtgactacagcttattcttctgtaacatatggtttcaaacatctttgccaaaagctaagcagtggtgaactgaaaagggcatattgccccaaggttacactgaagcagctcatagcaagttaaaatattgtgacagatttgaaatcatgtttgaatttcatagtaggaccagtacaagaatgtccctgctagtttctgtttgatgtttggttctggcggctcaggcattttgggaactgttgcacagggtggagtcaaaacaacctacatataaaaagagaaaaagagaaacttgtccatttagctttcataagaaatcccatggcaaagggtaataaaaaggacctaatcttaaaaatacaatttctaagcacttgtaagaacccagtgggttggagcctcccactttgtccctcctttgaagtggatgggaactcaaggtgcaaagaacctgttttggaagaaagcttggggccatttcagccccctgtattctcatgattttctctcaggaagcacacactgtgaatggcagacttttcatttagccccaggtgacttactaaaaatagttgaaaattattcacctaagaatagaatctcagcattgtgttaaataaaaatgaaagctttagaaggcatgagatgttcctatcttaaataaagcatgtttcttttctatagagaaatgtatagtttgactctccagaatgtactatccatcttgatgagaaaactcttaaatagtaccaaacattttgaactttaaattatgtatttaaagtgagtgtttaagaaactgtagctgcttcttttacaagtggtgcctattaaagtcagtaatggccattattgttccattgtggaaattaaattatgtaagcttcctaatatcataaacatattaaaattcttctaaaatattgcttttcttttaagtgacaatttgactattcttatgataagcacatgagagtgtcttacattttccaaaagcaggctttaattgcatagttgagtctaggaaaaaataatgttaaaagtgaatatgccaccataattacttaattatgttagtatagaaactacagaatatttaccctggaaagaaaatattggaatgttattataaactcttagatatttatataattcaaaagaatgcatgtttcacattgtgacagataaagatgtatgatttctaaggctttaaaaattattcataaaacagtgggcaatagataaaggaaattctggagaaaatgaaggtatttaaagggtagtttcaaagctatatatattttgaaggatatattctttatgaacaaatatattgtaaaaatttatactaaggtcatctggtaactgtgggattaatatggtcgaaaacaaatgttatggagaagctgtcccaagcaaactaaattacctgtacttttttcccatttcaagggaagaggcaaccacatgaagcaatacttcttacacatgcctaagaacgttcattgaaaaaataaatttttaaaaggcatgtgtttcctatgccaccaatacttttgaaaaattgtgaaccttacccaaaaccatttatcatgtccattaagtatatttgggtatataattaggaagatatttacatgttccatctccacagtggaaaaacttattgaggctaccaaagtgtgccaagaaatgtaagtccttagagtaattagaaatgctgttttcctcaaaagcatgagaaactagcattttcatttcttatttactccctttctatatcaatgcaattcacaacccaattttaatacatccctatatctcaagcatttctatcttgtactttttcagaaaataaaccaaaaataatcctttggtctctctatcttctgacctttgtaagcaacagaaatgtaaaaacagaaggggtccaatttttacacgtttttttctcaagtagcctttctggggatttttattttcttaatgaagtgccaatcagcttttcaaaatgttttctatttctcagcatttccaggaagtgataacgtttagctaaatgagtagaagtggacttccttcaacatattgttaccttgtctagccttaggaagaaaacaagagccacctgaaaataaatacaggctcttttcgagcatctgctgaaatactgttacagcaatttgaagttgatgtggtaggaaaggaaggtgacttttcttgcaaaagtctttctaaacattcacactgtcctaagagatgagctttcttgttttattccggtatattccacaaggtggcacttttagagaaaaacaaatctgatgaagactaaagaggtacttctaaaagagatttcattctaactttatttttctgcgcatatttaactctttcctagcacttgttttttgggatgattaatagtctctataatgttctgtaacttcaatattttacttgttacctaggttctgaacaattgtctgcaaataaattgttcttaaggatggataatacacccattttgatcatttaagtaaagaaagcctagtcattcattcagtcaagaaaaaatttttgaagtacccagttaccttacttttctagattaaaacaggcttagttactaaaaaggcagtcctcatctgtgaacaggatagtttcgttagaagtataaaactcctttagtggccccagttaaaacacacataccctctctgctgctttcaaattccctagcatggtggcctttcaacattgattaaattttaaaatcctaatttaaagatcaggtgagcaaaatgagtagcacatcagtaattcagtagacaaaacttttgtctgaaaaattgctgtattgaaacagagccctaaaataccaaaagaccaggtaattttaacatttgtggaatcacaaatgtaaattcataagaagctctaattaaaaaaaaaaagtctgaagtatatgagcataacaacttaggagtgtgtctacatacttaacttttgaagttttttggcaactttatatactttttttaaatttacaagtctacttaaagacttcttataccccaaatgattaagttaattttagaggtcacctttctcacagcagtgtcacttgaaatttagtagggaaggatattgcagtatttttcagtttccttagcacagcaccacagaaagcagcttattccttttgagtggcagacactcgacggtgcctgcccaactttcctcctgagtggcaagcagatgagtctcagtaattcatactgaaccaaaatgccacatacactaggggcagtcagaaactggctgagaaatcccccgcctcattcgcccctctgctcccaggaactagagtccagttaaagcccctatgcgaaaggccgaattccaccccagggtttgttataacagtggccagtctgaaccccatttgctcgtgctcaaaacttgattcccacttgaaagccttccgggcgcgctgcctcgttgccccgcccctttggcaggagagaggcagtgggcgaggccgggctggggccccgcctcccactcacctgccggtgcctgaaattatgtgcggccccgcgggctgctttccgaggtcagagtgccctgctgctgtctcagaggcatctgttctgcaaatcttaggaagaaaaatgtccctagtagcaaacgggtgtcttctgtgcataaataagtacaacacaattctccgaaagttcgggtaaaaagagatgcggtagcagctgccctgtgtgaagctgtctaccccgcatctctcaggcgctaagctcagtttttgtttttgtttttgtttttttaaagaaaagatgtataattgcaggaatttttttttatttttttattttccatcattctatatatgtgatggtgaaagatatgcctggaaaagttttgttttgaaaagtttattttctgcttcgtcttcagttggcaaaagctctcaattctttagcttccagtttcttttctctctttttctttgttaggtaattaaaggtatgtaaacaaattatctcatgtagcaggggattttcatgttgagaggaatcttccgtgtgagttgtttggtcacacaaataaccctttctcaattttaggagtttggattgtcaaatgtaggtttttctcaaagggggcatataactacatattgactgccaagaactatgactgtagcactaatcagcacacatagagccacacaattatttaatttctaactctctgtggtccctagaaaaattccgttgatgtgcttaggttaaagttctgaagatacccgttgtacccttacttgaaagtttctaatcttaagttttatgaaatgcaataatatgtatcagctagcaatatttctgtgatcaccaacaactctcagtttgatcttaaagtctgaataataaaacaaatcccagcagtaatacatttcttaaacctcacagtgcatgatatatcttttcattctgatcctgtgtttgcaaaaatatacacatgtatatcatagttcctcactttttattcatttgttttcctattacctgtagtaaatatattagttagtacatggaatttatagcatcagctacccccaggaacagcacctgacaggcgggggattttttttcaagttgttctacatttgcataaattatttctattattattcatgtatgttatttatttctgaatcacactagtcctgtgaaagtacaactgaaggcagaaagtgttaggattttgcatctaatgttcattatcatggtattgatggacctaagaaaataaaaattagactaagcccccaaataagctgcatgcatttgtaacatgattagtagatttgaatatatagatgtagtattttgggtatctaggtgttttatcattatgtaaaggaattaaagtaaaggactttgtagttgtttttattaaatatgcatatagtagagtgcaaaaatatagcaaaaataaaaactaaaggtagaaaagcattttagatatgccttaatttagaaactgtgccaggtggccctcggaatagatgccaggcagagaccagtgcctgggtggtgcctcctcttgtctgccctcatgaagaagcttccctcacgtgatgtagtgccctcgtaggtgtcatgtggagtagtgggaacaggcagtactgttgagaggagagcagtgtgagagtttttctgtagaagcagaactgtcagcttgtgccttgaggcttccagaacgtgtcagatggagaagtccaagtttccatgcttcaggcaacttagctgtgtacagaagcaatccagtgtggtaataaaaagcaaggattgcctgtataatttattataaaataaaagggattttaacaaccaacaattcccaacacctcaaaagcttgttgcattttttggtatttgaggtttttatctgaaggttaaagggcaagtgtttggtatagaagagcagtatgtgttaagaaaagaaaaatattggttcacgtagagtgcaaattagaactagaaagttttatacgattatcattttgagatgtgttaaagtaggttttcactgtaaaatgtattagtgtttctgcattgccatagggcctggttaaaactttctcttaggtttcaggaagactgtcacatacagtaagcttttttccttctgacttataatagaaaatgttttgaaagtaaaaaaaaaaaatctaatttggaaatttgacttgttagtttctgtgtttgaaatcatggttctagaaatgtagaaattgtgtatatcagatactcatctaggctgtgtgaaccagcccaagatgaccaacatccccacacctctacatctctgtcccctgtatctcttcctttctaccactaaagtgttccctgctaccatcctggcttgtccacatggtgctctccatcttcctccacatcatggaccacaggtgtgcctgtctaggcctggccaccactcccaacttgacctagccacattcatctagagatggttcctgatgctgggcacagactgtgctcatggcacccattagaaatgcctctagcatctttgtatgcatcttgatttttaaaccaagtcattgtacagagcattcagttttggctgtggtaccaagagaaaaactaatcaagaatataaaccacattccaggctgctgttttctctccatctacaggccacacttttactgtatttcttcatacttgaaattcattctgctattttcatatcagggtacagacttataagggtgcatgttccttaaaggtgcataattattcttattccgtttgcttatattgctacagaatgctctgttttggtgctttgagttctgcagacccaagaagcagtgtggaaattcactgcctgggacacagtcttataagaatgttggcaggtgactttgtatcagatgttgcttctcttttctctgtacacagattgagagttaccacagtggcctgtcgggtccaccctgtgggtgcagcacagctctctgaaagcaagaaccttcctacctattctaacgtttttgccctctaagaaaaatggcctcaggtatggtatagacatagcaagaggggaagggctgtctcactctagcaaccatccctccattacacacagaaagccctcttgaagcaaaagaagaagaaagaaagaaagcttatctctaaggctactgtcttcagaatgctctgagctgaatgctcttgctcctttcccaagaggcagatgaaaatatagccagtttatctatacccttcctatctgaggaggagaatagaaaagtagggtaaatatgtaacgtaaaatatgtcattcaaggaccaccaaaactttaagtaccctatcattaaaaatctggttttaaaagtagctcaagtaagggatgctttgtgacccagggtttctgaagtcagatagccattcttacctgccccttactctgacttattgggaaagggagaactgcagtggtgtttctgttgcagtggcaaaggtaacatgtcagaaaattcagagggttgcataccaataatcctttggaaactggatgtcttactgggtgctagaatgaaaatgtaggtatttattgtcagatgatgaagttcattgtttttttcaaaattggtgttgaaatatcactgtccaatgtgttcacttatgtgaaagctaaattgaatgaggcaaaaagagcaaatagtttgtatatttgtaataccttttgtatttcttacaataaaaatattggtagcaaataaaaataataaaaacaataactttaaactgctttctggagatgaattactctcctggctattttcttttttactttaatgtaaaatgagtataactgtagtgagtaaaattcattaaattccaagttttagcagaaaaaaaaaaaaaaaaaa

SEQ ID NO: 4773 - DNA, 11733 bp, Homo sapiens; identical to SEQ ID NO: 1523

SEQ ID NO: 4774 - DNA, 3269 bp, Homo sapiens
agaacctcgcgcacgcgcagtgaaaacccagggcccgcgaagcgtccgaagtcccttcccaccgcccggcttcgcctccagttctcggggaactgtacggcccagtcactcccgcctcgtcacccccgccaggtttcccccgccctctccggccggggctggtcgcgactgcgcgcgcagggcctgagcgggcgccggagggaaggggaagcggcggggtagtaacagattatgggcaacagtccttttaattaatctaccgtcatcatggctaatgaggactgtcccaaggctgctgatagtcctttttcatcagataaacatgcccaactcatcttggcccaaatcaataagatgagaaatggacagcatttctgtgatgtgcagctgcaagttggacaggaaagttttaaagctcatcggctggttttggctgccagcagtccttactttgcagctttgttcactggaggaatgaaagagtcctcaaaagatgttgtaccgattctaggaattgaagcaggaatctttcagatacttctagatttcatttacacaggtatagtgaacataggtgtgaataatgtccaggagttgattattgcagcagacatgctacagttgactgaagttgttcatctttgctgtgaatttctgaaaggacaaattgatccactgaactgcattggaatttttcagttctctgagcaaattgcctgccatgatctcttggaattctcagaaaactacattcatgtccatttcttggaggttcatagtggagaagagttcctggcacttacgaaagatcagctgatcaaaattttgcgaagtgaagagcttagcattgaggatgaataccaggtcttcttagctgcaatgcaatggattctgaaagatttgggaaaaagaagaaaacatgtggtggaagtgctagacccaattcgattccctttattacctcctcagagacttttaaagtatatagaaggagtatccgattttaatcttcgtgttgcattgcaaacacttctgaaagagtactgtgaagtatgcaaatctcccaaagagaacaagttttgtagttttctgcagacatctaaggttcgacctcggaagaaagcaagaaagtacctgtatgcagtaggtggatatactcggttgcaggggggtcgctggagtgatagcagagccctcagctgtgtagaacgttttgacacctttagccagtactggaccactgtgtcttcacttcatcaggctcgaagtgggctgggagtaacagttctgggagggatggtctacgctattggaggtgaaaaggattcaatgatttttgattgtactgaatgctatgatccagttactaaacagtggacaactgtagcttcgatgaatcatccccgctgcggcttaggagtgtgtgtgtgttatggggctatctatgctttgggtggatgggttggagctgagatagggaacaccattgaacgatttgatcctgatgaaaataaatgggaagtagttggtaacatggctgtgtcacgctactactttgggtgctgtgaaatgcaaggtttaatttatgtaattgggggcatcagcaatgaaggaatagaacttcgttcttttgaagtctatgatccactttctaagcgttggtctccacttcctccaatgggaaccaggagagcatatcttggtgtggctgcactcaatgactgcatctattctgttggaggatggaatgagacccaagatgctcttcatactgtagaaaaatattcctttgaagaggaaaagtgggttgaagttgcctcaatgaaagtgcctagagcaggcatgtgtgttgtggcagtcaatggtcttctgtatgtttctggaggtcgatcttccagccatgattttttggctccaggtaccttggactcagttgaagtttataaccctcattcagatacatggacagaaattggtaacatgatcaccagtcgttgtgaagggggcgttgctgtgctatgaaatataaagcataacagagcacaaggaacattttgaaaatgcaggacctgaccttttgcaaagcaaacatagatttggtgataagaccctctgattctgtgagttttccatgtatttggtagataaatgactaacgaggctgggcgcagtggcctcatgcctataatcccagcactttggaaggctgaggcagaaggatcacttgagcccaggaatttgaggttgtagtaagctacgatcatgccactgcactccactctgggcaacagaatgagatcctgtctcttaaagaaaaaaaataaactcaagaatgatttttctaaaaatatgagtgagaatggatatggaatatatcccaattaataaagagctcacacagatttgccaggtttactaataatagaaatgccatttatgctgtagaattctccagtttaagtgtagacaactcctattttacaaatttgtagaaattatttactagaagcttcctggcaaatagtccctttagctacttctccagtgcagtataaattgtaacataaaactttatgtgatataggaatagtgtcaatgacacagtttaaagacctctatattcacaattatatccagagcataattttccatggccatagtttgagccacagagaaagccaatgaaatagattcctacttttatttaatgccaagagttttcactagccccaaactttttattggcagcagatatcctaggaggggtgtttgggaaatatctagctattttaatagatagatacctttttgcttgatgataagtttttgcttgctcatattttttgtcttgatcctgagaatgcaagtaaggaattaataggaggttcttagtgaccagatgttgtaatgggctatacagtccagcaggcagtatgcacctagaaatttctcccttttttaggctgggcatggtggctcacacctgtaatcccagcactttgagaggccgaggtgagacgggaagatggcttgaactcaggagttcgagactagcctgggcaacgtgatgagactccgtctctaccaaaaaatatataaaaattagccgggcgttgtggcttgtacctgtggtcccatctgcttgggaggctgaggttgcaggatcacttgagcccaggaggtcaaggctgcagtgagccaagattgtgccactgcacaccggcctgggtgacagcatgagaacctgtctcaaaaaaaaaaaaaaaaaa

SEQ ID NO: 4775 - DNA, 2121 bp, Homo sapiens
agaacctcgcgcacgcgcagtgaaaacccagggcccgcgaagcgtccgaagtcccttcccaccgcccggcttcgcctccagttctcggggaactgtacggcccagtcactcccgcctcgtcacccccgccaggtttcccccgccctctccggccggggctggtcgcgactgcgcgcgcagggcctgagcgggcgccggagggaaggggaagcggcggggtagtaacagattatgggcaacagtccttttaattaatctaccgtcatcatggctaatgaggactgtcccaaggctgctgatagtcctttttcatcagataaacatgcccaactcatcttggcccaaatcaataagatgagaaatggacagcatttctgtgatgtgcagctgcaagttggacaggaaagttttaaagctcatcggctggttttggctgccagcagtccttactttgcagctttgttcactggaggaatgaaagagtcctcaaaagatgttgtaccgattctaggaattgaagcaggaatctttcagatacttctagatttcatttacacaggtatagtgaacataggtgtgaataatgtccaggagttgattattgcagcagacatgctacagttgactgaagttgttcatctttgctgtgaatttctgaaaggacaaattgatccactgaactgcattggaatttttcagttctctgagcaaattgcctgccatgatctcttggaattctcagaaaactacattcatgtccatttcttggaggttcatagtggagaagagttcctggcacttacgaaagatcagctgatcaaaattttgcgaagtgaagagcttagcattgaggatgaataccaggtcttcttagctgcaatgcaatggattctgaaagatttgggaaaaagaagaaaacatgtggtggaagtgctagacccaattcgattccctttattacctcctcagagacttttaaagtatatagaaggagtatccgattttaatcttcgtgttgcattgcaaacacttctgaaagagtactgtgaagtatgcaaatctcccaaagagaacaagttttgtagttttctgcagacatctaaggttcgacctcggaagaaagcaagaaagtacctgtatgcagtaggtggatatactcggttgcaggggggtcgctggagtgatagcagagccctcagctgtgtagaacgttttgacacctttagccagtactggaccactgtgtcttcacttcatcaggctcgaagtgggctgggagtaacagttctgggagggatggtctacgctattggaggtgaaaaggattcaatgatttttgattgtactgaatgctatgatccagttactaaacagtggacaactgtagcttcgatgaatcatccccgctgcggcttaggagtgtgtgtgtgttatggggctatctatgctttgggtggatgggttggagctgagatagggaacaccattgaacgatttgatcctgatgaaaataaatgggaagtagttggtaacatggctgtgtcacgctactactttgggtgctgtgaaatgcaaggtttaatttatgtaattgggggcatcagcaatgaaggaatagaacttcgttcttttgaagtctatgatccactttctaagcgttggtctccacttcctccaatgggaaccaggagagcatatcttggtgtggctgcactcaatgactgcatctattctgttggaggatggaatgagacccaagatgctcttcatactgtagaaaaatattcctttgaagaggaaaagtgggttgaagttgcctcaatgaaagtgcctagagcaggcatgtgtgttgtggcagtcaatggtcttctgtatgtttctggaggtcgatcttccagccatgattttttggctccagatactcacagatacgaggttttccgcttgaagtgggagaatatgtgcattcttttcaatgatcacaagactctaacaaaggggatttttaatctttaattttcaagatggttaaaatattgaaatgtttaagtggataactatattattcataaaatgactgagtgaaaactaatatactatgagatgaaaaaaaaaaaaaaa

SEQ ID NO: 4776 - DNA, 2404 bp, Homo sapiens; identical to SEQ ID NO: 760

SEQ ID NO: 4777 - DNA, 5693 bp, Homo sapiens
gctcctttgaccccagtggcagtccctgtcactgcaccgctcgctctccctccggctcgccgcgccctcgctccctctcctcgccccctcgctcgctctctccccagatcgaggctgctcgggtcctttctccccccgcctccctctagcgccgcgccccctggcccccagccccagcctgcggcgggacctccggggtcgaaggttctggcccgctcgcgcccctcgccgcccccgcgcgcccccagcgctcctccagccggctcgggccgctcggctatggatcgcctgctcgccgggcgctgaaggcatccccgggatccggagcgcagcccgggaaagaaatgcacagcggtattgatgagtagatccttggattcagaggttggctgaaacgcaccatgcctgcttccatcttttgctctgtaaagttgtgaattgctcatgcctatagggaggaaggatggcacatgggattccttctcaaggcaaagttaccataacggtggatgagtacagctcaaaccccacccaggcattcacgcactacaacatcaaccagagcagattccagcctccacatgtacatatggtcgaccccatcccatatgacactccaaaaccagcgggccacacgcggtttgtctgcatctcagacacacactccagaacagatggtatccagatgccttatggggacatccttctccacacaggcgatttcaccgagctgggactgccctcagaggttaagaagtttaatgactggttaggaaacctgccatatgaatataaaatagtgattgctgggaatcatgaactgacatttgataaggaattcatggcagaccttgttaaacaggactactaccgtttcccctctgtgtccaaattgaaaccagaggactttgacaatgttcagtccctcctgacaaacagtatttacttacaagattcggaggtaacagtgaagggattcaggatatacggtgcaccttggaccccgtggtttaatggatggggctttaacctacccagaggtcagtctctgctggacaagtggaacctcatccctgagggcattgacatactcatgacacatggacctcctctaggttttcgagactgggttccaaaggagcttcaaagagtgggctgtgtggagctgttaaacacggttcagaggcgagtccggcccaagctccatgtgtttggtggaatccatgaagtaaaccctgtgagcatctccaaggcactgaggacaaaaatatgttctctgccttcaaaaacttcctagtctagaggaaactggcatagacacaattaattgatgatctgatgaattagcattgtgtgagctacaatcctggcatgaatcaagaactagagaggcacacaggaaggaaggaagatgcctctccttggtgaagacaaagaaggcatgaggaggaggcgacagggaagctcacctggtggacaacaggaaagactgcggaggagggctctgctggaagaggaaacagactggggaggtggggccagtgcataaagggccactgcaggaaggggttgtaggagaaaaggaaagacagatcagtcactgatgaccccctccaccccaggtctgcagacagagctgattccttctctaagcctcggcatcccctaccaacagtccctcctgctccttctctcccaagtcctctaaacagcttcatgcccaaaccacaaagagaacattctcaggcctaaggcaggccttcccagcacagaatgtttggagccctctgtgggagagcggctggcccccttaactgtcccccttccctccgggagccaaggcaggcactgtgcacctgcccctgaattgtgtgcggcagttgccggcctggagctgagtgacacagcaggtgcctccagcctgaagacaattccatatttcaatggagcgtcgccaccaaagcttattatctagggcaataaagtttaggattagggggattcaggatgattgtgtgattctccacaaagcttatcttctaatagaccagctgctttattaggccgcccccacccgcaccaggcccttcccaaagcatcccaagtcccaggcagccgacgggggccttgaaggcggcagtggtagacagctgggggtatcatatcaccctcagtctccatctgcgattattaaattacgggcggcttccagctgggcacaccccagctcccaccttcctcctacaaagccagcatcatcgtcaggcatctgccaaggacacgatgtggctgcctctcccctgctgatccctactgttgaactctaaaagggccaggtctgggtatttacttgctattagggctgtcactgtcacagtgtggaatgcagtggagtggaggcctggagagagggggggaccatggaaatttctgttgcaaatggggctttgctgggactgttcactataaacaaaaaaagaagatggaatcatgcaccacagaacctcaaagaagctggcatgcttaccaagctcccacatatttctcccaaaatgaaattcattaacgttgagtgttctagggaccacctccacatgctccctgatcccattgctccgttccttttctgatgggagcagagcatgggatggtgtctctccaaccccgtgtggtcagcagcactgaggctactctcgtttcctatccctccctgacagtctcctttatcctcagcccctgacagactatctgttcagagtaggaatttatcaataagtactgataagcatgctgaaaggaatatgggggactgggaatatgcctgaaacataatgaatgtttcaaagaaatgaaacgttctgaaaatggaattttcaaagattctgacaagcacacagcatctgcttgcagattttaggaaaacttagtcatagaattattcagagttcacatttcagccatggggatgttgtgtgcctgttgacagcagaggtccctgtagacgtttgttttttactgtgtctatgtgtgattcactaatgagagagtggcttagatgctcagagtaattaattgtagtattgagataatagtggctttgaaatccagctgtgcttatatgcgtgcacgctgtgcagttagatgctcccaggttcagatctgcttccatcactactaactatgtggccttgttttctgatctgcaagccatggattgtattgcttactttgcgggactgtggtaaacgttaggcatatatgaggcaagtgcaatgcccaacatttggcagatgcttaataagtgttggctattattattactactactactactattgcttttgctattgctattatgtgtgacctgtataataatcctactaatatgagtgaaggcaagaatcatggactatgcacccagcataatcaggagggtttgactgttgtgaatgaattcaagggcaggacaagcagcgacaagagttactgaagttcatctgatttgagttctgttcattcatttatttgggatccaaattctgaaccccagctctgtgctagacactgttctaggtgctgggaaaacagtcatgtgttagtctgtttttgctgccataaaggaatccctgagactgggtattttataaagaaaagaggtttatttaaatcacagttctgcaagcctaacacctggtggaagctgccaaggcttacagcttataccctctcaagcagcaccctaatctataccttgagccaagactggaattggagctgccatgatgcaggaagcagtgtcccaaggatgtgcagagcagtggggtcctgaatgtggccccccaaaccattcttttctcctaggcctctaggcctgtgatgggggggtggccttgaaaatctctgaaatgccttcaaggcctttttcccattgtcttggttattagcacttggctcccctttagccatgctaatctgtctagcaagtggttgctccacagcctgctcatatttcactcctgaaaatgttctttccttctccaccacacaaccagtttgtgaattttccaaacttttatgctctgcttcccttttaattatcaatttcccagcctcagatattcctttatagtaatgcaaatggactaacagaagcaatgaataagaaggggtcctggcccctctacaactcatcttctattgagaaagaaagaagaaaaaatgaaaataagttaaaaaaactcaaattttgataaaccctatgaagaaaataagaaatgggatagaagttagctggcatggcagggtggagtgggtgagtgacattaaggagggtgacaacagagaaactttctgataaaaaacccagtaagtaaaggtctaagtgatgtggatgaggcagccacttgaagacctgggacaaaagtgttcaggcagagaatatagcaggtacagagctttttgtataagaaggtagcaaaaaggccagtatagccagagaacagaggaggtaaggagaaagataggggatgaggcaggtgctaactcatcaacatccttgcaggccttgatgagagttaagatttcattataattgcaataagaagacagtggaaggttttttggcgggggtgggggtggtcaatgacatgattggattgatatgttggaaaagcccatctggcgactgtgttcagtaacagtgtgcttgcatgaagatccctcacagcagcagacaacacaaatgccccctcccacccatcatgaaaatttggaaagccaagccaataggaaactgaagctacaaagacccagcccctagaaagcaatataaacaagaccagaaaaagcatgtgttcaggacaagttcacattgaagtaaaaccatattgacattgattgcattccctacctgcttaggggttttgcttcacctaaactagtaccttgagaatctgtaaaagcttacaatttgagaaaagcaagagatgacacctgattatcctttgaattggcttccatgtctgtggctgttttccctaagttcctgtcccttacacacacgttacaaaactttgtctcaattctttgcttttaaaggatttgactttaacaaattcacattgggtacttgcttagtaggaaaggaaataatgactctcaccccctatgttataaaacttttaggagtattacacacaggcacatacagggcacactggtatggcttgtcattttgtgacaaattcttgtcagtttgtggtctggtggaaagcatatggaattagcaatcaagaaaggtgagatttagttctggctctgcttctaactagcaatgcaatcttggacaagagatttattctttcaagtctcagtttcatcttgtcatatggacatagagtgatacttccttttaaaagaacctgggtatcctggccaggcgcggtggctcatgcctcccagcactttgggaggccgaggcgggtggatcacaaggtcaggagatcgagaccatcctggccaacatggtgaaaccccgtctctactaaaaatacaaaaattagttgggcgtggtagtcccagctactcgggagactgaggcaggagaatttcttgaaccctggaggcggaggtagcagtgagccccgaggtcgtgccactgaactccagcctggcaacagagcgagactctgtct

SEQ ID NO: 4778 - DNA, 11998 bp, Homo sapiens; identical to SEQ ID NO: 131

SEQ ID NO: 4779 - DNA, 656 bp, Homo sapiens; identical to SEQ ID NO: 1406

SEQ ID NO: 4780 - DNA, 1197 bp, Homo sapiens; identical to SEQ ID NO: 357

SEQ ID NO: 4781 - DNA, 1718 bp, Homo sapiens; identical to SEQ ID NO: 589

SEQ ID NO: 4782 - DNA, 1285 bp, Homo sapiens
tacatgcaacagccagtgagagcaggagacatcggtgtttccagagtccagacccaccacaatgccagccccttctcagttccgaagaaacaggatgaatcacccatgattggggatggagaagattatttcctttctttgtttggtgattcaaagaaacttacagcacactcaaactacactcagaaaactttaaaatacttttctatgattcttgaagaagttggccaatttacctccagttctcttggagatgttgaaatagctgaagtgaatgtcaagggtttgttcgtgaagctcattaactcttcccttgacaaagaaatggcaattggagatcatattctccagcaaaatgtgaatggacaaaccatttctttgtaccgattccttccaaacatcgtaatgcaggcaaattccacagtaacagtgtgggcagcagcatctgaagcaaagcatcaacctccatcagattttctttggaaggaacaagacaagtttagagcaagtcctgattgtataacaatcctgtgcaaaccgaacggtcaagccattgcgtggtacacccctatccactggaagcaagcgtgggaaaaattagatgctgacgttgaatttaacagatgttcagtagtatctccaacattccgaaagcgtgtgtttcagtggacagcatctacagctacaataactaaagaaaaacaagatcaacctaagaaagatatctcaaattatcaggtggaacaagctcaagttcttcttaagagagagaaggaaatcccaccaaccgttttccctaatcgcagcccttggtgccagaatccctatgtctctgcacatccttactgtcctctgattgaaccacacaatacatccaccgctggaggcagattggatagacagcccaggactcggtcaaccagacctaatcgagcctcagggtctaagaaaaagaagacatctgagtcacaaaagcaataagcagtcaactcaacctttaaagatggagtctcactctgttgcccaggctggagtgcagtggtgtgatctccactaactgcagcctccgcctcccaggttcaagtgagtctcctgcgtcagcctcccgagtagctgggattacaggcatccgccaccctgcatggctaatttttgtatttttagtagcaacgaggtttcaccatgttggccaggctggtctcgaattcctgacctcaggtgatctgcctgccttggcctcccaaagtgctgggattacacgcatgagccaccatgcccggcgcaa

SEQ ID NO: 4783 - DNA, 1891 bp, Homo sapiens
gtagtcataaaggtctctttgccaagttactgccctctcaagctgcttccagtgaatgctacacacctgcaccatggtttgtccgacatccttagccaagatcaggattggctatgttggtacttacatatcctcatgagaattgtggttctggtactagtttggtaaagaaattattaaacctagctgatgcttgaaggtagttggattaacaggaaagaaaagagacttcttttctagccaagatgaaagatacacaagacattcaggaagcttcgaaggcaatgcagaataaagtccatgagcaggaagataagaatgagaaacaaaaacaaagagaagacaaacttggagtatattctttagtacatttttccccaaagatgttgggttcagttgccacaacactgccattgtcatcttcaaattccagtggaatgcctcttggttactatctgtctagtcctcagattagtagagtaactatatcaacaactggacaattgacttctaaagctactgtaggtagctgttccagagtggaaaacagcttggatgccagccccttctcagttccgaagaaacaggatgaatcacccatgattggggatggagaagattatttcctttctttgtttggtgattcaaagaaacttacagcacactcaaactacactcagaaaactttaaaatacttttctatgattcttgaagaagttggccaatttacctccagttctcttggagatgttgaaatagctgaagtgaatgtcaagggtttgttcgtgaagctcattaactcttcccttgacaaagaaatggcaattggagatcatattctccagcaaaatgtgaatggacaaaccatttctttgtaccgattccttccaaacatcgtaatgcaggcaaattccacagtaacagtgtgggcagcagcatctgaagcaaagcatcaacctccatcagattttctttggaaggaacaagacaagtttagagcaagtcctgattgtataacaatcctgtgcaaaccgaacggtcaagccattgcgtggtacacccctatccactggaagcaagcgtgggaaaaattagatgctgacgttgaatttaacagatgttcagtagtatctccaacattccgaaagcgtgtgtttcagtggacagcatctacagctacaataactaaagaaaaacaagatcaacctaagaaagatatctcaaattatcaggtggaacaagctcaagttcttcttaagagagagaaggaaatcccaccaaccgttttccctaatcgcagcccttggtgccagaatccctatgtctctgcacatccttactgtcctctgattgaaccacacaatacatccaccgctggaggcagattggatagacagcccaggactcggtcaaccagacctaatcgagcctcagggtctaagaaaaagaagacatctgagtcacaaaagcaataagcagtcaactcaacctttaaagtaatctagtccaccctcaaccagctactagaaaagcaaaagagaactcaaatccctgaggcctgctctgcaacctccctgctattccatgagagggtgaagacatcacatttctatatggaaaaaggatccaaaatttgtattgctgtagaattggtgaattatagatgcttgatgaaatcacaagtcctaccactcctgccttccaaatccctgcagaaaacaagcagatggttagtattattcaatggataaaattgctatttgccttagatttctctttttgtaaacaaagttattttgggtacagaactcacaaaagaagagcacgtgcaattgtttaaccattttaaaaaaaaaaaaaaaaaaaaaaaaaaaaaaaaaaaaaaaaaaaa

SEQ ID NO: 4784 - DNA, 1522 bp, Homo sapiens
gtagtcataaaggtctctttgccaagttactgccctctcaagctgcttccagtgaatgctacacacctgcaccatggtttgtccgacatccttagccaagatcaggattggctatgttggtacttacatatcctcatgagaattgtggttctggtactagtttggtaaagaaattattaaacctagctgatgcttgaaggtagttggattaacaggaaagaaaagagacttcttttctagccaagatgaaagatacacaagacattcaggaagcttcgaaggcaatgcagaataaagtccatgagcaggaagataagaatgagaaacaaaaacaaagagaagacaaacttggagtatattctttagtacatttttccccaaagatgttgggttcagttgccacaacactgccattgtcatcttcaaattccagtggaatgcctcttggttactatctgtctagtcctcagattagtagagtaactatatcaacaactggacaattgacttctaaagctactgtaggtagctgttccagagtggaaaacagcttggatgccagccccttctcagttccgaagaaacaggatgaatcacccatgattggggatggagaagattatttcctttctttgtttggtgattcaaagaaacttacagcacactcaaactacactcagaaaactttaaaatacttttctatgattcttgaagaagttggccaatttacctccagttctcttggagatgttgaaatagctgaagtgaatgtcaagggtttgttcgtgaagctcattaactcttcccttgacaaagaaatggcaattggagatcatattctccagcaaaatgtgaatggacaaaccatttctttgtaccgattccttccaaacatcgtaatgcaggcaaattccacagtaacagccattgcgtggtacacccctatccactggaagcaagcgtgggaaaaattagatgctgacgttgaatttaacagatgttcagtagtatctccaacattccgaaagcgtgtgtttcagtggacagcatctacagctacaataactaaagaaaaacaagatcaacctaagaaagatatctcaaattatcaggtggaacaagctcaagttcttcttaagagagagaaggaaatcccaccaaccgttttccctaatcgcagcccttggtgccagaatccctatgtctctgcacatccttactgtcctctgattgaaccacacaatacatccaccgctggaggcagattggatagacagcccaggactcggtcaaccagacctaatcgagcctcagggtctaagaaaaagaagacatctgagtcacaaaagcaataagcagtcaactcaacctttaaagctttacctttatggtgtcatggtccagttgtatggaagagtaaaaagacctgcaatctaggctccctgccatgctggccaaagacattccacaacttaaagaaaatcaaatgcctgagcaaacgtagcgggttccgctttcatag

SEQ ID NO: 4785 - DNA, 1772 bp, Homo sapiens
gccctctcaagctgcttccagtgaatgctacacacctgcaccatggtttgtccgacatccttagccaagatcaggattggctatgttgaagagaagacaaacttggagtatattctttagtacatttttccccaaagatgttgggttcagttgccacaacactgccattgtcatcttcaaattccagtggaatgcctcttggttactatctgtctagtcctcagattagtagagtaactatatcaacaactggacaattgacttctaaagctactgtaggtagctgttccagagtggaaaacagcttgggaaaacggaaacttggaaaacttacatcacgtggcttagtaaatggcagaactgaaatataattacaagtctgtctaaatgcaagacacgttgttctttccacttcatcacgacgcgtctttgtaatatgccagccccttctcagttccgaagaaacaggatgaatcacccatgattggggatggagaagattatttcctttctttgtttggtgattcaaagaaacttacagcacactcaaactacactcagaaaactttaaaatacttttctatgattcttgaagaagttggccaatttacctccagttctcttggagatgttgaaatagctgaagtgaatgtcaagggtttgttcgtgaagctcattaactcttcccttgacaaagaaatggcaattggagatcatattctccagcaaaatgtgaatggacaaaccatttctttgtaccgattccttccaaacatcgtaatgcaggcaaattccacagtaacagtgtgggcagcagcatctgaagcaaagcatcaacctccatcagattttctttggaaggaacaagacaagtttagagcaagtcctgattgtataacaatcctgtgcaaaccgaacggtcaagccattgcgtggtacacccctatccactggaagcaagcgtgggaaaaattagatgctgacgttgaatttaacagatgttcagtagtatctccaacattccgaaagcgtgtgtttcagtggacagcatctacagctacaataactaaagaaaaacaagatcaacctaagaaagatatctcaaattatcaggtggaacaagctcaagttcttcttaagagagagaaggaaatcccaccaaccgttttccctaatcgcagcccttggtgccagaatccctatgtctctgcacatccttactgtcctctgattgaaccacacaatacatccaccgctggaggcagattggatagacagcccaggactcggtcaaccagacctaatcgagcctcagggtctaagaaaaagaagacatctgagtcacaaaagcaataagcagtcaactcaacctttaaagtaatctagtccaccctcaaccagctactagaaaagcaaaagagaactcaaatccctgaggcctgctctgcaacctccctgctattccatgagagggtgaagacatcacatttctatatggaaaaaggatccaaaatttgtattgctgtagaattggtgaattatagatgcttgatgaaatcacaagtcctaccactcctgccttccaaatccctgcagaaaacaagcagatggttagtattattcaatggataaaattgctatttgccttagatttctctttttgtaaacaaagttattttgggtacagaactcacaaaagaagagcacgtgcaattgtttaaccattttaaaaaaaaaaaaaaaaaaaaaaaaaaaaaaaaaaaaaaaaaaaa

SEQ ID NO: 4786 - DNA, 3839 bp, Homo sapiens
agacaggcggagcctcacctggggctgcccgccagcccagacaagctcagactgggtgcctgtggccctgggaggaggtggaaggggaggagcaggccacacaggcacaggccggtgagggacctgcccagacctggagggtctcgctctgtcacacaggctggagtgcagtggtgtgatcttggctcatcgtaacctccacctcccgggttcaagtgattctcatgcctcagcctcccgagtagctgggattacaggtggtgacttccaagagtgactccgtcggaggaaaatgactccccagtcgctgctgcagacgacactgttcctgctgagtctgctcttcctggtccaaggtgcccacggcaggggccacagggaagactttcgcttctgcagccagcggaaccagacacacaggagcagcctccactacaaacccacaccagacctgcgcatctccatcgagaactccgaagaggccctcacagtccatgcccctttccctgcagcccaccctgcttcccgatccttccctgaccccaggggcctctaccacttctgcctctactggaaccgacatgctgggagattacatcttctctatggcaagcgtgacttcttgctgagtgacaaagcctctagcctcctctgcttccagcaccaggaggagagcctggctcagggccccccgctgttagccacttctgtcacctcctggtggagccctcagaacatcagcctgcccagtgccgccagcttcaccttctccttccacagtcctccccacacggccgctcacaatgcctcggtggacatgtgcgagctcaaaagggacctccagctgctcagccagttcctgaagcatccccagaaggcctcaaggaggccctcggctgcccccgccagccagcagttgcagagcctggagtcgaaactgacctctgtgagattcatgggggacatggtgtccttcgaggaggaccggatcaacgccacggtgtggaagctccagcccacagccggcctccaggacctgcacatccactcccggcaggaggaggagcagagcgagatcatggagtactcggtgctgctgcctcgaacactcttccagaggacgaaaggccggagcggggaggctgagaagagactcctcctggtggacttcagcagccaagccctgttccaggacaagaattccagccaagtcctgggtgagaaggtcttggggattgtggtacagaacaccaaagtagccaacctcacggagcccgtggtgctcactttccagcaccagctacagccgaagaatgtgactctgcaatgtgtgttctgggttgaagaccccacattgagcagcccggggcattggagcagtgctgggtgtgagaccgtcaggagagaaacccaaacatcctgcttctgcaaccacttgacctactttgcagtgctgatggtctcctcggtggaggtggacgccgtgcacaagcactacctgagcctcctctcctacgtgggctgtgtcgtctctgccctggcctgccttgtcaccattgccgcctacctctgctccagggtgcccctgccgtgcaggaggaaacctcgggactacaccatcaaggtgcacatgaacctgctgctggccgtcttcctgctggacacgagcttcctgctcagcgagccggtggccctgacaggctctgaggctggctgccgagccagtgccatcttcctgcacttctccctgctcacctgcctttcctggatgggcctcgaggggtacaacctctaccgactcgtggtggaggtctttggcacctatgtccctggctacctactcaagctgagcgccatgggctggggcttccccatctttctggtgacgctggtggccctggtggatgtggacaactatggccccatcatcttggctgtgcataggactccagagggcgtcatctacccttccatgtgctggatccgggactccctggtcagctacatcaccaacctgggcctcttcagcctggtgtttctgttcaacatggccatgctagccaccatggtggtgcagatcctgcggctgcgcccccacacccaaaagtggtcacatgtgctgacactgctgggcctcagcctggtccttggcctgccctgggccttgatcttcttctcctttgcttctggcaccttccagcttgtcgtcctctaccttttcagcatcatcacctccttccaaggcttcctcatcttcatctggtactggtccatgcggctgcaggcccggggtggcccctcccctctgaagagcaactcagacagcgccaggctccccatcagctcgggcagcacctcgtccagccgcatctaggcctccagcccacctgcccatgtgatgaagcagagattcggcctcgtcgcacactgcctgtggcccccgagcccggcccagccccaggccagtcagccgcagactttggaaagcccaacgaccatggagagatgggccgttgccatggtggacggactcccgggctgggcttttgaattggccttggggactactcggctctcactcagctcccacgggactcagaagtgcgccgccatgctgcctagggtactgtccccacatctgtcccaacccagctggaggcctggtctctccttacaacccctgggcccagccctcattgctgggggccaggccttggatcttgagggtctggcacatccttaatcctgtgcccctgcctgggacagaaatgtggctccagttgctctgtctctcgtggtcaccctgagggcactctgcatcctctgtcattttaacctcaggtggcacccagggcgaatggggcccagggcagaccttcagggccagagccctggcggaggagaggccctttgccaggagcacagcagcagctcgcctacctctgagcccaggccccctccctccctcagccccccagtcctccctccatcttccctggggttctcctcctctcccagggcctccttgctccttcgttcacagctgggggtccccgattccaatgctgttttttggggagtggtttccaggagctgcctggtgtctgctgtaaatgtttgtctactgcacaagcctcggcctgcccctgagccaggctcggtaccgatgcgtgggctgggctaggtccctctgtccatctgggcctttgtatgagctgcattgcccttgctcaccctgaccaagcacacgcctcagaggggccctcagcctctcctgaagccctcttgtggcaagaactgtggaccatgccagtcccgtctggtttccatcccaccactccaaggactgagactgacctcctctggtgacactggcctagggcctgacactctcctaagaggttctctccaagcccccaaatagctccaggcgccctcggccgcccatcatggttaattctgtccaacaaacacacacgggtagattgctggcctgttgtaggtggtagggacacagatgaccgacctggtcactcctcctgccaacattcagtctggtatgtgaggcgtgcgtgaagcaagaactcctggagctacagggacagggagccatcattcctgcctgggaatcctggaagacttcctgcaggagtcagcgttcaatcttgaccttgaagatgggaaggatgttctttttacgtaccaattcttttgtcttttgatattaaaaagaagtacatgttcattgtagagaatttggaaactgtagaagagaatcaagaagaaaaataaaaatcagctgttgtaatcacctagcaaactggaaaaaaaaaaaaaaa

SEQ ID NO: 4787 - DNA, 3982 bp, Homo sapiens; identical to SEQ ID NO: 2337

SEQ ID NO: 4788 - DNA, 3860 bp, Homo sapiens
gagaaatccatgactcacatatatcgtccgtcatccccagtcaagctcagggaggagggaggagcccagctggggcaggagaggggtgtctccccaccaaacaaacccggtccctccctctccgcactagctgtctgccctgccctgccgtaggagatgggctgggagcctcccacgctctccagctcactcggcaggcagcggggaccagggctggcaggttaagcctctgggggtggatcctgaaaggtggtccagccgcctggccctgcgtgggaccctccacctggcagcaggtggtgacttccaagagtgactccgtcggaggaaaatgactccccagtcgctgctgcagacgacactgttcctgctgagtctgctcttcctggtccaaggtgcccacggcaggggccacagggaagactttcgcttctgcagccagcggaaccagacacacaggagcagcctccactacaaacccacaccagacctgcgcatctccatcgagaactccgaagaggccctcacagtccatgcccctttccctgcagcccaccctgcttcccgatccttccctgaccccaggggcctctaccacttctgcctctactggaaccgacatgctgggagattacatcttctctatggcaagcgtgacttcttgctgagtgacaaagcctctagcctcctctgcttccagcaccaggaggagagcctggctcagggccccccgctgttagccacttctgtcacctcctggtggagccctcagaacatcagcctgcccagtgccgccagcttcaccttctccttccacagtcctccccacacggccgctcacaatgcctcggtggacatgtgcgagctcaaaagggacctccagctgctcagccagttcctgaagcatccccagaaggcctcaaggaggccctcggctgcccccgccagccagcagttgcagagcctggagtcgaaactgacctctgtgagattcatgggggacatggtgtccttcgaggaggaccggatcaacgccacggtgtggaagctccagcccacagccggcctccaggacctgcacatccactcccggcaggaggaggagcagagcgagatcatggagtactcggtgctgctgcctcgaacactcttccagaggacgaaaggccggagcggggaggctgagaagagactcctcctggtggacttcagcagccaagccctgttccaggacaagaattccagccaagtcctgggtgagaaggtcttggggattgtggtacagaacaccaaagtagccaacctcacggagcccgtggtgctcactttccagcaccagctacagccgaagaatgtgactctgcaatgtgtgttctgggttgaagaccccacattgagcagcccggggcattggagcagtgctgggtgtgagaccgtcaggagagaaacccaaacatcctgcttctgcaaccacttgacctactttgcagtgctgatggtctcctcggtggaggtggacgccgtgcacaagcactacctgagcctcctctcctacgtgggctgtgtcgtctctgccctggcctgccttgtcaccattgccgcctacctctgctccaggaggaaacctcgggactacaccatcaaggtgcacatgaacctgctgctggccgtcttcctgctggacacgagcttcctgctcagcgagccggtggccctgacaggctctgaggctggctgccgagccagtgccatcttcctgcacttctccctgctcacctgcctttcctggatgggcctcgaggggtacaacctctaccgactcgtggtggaggtctttggcacctatgtccctggctacctactcaagctgagcgccatgggctggggcttccccatctttctggtgacgctggtggccctggtggatgtggacaactatggccccatcatcttggctgtgcataggactccagagggcgtcatctacccttccatgtgctggatccgggactccctggtcagctacatcaccaacctgggcctcttcagcctggtgtttctgttcaacatggccatgctagccaccatggtggtgcagatcctgcggctgcgcccccacacccaaaagtggtcacatgtgctgacactgctgggcctcagcctggtccttggcctgccctgggccttgatcttcttctcctttgcttctggcaccttccagcttgtcgtcctctaccttttcagcatcatcacctccttccaaggcttcctcatcttcatctggtactggtccatgcggctgcaggcccggggtggcccctcccctctgaagagcaactcagacagcgccaggctccccatcagctcgggcagcacctcgtccagccgcatctaggcctccagcccacctgcccatgtgatgaagcagagattcggcctcgtcgcacactgcctgtggcccccgagcccggcccagccccaggccagtcagccgcagactttggaaagcccaacgaccatggagagatgggccgttgccatggtggacggactcccgggctgggcttttgaattggccttggggactactcggctctcactcagctcccacgggactcagaagtgcgccgccatgctgcctagggtactgtccccacatctgtcccaacccagctggaggcctggtctctccttacaacccctgggcccagccctcattgctgggggccaggccttggatcttgagggtctggcacatccttaatcctgtgcccctgcctgggacagaaatgtggctccagttgctctgtctctcgtggtcaccctgagggcactctgcatcctctgtcattttaacctcaggtggcacccagggcgaatggggcccagggcagaccttcagggccagagccctggcggaggagaggccctttgccaggagcacagcagcagctcgcctacctctgagcccaggccccctccctccctcagccccccagtcctccctccatcttccctggggttctcctcctctcccagggcctccttgctccttcgttcacagctgggggtccccgattccaatgctgttttttggggagtggtttccaggagctgcctggtgtctgctgtaaatgtttgtctactgcacaagcctcggcctgcccctgagccaggctcggtaccgatgcgtgggctgggctaggtccctctgtccatctgggcctttgtatgagctgcattgcccttgctcaccctgaccaagcacacgcctcagaggggccctcagcctctcctgaagccctcttgtggcaagaactgtggaccatgccagtcccgtctggtttccatcccaccactccaaggactgagactgacctcctctggtgacactggcctagggcctgacactctcctaagaggttctctccaagcccccaaatagctccaggcgccctcggccgcccatcatggttaattctgtccaacaaacacacacgggtagattgctggcctgttgtaggtggtagggacacagatgaccgacctggtcactcctcctgccaacattcagtctggtatgtgaggcgtgcgtgaagcaagaactcctggagctacagggacagggagccatcattcctgcctgggaatcctggaagacttcctgcaggagtcagcgttcaatcttgaccttgaagatgggaaggatgttctttttacgtaccaattcttttgtcttttgatattaaaaagaagtacatgttcattgtagagaatttggaaactgtagaagagaatcaagaagaaaaataaaaatcagctgttgtaatcacctagcaaactggaaaaaaaaaaaaaaa

SEQ ID NO: 4789 - DNA, 3821 bp, Homo sapiens
agacaggcggagcctcacctggggctgcccgccagcccagacaagctcagactgggtgcctgtggccctgggaggaggtggaaggggaggagcaggccacacaggcacaggccggtgagggacctgcccagacctggagggtctcgctctgtcacacaggctggagtgcagtggtgtgatcttggctcatcgtaacctccacctcccgggttcaagtgattctcatgcctcagcctcccgagtagctgggattacaggtggtgacttccaagagtgactccgtcggaggaaaatgactccccagtcgctgctgcagacgacactgttcctgctgagtctgctcttcctggtccaaggtgcccacggcaggggccacagggaagactttcgcttctgcagccagcggaaccagacacacaggagcagcctccactacaaacccacaccagacctgcgcatctccatcgagaactccgaagaggccctcacagtccatgcccctttccctgcagcccaccctgcttcccgatccttccctgaccccaggggcctctaccacttctgcctctactggaaccgacatgctgggagattacatcttctctatggcaagcgtgacttcttgctgagtgacaaagcctctagcctcctctgcttccagcaccaggaggagagcctggctcagggccccccgctgttagccacttctgtcacctcctggtggagccctcagaacatcagcctgcccagtgccgccagcttcaccttctccttccacagtcctccccacacggccgctcacaatgcctcggtggacatgtgcgagctcaaaagggacctccagctgctcagccagttcctgaagcatccccagaaggcctcaaggaggccctcggctgcccccgccagccagcagttgcagagcctggagtcgaaactgacctctgtgagattcatgggggacatggtgtccttcgaggaggaccggatcaacgccacggtgtggaagctccagcccacagccggcctccaggacctgcacatccactcccggcaggaggaggagcagagcgagatcatggagtactcggtgctgctgcctcgaacactcttccagaggacgaaaggccggagcggggaggctgagaagagactcctcctggtggacttcagcagccaagccctgttccaggacaagaattccagccaagtcctgggtgagaaggtcttggggattgtggtacagaacaccaaagtagccaacctcacggagcccgtggtgctcactttccagcaccagctacagccgaagaatgtgactctgcaatgtgtgttctgggttgaagaccccacattgagcagcccggggcattggagcagtgctgggtgtgagaccgtcaggagagaaacccaaacatcctgcttctgcaaccacttgacctactttgcagtgctgatggtctcctcggtggaggtggacgccgtgcacaagcactacctgagcctcctctcctacgtgggctgtgtcgtctctgccctggcctgccttgtcaccattgccgcctacctctgctccaggaggaaacctcgggactacaccatcaaggtgcacatgaacctgctgctggccgtcttcctgctggacacgagcttcctgctcagcgagccggtggccctgacaggctctgaggctggctgccgagccagtgccatcttcctgcacttctccctgctcacctgcctttcctggatgggcctcgaggggtacaacctctaccgactcgtggtggaggtctttggcacctatgtccctggctacctactcaagctgagcgccatgggctggggcttccccatctttctggtgacgctggtggccctggtggatgtggacaactatggccccatcatcttggctgtgcataggactccagagggcgtcatctacccttccatgtgctggatccgggactccctggtcagctacatcaccaacctgggcctcttcagcctggtgtttctgttcaacatggccatgctagccaccatggtggtgcagatcctgcggctgcgcccccacacccaaaagtggtcacatgtgctgacactgctgggcctcagcctggtccttggcctgccctgggccttgatcttcttctcctttgcttctggcaccttccagcttgtcgtcctctaccttttcagcatcatcacctccttccaaggcttcctcatcttcatctggtactggtccatgcggctgcaggcccggggtggcccctcccctctgaagagcaactcagacagcgccaggctccccatcagctcgggcagcacctcgtccagccgcatctaggcctccagcccacctgcccatgtgatgaagcagagattcggcctcgtcgcacactgcctgtggcccccgagcccggcccagccccaggccagtcagccgcagactttggaaagcccaacgaccatggagagatgggccgttgccatggtggacggactcccgggctgggcttttgaattggccttggggactactcggctctcactcagctcccacgggactcagaagtgcgccgccatgctgcctagggtactgtccccacatctgtcccaacccagctggaggcctggtctctccttacaacccctgggcccagccctcattgctgggggccaggccttggatcttgagggtctggcacatccttaatcctgtgcccctgcctgggacagaaatgtggctccagttgctctgtctctcgtggtcaccctgagggcactctgcatcctctgtcattttaacctcaggtggcacccagggcgaatggggcccagggcagaccttcagggccagagccctggcggaggagaggccctttgccaggagcacagcagcagctcgcctacctctgagcccaggccccctccctccctcagccccccagtcctccctccatcttccctggggttctcctcctctcccagggcctccttgctccttcgttcacagctgggggtccccgattccaatgctgttttttggggagtggtttccaggagctgcctggtgtctgctgtaaatgtttgtctactgcacaagcctcggcctgcccctgagccaggctcggtaccgatgcgtgggctgggctaggtccctctgtccatctgggcctttgtatgagctgcattgcccttgctcaccctgaccaagcacacgcctcagaggggccctcagcctctcctgaagccctcttgtggcaagaactgtggaccatgccagtcccgtctggtttccatcccaccactccaaggactgagactgacctcctctggtgacactggcctagggcctgacactctcctaagaggttctctccaagcccccaaatagctccaggcgccctcggccgcccatcatggttaattctgtccaacaaacacacacgggtagattgctggcctgttgtaggtggtagggacacagatgaccgacctggtcactcctcctgccaacattcagtctggtatgtgaggcgtgcgtgaagcaagaactcctggagctacagggacagggagccatcattcctgcctgggaatcctggaagacttcctgcaggagtcagcgttcaatcttgaccttgaagatgggaaggatgttctttttacgtaccaattcttttgtcttttgatattaaaaagaagtacatgttcattgtagagaatttggaaactgtagaagagaatcaagaagaaaaataaaaatcagctgttgtaatcacctagcaaactggaaaaaaaaaaaaaaa

SEQ ID NO: 4790 - DNA, 3996 bp, Homo sapiens
gagaaatccatgactcacatatatcgtccgtcatccccagtcaagctcagggaggagggaggagcccagctggggcaggagaggggtgtctccccaccaaacaaacccggtccctccctctccgcactagctgtctgccctgccctgccgtaggagatgggctgggagcctcccacgctctccagctcactcggcaggcagcggggaccagggctggcaggttaagcctctgggggtggatcctgaaaggtggtccagccgcctggccctgcgtgggaccctccacctggcagcagggtctcgctctgtcacacaggctggagtgcagtggtgtgatcttggctcatcgtaacctccacctcccgggttcaagtgattctcatgcctcagcctcccgagtagctgggattacaggtggtgacttccaagagtgactccgtcggaggaaaatgactccccagtcgctgctgcagacgacactgttcctgctgagtctgctcttcctggtccaaggtgcccacggcaggggccacagggaagactttcgcttctgcagccagcggaaccagacacacaggagcagcctccactacaaacccacaccagacctgcgcatctccatcgagaactccgaagaggccctcacagtccatgcccctttccctgcagcccaccctgcttcccgatccttccctgaccccaggggcctctaccacttctgcctctactggaaccgacatgctgggagattacatcttctctatggcaagcgtgacttcttgctgagtgacaaagcctctagcctcctctgcttccagcaccaggaggagagcctggctcagggccccccgctgttagccacttctgtcacctcctggtggagccctcagaacatcagcctgcccagtgccgccagcttcaccttctccttccacagtcctccccacacggccgctcacaatgcctcggtggacatgtgcgagctcaaaagggacctccagctgctcagccagttcctgaagcatccccagaaggcctcaaggaggccctcggctgcccccgccagccagcagttgcagagcctggagtcgaaactgacctctgtgagattcatgggggacatggtgtccttcgaggaggaccggatcaacgccacggtgtggaagctccagcccacagccggcctccaggacctgcacatccactcccggcaggaggaggagcagagcgagatcatggagtactcggtgctgctgcctcgaacactcttccagaggacgaaaggccggagcggggaggctgagaagagactcctcctggtggacttcagcagccaagccctgttccaggacaagaattccagccaagtcctgggtgagaaggtcttggggattgtggtacagaacaccaaagtagccaacctcacggagcccgtggtgctcactttccagcaccagctacagccgaagaatgtgactctgcaatgtgtgttctgggttgaagaccccacattgagcagcccggggcattggagcagtgctgggtgtgagaccgtcaggagagaaacccaaacatcctgcttctgcaaccacttgacctactttgcagtgctgatggtctcctcggtggaggtggacgccgtgcacaagcactacctgagcctcctctcctacgtgggctgtgtcgtctctgccctggcctgccttgtcaccattgccgcctacctctgctccagggtgcccctgccgtgcaggaggaaacctcgggactacaccatcaaggtgcacatgaacctgctgctggccgtcttcctgctggacacgagcttcctgctcagcgagccggtggccctgacaggctctgaggctggctgccgagccagtgccatcttcctgcacttctccctgctcacctgcctttcctggatgggcctcgaggggtacaacctctaccgactcgtggtggaggtctttggcacctatgtccctggctacctactcaagctgagcgccatgggctggggcttccccatctttctggtgacgctggtggccctggtggatgtggacaactatggccccatcatcttggctgtgcataggactccagagggcgtcatctacccttccatgtgctggatccgggactccctggtcagctacatcaccaacctgggcctcttcagcctggtgtttctgttcaacatggccatgctagccaccatggtggtgcagatcctgcggctgcgcccccacacccaaaagtggtcacatgtgctgacactgctgggcctcagcctggtccttggcctgccctgggccttgatcttcttctcctttgcttctggcaccttccagcttgtcgtcctctaccttttcagcatcatcacctccttccaaggcttcctcatcttcatctggtactggtccatgcggctgcaggcccggggtggcccctcccctctgaagagcaactcagacagcgccaggctccccatcagctcgggcagcacctcgtccagccgcatctaggcctccagcccacctgcccatgtgatgaagcagagattcggcctcgtcgcacactgcctgtggcccccgagcccggcccagccccaggccagtcagccgcagactttggaaagcccaacgaccatggagagatgggccgttgccatggtggacggactcccgggctgggcttttgaattggccttggggactactcggctctcactcagctcccacgggactcagaagtgcgccgccatgctgcctagggtactgtccccacatctgtcccaacccagctggaggcctggtctctccttacaacccctgggcccagccctcattgctgggggccaggccttggatcttgagggtctggcacatccttaatcctgtgcccctgcctgggacagaaatgtggctccagttgctctgtctctcgtggtcaccctgagggcactctgcatcctctgtcattttaacctcaggtggcacccagggcgaatggggcccagggcagaccttcagggccagagccctggcggaggagaggccctttgccaggagcacagcagcagctcgcctacctctgagcccaggccccctccctccctcagccccccagtcctccctccatcttccctggggttctcctcctctcccagggcctccttgctccttcgttcacagctgggggtccccgattccaatgctgttttttggggagtggtttccaggagctgcctggtgtctgctgtaaatgtttgtctactgcacaagcctcggcctgcccctgagccaggctcggtaccgatgcgtgggctgggctaggtccctctgtccatctgggcctttgtatgagctgcattgcccttgctcaccctgaccaagcacacgcctcagaggggccctcagcctctcctgaagccctcttgtggcaagaactgtggaccatgccagtcccgtctggtttccatcccaccactccaaggactgagactgacctcctctggtgacactggcctagggcctgacactctcctaagaggttctctccaagcccccaaatagctccaggcgccctcggccgcccatcatggttaattctgtccaacaaacacacacgggtagattgctggcctgttgtaggtggtagggacacagatgaccgacctggtcactcctcctgccaacattcagtctggtatgtgaggcgtgcgtgaagcaagaactcctggagctacagggacagggagccatcattcctgcctgggaatcctggaagacttcctgcaggagtcagcgttcaatcttgaccttgaagatgggaaggatgttctttttacgtaccaattcttttgtcttttgatattaaaaagaagtacatgttcattgtagagaatttggaaactgtagaagagaatcaagaagaaaaataaaaatcagctgttgtaatcacctagcaaactggaaaaaaaaaaaaaaa

SEQ ID NO: 4791 - DNA, 4004 bp, Homo sapiens
gagaaatccatgactcacatatatcgtccgtcatccccagtcaagctcagggaggagggaggagcccagctggggcaggagaggggtgtctccccaccaaacaaacccggtccctccctctccgcactagctgtctgccctgccctgccgtaggagatgggctgggagcctcccacgctctccagctcactcggcaggcagcggggaccagggctggcaggttaagcctctgggggtggatcctgaaaggtggtccagccgcctggccctgcgtgggaccctccacctggcagcaggtacccaaacaagggctggacagcagggtctcgctctgtcacacaggctggagtgcagtggtgtgatcttggctcatcgtaacctccacctcccgggttcaagtgattctcatgcctcagcctcccgagtagctgggattacaggtggtgacttccaagagtgactccgtcggaggaaaatgactccccagtcgctgctgcagacgacactgttcctgctgagtctgctcttcctggtccaaggtgcccacggcaggggccacagggaagactttcgcttctgcagccagcggaaccagacacacaggagcagcctccactacaaacccacaccagacctgcgcatctccatcgagaactccgaagaggccctcacagtccatgcccctttccctgcagcccaccctgcttcccgatccttccctgaccccaggggcctctaccacttctgcctctactggaaccgacatgctgggagattacatcttctctatggcaagcgtgacttcttgctgagtgacaaagcctctagcctcctctgcttccagcaccaggaggagagcctggctcagggccccccgctgttagccacttctgtcacctcctggtggagccctcagaacatcagcctgcccagtgccgccagcttcaccttctccttccacagtcctccccacacggccgctcacaatgcctcggtggacatgtgcgagctcaaaagggacctccagctgctcagccagttcctgaagcatccccagaaggcctcaaggaggccctcggctgcccccgccagccagcagttgcagagcctggagtcgaaactgacctctgtgagattcatgggggacatggtgtccttcgaggaggaccggatcaacgccacggtgtggaagctccagcccacagccggcctccaggacctgcacatccactcccggcaggaggaggagcagagcgagatcatggagtactcggtgctgctgcctcgaacactcttccagaggacgaaaggccggagcggggaggctgagaagagactcctcctggtggacttcagcagccaagccctgttccaggacaagaattccagccaagtcctgggtgagaaggtcttggggattgtggtacagaacaccaaagtagccaacctcacggagcccgtggtgctcactttccagcaccagctacagccgaagaatgtgactctgcaatgtgtgttctgggttgaagaccccacattgagcagcccggggcattggagcagtgctgggtgtgagaccgtcaggagagaaacccaaacatcctgcttctgcaaccacttgacctactttgcagtgctgatggtctcctcggtggaggtggacgccgtgcacaagcactacctgagcctcctctcctacgtgggctgtgtcgtctctgccctggcctgccttgtcaccattgccgcctacctctgctccaggaggaaacctcgggactacaccatcaaggtgcacatgaacctgctgctggccgtcttcctgctggacacgagcttcctgctcagcgagccggtggccctgacaggctctgaggctggctgccgagccagtgccatcttcctgcacttctccctgctcacctgcctttcctggatgggcctcgaggggtacaacctctaccgactcgtggtggaggtctttggcacctatgtccctggctacctactcaagctgagcgccatgggctggggcttccccatctttctggtgacgctggtggccctggtggatgtggacaactatggccccatcatcttggctgtgcataggactccagagggcgtcatctacccttccatgtgctggatccgggactccctggtcagctacatcaccaacctgggcctcttcagcctggtgtttctgttcaacatggccatgctagccaccatggtggtgcagatcctgcggctgcgcccccacacccaaaagtggtcacatgtgctgacactgctgggcctcagcctggtccttggcctgccctgggccttgatcttcttctcctttgcttctggcaccttccagcttgtcgtcctctaccttttcagcatcatcacctccttccaaggcttcctcatcttcatctggtactggtccatgcggctgcaggcccggggtggcccctcccctctgaagagcaactcagacagcgccaggctccccatcagctcgggcagcacctcgtccagccgcatctaggcctccagcccacctgcccatgtgatgaagcagagattcggcctcgtcgcacactgcctgtggcccccgagcccggcccagccccaggccagtcagccgcagactttggaaagcccaacgaccatggagagatgggccgttgccatggtggacggactcccgggctgggcttttgaattggccttggggactactcggctctcactcagctcccacgggactcagaagtgcgccgccatgctgcctagggtactgtccccacatctgtcccaacccagctggaggcctggtctctccttacaacccctgggcccagccctcattgctgggggccaggccttggatcttgagggtctggcacatccttaatcctgtgcccctgcctgggacagaaatgtggctccagttgctctgtctctcgtggtcaccctgagggcactctgcatcctctgtcattttaacctcaggtggcacccagggcgaatggggcccagggcagaccttcagggccagagccctggcggaggagaggccctttgccaggagcacagcagcagctcgcctacctctgagcccaggccccctccctccctcagccccccagtcctccctccatcttccctggggttctcctcctctcccagggcctccttgctccttcgttcacagctgggggtccccgattccaatgctgttttttggggagtggtttccaggagctgcctggtgtctgctgtaaatgtttgtctactgcacaagcctcggcctgcccctgagccaggctcggtaccgatgcgtgggctgggctaggtccctctgtccatctgggcctttgtatgagctgcattgcccttgctcaccctgaccaagcacacgcctcagaggggccctcagcctctcctgaagccctcttgtggcaagaactgtggaccatgccagtcccgtctggtttccatcccaccactccaaggactgagactgacctcctctggtgacactggcctagggcctgacactctcctaagaggttctctccaagcccccaaatagctccaggcgccctcggccgcccatcatggttaattctgtccaacaaacacacacgggtagattgctggcctgttgtaggtggtagggacacagatgaccgacctggtcactcctcctgccaacattcagtctggtatgtgaggcgtgcgtgaagcaagaactcctggagctacagggacagggagccatcattcctgcctgggaatcctggaagacttcctgcaggagtcagcgttcaatcttgaccttgaagatgggaaggatgttctttttacgtaccaattcttttgtcttttgatattaaaaagaagtacatgttcattgtagagaatttggaaactgtagaagagaatcaagaagaaaaataaaaatcagctgttgtaatcacctagcaaactggaaaaaaaaaaaaaaa

SEQ ID NO: 4792 - DNA, 3875 bp, Homo sapiens
gagaaatccatgactcacatatatcgtccgtcatccccagtcaagctcagggaggagggaggagcccagctggggcaggagaggggtgtctccccaccaaacaaacccggtccctccctctccgcactagctgtctgccctgccctgccgtaggagatgggctgggagcctcccacgctctccagctcactcggcaggcagcggggaccagggctggcaggttaagcctctgggggtggatcctgaaaggtggtccagccgcctggccctgcgtgggaccctccacctggcagcaggtggtgacttccaagagtgactccgtcggaggaaaatgactccccagtcgctgctgcagacgacactgttcctgctgagtctgctcttcctggtccaagcctctgcctcctcaggtgcccacggcaggggccacagggaagactttcgcttctgcagccagcggaaccagacacacaggagcagcctccactacaaacccacaccagacctgcgcatctccatcgagaactccgaagaggccctcacagtccatgcccctttccctgcagcccaccctgcttcccgatccttccctgaccccaggggcctctaccacttctgcctctactggaaccgacatgctgggagattacatcttctctatggcaagcgtgacttcttgctgagtgacaaagcctctagcctcctctgcttccagcaccaggaggagagcctggctcagggccccccgctgttagccacttctgtcacctcctggtggagccctcagaacatcagcctgcccagtgccgccagcttcaccttctccttccacagtcctccccacacggccgctcacaatgcctcggtggacatgtgcgagctcaaaagggacctccagctgctcagccagttcctgaagcatccccagaaggcctcaaggaggccctcggctgcccccgccagccagcagttgcagagcctggagtcgaaactgacctctgtgagattcatgggggacatggtgtccttcgaggaggaccggatcaacgccacggtgtggaagctccagcccacagccggcctccaggacctgcacatccactcccggcaggaggaggagcagagcgagatcatggagtactcggtgctgctgcctcgaacactcttccagaggacgaaaggccggagcggggaggctgagaagagactcctcctggtggacttcagcagccaagccctgttccaggacaagaattccagccaagtcctgggtgagaaggtcttggggattgtggtacagaacaccaaagtagccaacctcacggagcccgtggtgctcactttccagcaccagctacagccgaagaatgtgactctgcaatgtgtgttctgggttgaagaccccacattgagcagcccggggcattggagcagtgctgggtgtgagaccgtcaggagagaaacccaaacatcctgcttctgcaaccacttgacctactttgcagtgctgatggtctcctcggtggaggtggacgccgtgcacaagcactacctgagcctcctctcctacgtgggctgtgtcgtctctgccctggcctgccttgtcaccattgccgcctacctctgctccaggaggaaacctcgggactacaccatcaaggtgcacatgaacctgctgctggccgtcttcctgctggacacgagcttcctgctcagcgagccggtggccctgacaggctctgaggctggctgccgagccagtgccatcttcctgcacttctccctgctcacctgcctttcctggatgggcctcgaggggtacaacctctaccgactcgtggtggaggtctttggcacctatgtccctggctacctactcaagctgagcgccatgggctggggcttccccatctttctggtgacgctggtggccctggtggatgtggacaactatggccccatcatcttggctgtgcataggactccagagggcgtcatctacccttccatgtgctggatccgggactccctggtcagctacatcaccaacctgggcctcttcagcctggtgtttctgttcaacatggccatgctagccaccatggtggtgcagatcctgcggctgcgcccccacacccaaaagtggtcacatgtgctgacactgctgggcctcagcctggtccttggcctgccctgggccttgatcttcttctcctttgcttctggcaccttccagcttgtcgtcctctaccttttcagcatcatcacctccttccaaggcttcctcatcttcatctggtactggtccatgcggctgcaggcccggggtggcccctcccctctgaagagcaactcagacagcgccaggctccccatcagctcgggcagcacctcgtccagccgcatctaggcctccagcccacctgcccatgtgatgaagcagagattcggcctcgtcgcacactgcctgtggcccccgagcccggcccagccccaggccagtcagccgcagactttggaaagcccaacgaccatggagagatgggccgttgccatggtggacggactcccgggctgggcttttgaattggccttggggactactcggctctcactcagctcccacgggactcagaagtgcgccgccatgctgcctagggtactgtccccacatctgtcccaacccagctggaggcctggtctctccttacaacccctgggcccagccctcattgctgggggccaggccttggatcttgagggtctggcacatccttaatcctgtgcccctgcctgggacagaaatgtggctccagttgctctgtctctcgtggtcaccctgagggcactctgcatcctctgtcattttaacctcaggtggcacccagggcgaatggggcccagggcagaccttcagggccagagccctggcggaggagaggccctttgccaggagcacagcagcagctcgcctacctctgagcccaggccccctccctccctcagccccccagtcctccctccatcttccctggggttctcctcctctcccagggcctccttgctccttcgttcacagctgggggtccccgattccaatgctgttttttggggagtggtttccaggagctgcctggtgtctgctgtaaatgtttgtctactgcacaagcctcggcctgcccctgagccaggctcggtaccgatgcgtgggctgggctaggtccctctgtccatctgggcctttgtatgagctgcattgcccttgctcaccctgaccaagcacacgcctcagaggggccctcagcctctcctgaagccctcttgtggcaagaactgtggaccatgccagtcccgtctggtttccatcccaccactccaaggactgagactgacctcctctggtgacactggcctagggcctgacactctcctaagaggttctctccaagcccccaaatagctccaggcgccctcggccgcccatcatggttaattctgtccaacaaacacacacgggtagattgctggcctgttgtaggtggtagggacacagatgaccgacctggtcactcctcctgccaacattcagtctggtatgtgaggcgtgcgtgaagcaagaactcctggagctacagggacagggagccatcattcctgcctgggaatcctggaagacttcctgcaggagtcagcgttcaatcttgaccttgaagatgggaaggatgttctttttacgtaccaattcttttgtcttttgatattaaaaagaagtacatgttcattgtagagaatttggaaactgtagaagagaatcaagaagaaaaataaaaatcagctgttgtaatcacctagcaaactggaaaaaaaaaaaaaaa

SEQ ID NO: 4793 - DNA, 4058 bp, Homo sapiens
acttgggaacaggacaagttacggagccacgttgctttgctgggtctgagccggggtgtgacgtagtccctgcagctgccaacggttgccagggcaacggttgccaggggctgctgtcacctgcgccccttctcccgcgctggcggctggggcttctcagcctctattccctggctgtcccctttgtttgaagctccagtgagggagcagtggctggggtggcccagcttcaaagtctctgtcctcttgaaaaaaggtggtcgggggacattgacccaccagccccgcaggctactgcctgcaaacaagaacccctcatctgccacgcacgttcttaatgtatctatagtctgcctgatgccacaaaggagtccagggtctcgctctgtcacacaggctggagtgcagtggtgtgatcttggctcatcgtaacctccacctcccgggttcaagtgattctcatgcctcagcctcccgagtagctgggattacaggtggtgacttccaagagtgactccgtcggaggaaaatgactccccagtcgctgctgcagacgacactgttcctgctgagtctgctcttcctggtccaaggtgcccacggcaggggccacagggaagactttcgcttctgcagccagcggaaccagacacacaggagcagcctccactacaaacccacaccagacctgcgcatctccatcgagaactccgaagaggccctcacagtccatgcccctttccctgcagcccaccctgcttcccgatccttccctgaccccaggggcctctaccacttctgcctctactggaaccgacatgctgggagattacatcttctctatggcaagcgtgacttcttgctgagtgacaaagcctctagcctcctctgcttccagcaccaggaggagagcctggctcagggccccccgctgttagccacttctgtcacctcctggtggagccctcagaacatcagcctgcccagtgccgccagcttcaccttctccttccacagtcctccccacacggccgctcacaatgcctcggtggacatgtgcgagctcaaaagggacctccagctgctcagccagttcctgaagcatccccagaaggcctcaaggaggccctcggctgcccccgccagccagcagttgcagagcctggagtcgaaactgacctctgtgagattcatgggggacatggtgtccttcgaggaggaccggatcaacgccacggtgtggaagctccagcccacagccggcctccaggacctgcacatccactcccggcaggaggaggagcagagcgagatcatggagtactcggtgctgctgcctcgaacactcttccagaggacgaaaggccggagcggggaggctgagaagagactcctcctggtggacttcagcagccaagccctgttccaggacaagaattccagccaagtcctgggtgagaaggtcttggggattgtggtacagaacaccaaagtagccaacctcacggagcccgtggtgctcactttccagcaccagctacagccgaagaatgtgactctgcaatgtgtgttctgggttgaagaccccacattgagcagcccggggcattggagcagtgctgggtgtgagaccgtcaggagagaaacccaaacatcctgcttctgcaaccacttgacctactttgcagtgctgatggtctcctcggtggaggtggacgccgtgcacaagcactacctgagcctcctctcctacgtgggctgtgtcgtctctgccctggcctgccttgtcaccattgccgcctacctctgctccaggaggaaacctcgggactacaccatcaaggtgcacatgaacctgctgctggccgtcttcctgctggacacgagcttcctgctcagcgagccggtggccctgacaggctctgaggctggctgccgagccagtgccatcttcctgcacttctccctgctcacctgcctttcctggatgggcctcgaggggtacaacctctaccgactcgtggtggaggtctttggcacctatgtccctggctacctactcaagctgagcgccatgggctggggcttccccatctttctggtgacgctggtggccctggtggatgtggacaactatggccccatcatcttggctgtgcataggactccagagggcgtcatctacccttccatgtgctggatccgggactccctggtcagctacatcaccaacctgggcctcttcagcctggtgtttctgttcaacatggccatgctagccaccatggtggtgcagatcctgcggctgcgcccccacacccaaaagtggtcacatgtgctgacactgctgggcctcagcctggtccttggcctgccctgggccttgatcttcttctcctttgcttctggcaccttccagcttgtcgtcctctaccttttcagcatcatcacctccttccaaggcttcctcatcttcatctggtactggtccatgcggctgcaggcccggggtggcccctcccctctgaagagcaactcagacagcgccaggctccccatcagctcgggcagcacctcgtccagccgcatctaggcctccagcccacctgcccatgtgatgaagcagagattcggcctcgtcgcacactgcctgtggcccccgagcccggcccagccccaggccagtcagccgcagactttggaaagcccaacgaccatggagagatgggccgttgccatggtggacggactcccgggctgggcttttgaattggccttggggactactcggctctcactcagctcccacgggactcagaagtgcgccgccatgctgcctagggtactgtccccacatctgtcccaacccagctggaggcctggtctctccttacaacccctgggcccagccctcattgctgggggccaggccttggatcttgagggtctggcacatccttaatcctgtgcccctgcctgggacagaaatgtggctccagttgctctgtctctcgtggtcaccctgagggcactctgcatcctctgtcattttaacctcaggtggcacccagggcgaatggggcccagggcagaccttcagggccagagccctggcggaggagaggccctttgccaggagcacagcagcagctcgcctacctctgagcccaggccccctccctccctcagccccccagtcctccctccatcttccctggggttctcctcctctcccagggcctccttgctccttcgttcacagctgggggtccccgattccaatgctgttttttggggagtggtttccaggagctgcctggtgtctgctgtaaatgtttgtctactgcacaagcctcggcctgcccctgagccaggctcggtaccgatgcgtgggctgggctaggtccctctgtccatctgggcctttgtatgagctgcattgcccttgctcaccctgaccaagcacacgcctcagaggggccctcagcctctcctgaagccctcttgtggcaagaactgtggaccatgccagtcccgtctggtttccatcccaccactccaaggactgagactgacctcctctggtgacactggcctagggcctgacactctcctaagaggttctctccaagcccccaaatagctccaggcgccctcggccgcccatcatggttaattctgtccaacaaacacacacgggtagattgctggcctgttgtaggtggtagggacacagatgaccgacctggtcactcctcctgccaacattcagtctggtatgtgaggcgtgcgtgaagcaagaactcctggagctacagggacagggagccatcattcctgcctgggaatcctggaagacttcctgcaggagtcagcgttcaatcttgaccttgaagatgggaaggatgttctttttacgtaccaattcttttgtcttttgatattaaaaagaagtacatgttcattgtagagaatttggaaactgtagaagagaatcaagaagaaaaataaaaatcagctgttgtaatcacctagcaaactggaaaaaaaaaaaaaaa

SEQ ID NO: 4794 - DNA, 2787 bp, Homo sapiens; identical to SEQ ID NO: 765

SEQ ID NO: 4795 - DNA, 2774 bp, Homo sapiens
attgtttgcttgttttgttccggagtcggggccgggagggagtgcaggaggagggatccaagcttccaagcctctgctccgctctccttctatccagttggtctttagggcactgaaggaaactcttcttcagaaataaccttttaacttttcttctgtcagctgcctgccaatcacggagccagaggctgaggggaggctttgagccggtctgcgagtccggaaggcaaagatcgcgaagcttggcgctccagaacgctcagggggcaggtagcgctggtggattggaatcttgaagcaggtgtacagtgtaaagctgccctggatgagcagtttgaacctcagaagactctgttcatccagtgcgatgtggctgaccagcaacaactgagagacacttttagaaaagttgtagaccactttggaagactggacattttggtcaataatgctggagtgaataatgagaaaaactgggaaaaaactctgcaaattaatttggtttctgttatcagtggaacctatcttggtttggattacatgagtaagcaaaatggaggtgaaggcggcatcattatcaatatgtcatctttagcaggactcatgcccgttgcacagcagccggtttattgtgcttcaaagcatggcatagttggattcacacgctcagcagcgttggctgctaatcttatgaacagtggtgtgagactgaatgccatttgtccaggctttgttaacacagccatccttgaatcaattgaaaaagaagaaaacatgggacaatatatagaatataaggatcatatcaaggatatgattaaatactatggaattttggacccaccattgattgccaatggattgataacactcattgaagatgatgctttaaatggtgctattatgaagatcacaacttctaagggaattcattttcaagactatgatacaactccatttcaagcaaaaacccaatgaacagcttatgtgttagccatagctgaaaataagcacaaatagcttatattcagatcctatcttcatttgaatatagcttttaaatgaaatgttacagtttgaagttttccttcatgcacttggtgataaacgttttctaaatttttagttaagtatatggataaaaagttatgaactattaaaaatgtgatgtggaccaaaggctaggttgtaatcttgatagtctaaaaaatgatcaaaacaaatgattttcaaggaatattcaatattctgcctttcagaaagtgtatttatatctgtgcttcataaatattaatgttcttcagaacatcattttaaaggagatacttgaattgttatttaaatcaaaccagatgtaaaacactcacatacaagttcatactttaaaagaggaaagctacttaacaatgacaaatatttcacaataataatttttacttatataccatctttcaactgaacatttcagttcttccaagagcttcttagagtagtatattttgggggcagtcaaggaataaactacagtgtaaacatatcccagatgaaaactgctgtatggaaaaatgacagaaagtaactgattgacactgttgattcacagttcagcctcctatctgggaaagacatttctttcctctgctcactttaagaacttttaccgactccaaaaatctcaggaattaaacttttaacagttacagcaataaagaatagttagtactccaaaaatattatatttaagatgctcaacaagaaaaaaatgcaaatgtaatatttttttcaaattacttctttattgacttgtccaaatttcaaaagtgcctacccttcaataaaacttttttattctgatctccataaattacttagtcttctatgtatagctatcaaggaaataaaaccaattttgccacagccacaactgtaaatgtttttgtacccatgctgaaactcataacaacacagacataaaaatagctgtgaggttttgctttttttgttgtcagctatcttaagaatcattaaatacacctgctttgggtaaaactctttgcaagcagtaattaacactagtaacagtgaaagcacaagatttccaaatcagtcgttttctcaaaaaaatatcgtataagtgactcatcctgtctgctaactccagacctcccagcttgaagccaaatctttccatgtgagattgatatggatttcctagaagtactggaatgttgtcatatcttgccctattttaattctgctatagaaaacaattgccttcacttttaaggagtaatttgaatattaataactctggtctagattttcatataatgtattaaagacaaagtagtgaacatcaatgaacatctgatagagataaactgtaatcaggcataagcttgtttgtatgttctggcagtgactaatcagtaaatgatgtcggtttgcccagtatcacttatcttctgtatttttcctctgtcgtgtaaatagtataaccttttcatttatggacaattttttggactagtagccttcaatatacattctgctttgaattaattttttcaaatcaataaattatgtagacatttaaaatcaaatatcaagtagaattgaaaaatgtgagttacataagttaaaaacttactttaaatcttaccttctataggtagctctaaataaattcatatggttatatggcatctctggtgtatactgattgagaaaataattaaactgaagttaggggaggggaaaaaaaaaaaaaaaaa

SEQ ID NO: 4796 - DNA, 2623 bp, Homo sapiens
agaacgctcagggggcaggtgacacagtcgtgggttccccggcgggcgctggcttgacagtttcctccccgcccactggcaggggagcgccccgccgggctgcacgcgcgcgcgcgcaggggggcataaaagccgcggccgcgcggagacgcggagctcgcccaccgcccgccccagcagtggctgcaccatgcacgtgaacggcaaagtggcgctggtgaccggcgcggctcagggcataggcagagcctttgcagaggcgctgctgcttaagggcgccaaggtagcgctggtggattggaatcttgaagcaggtgtacagtgtaaagctgccctggatgagcagtttgaacctcagaagactctgttcatccagtgcgatgtggctgaccagcaacaactgagagacacttttagaaaagttgtagaccactttggaagactggacattttggtcaataatgctggagtgaataatgagaaaaactgggaaaaaactctgcaaattaatttggtttctgttatcagtggaacctatcttggtttggattacatgagtaagcaaaatggaggtgaaggcggcatcattatcaatatgtcatctttagcaggactcatgcccgttgcacagcagccggtttattgtgcttcaaagcatggcatagttggattcacacgctcagcagcgcccaccattgattgccaatggattgataacactcattgaagatgatgctttaaatggtgctattatgaagatcacaacttctaagggaattcattttcaagactatgatacaactccatttcaagcaaaaacccaatgaacagcttatgtgttagccatagctgaaaataagcacaaatagcttatattcagatcctatcttcatttgaatatagcttttaaatgaaatgttacagtttgaagttttccttcatgcacttggtgataaacgttttctaaatttttagttaagtatatggataaaaagttatgaactattaaaaatgtgatgtggaccaaaggctaggttgtaatcttgatagtctaaaaaatgatcaaaacaaatgattttcaaggaatattcaatattctgcctttcagaaagtgtatttatatctgtgcttcataaatattaatgttcttcagaacatcattttaaaggagatacttgaattgttatttaaatcaaaccagatgtaaaacactcacatacaagttcatactttaaaagaggaaagctacttaacaatgacaaatatttcacaataataatttttacttatataccatctttcaactgaacatttcagttcttccaagagcttcttagagtagtatattttgggggcagtcaaggaataaactacagtgtaaacatatcccagatgaaaactgctgtatggaaaaatgacagaaagtaactgattgacactgttgattcacagttcagcctcctatctgggaaagacatttctttcctctgctcactttaagaacttttaccgactccaaaaatctcaggaattaaacttttaacagttacagcaataaagaatagttagtactccaaaaatattatatttaagatgctcaacaagaaaaaaatgcaaatgtaatatttttttcaaattacttctttattgacttgtccaaatttcaaaagtgcctacccttcaataaaacttttttattctgatctccataaattacttagtcttctatgtatagctatcaaggaaataaaaccaattttgccacagccacaactgtaaatgtttttgtacccatgctgaaactcataacaacacagacataaaaatagctgtgaggttttgctttttttgttgtcagctatcttaagaatcattaaatacacctgctttgggtaaaactctttgcaagcagtaattaacactagtaacagtgaaagcacaagatttccaaatcagtcgttttctcaaaaaaatatcgtataagtgactcatcctgtctgctaactccagacctcccagcttgaagccaaatctttccatgtgagattgatatggatttcctagaagtactggaatgttgtcatatcttgccctattttaattctgctatagaaaacaattgccttcacttttaaggagtaatttgaatattaataactctggtctagattttcatataatgtattaaagacaaagtagtgaacatcaatgaacatctgatagagataaactgtaatcaggcataagcttgtttgtatgttctggcagtgactaatcagtaaatgatgtcggtttgcccagtatcacttatcttctgtatttttcctctgtcgtgtaaatagtataaccttttcatttatggacaattttttggactagtagccttcaatatacattctgctttgaattaattttttcaaatcaataaattatgtagacatttaaaatcaaatatcaagtagaattgaaaaatgtgagttacataagttaaaaacttactttaaatcttaccttctataggtagctctaaataaattcatatggttatatggcatctctggtgtatactgattgagaaaataattaaactgaagttaggggaggggaaaaaaaaaaaaaaaaa

SEQ ID NO: 4797 - DNA, 6895 bp, Homo sapiens
cccgacttcactctctccctatttccccactcttaggtttaaaagtctgtcacctttcgcttggtttaaactcggaaaggtctcagtgcacagcaaagttgcagggctgcgtctgcactacggagcctctagattgctgaaaacagtcttatggaaggataacacattgtctgtcactggctggttgtaatgcaaggaagggacaaagatgaaatggaaacatgttccttttttggtcatgatatcactcctcagcttatccccaaatcacctgtttctggcccagcttattccagaccctgaagatgtagagagggggaacgaccacgggacgccaatccccacctctgataacgatgacaattcgctgggctatacaggctcccgtcttcgtcaggaagattttccacctcgcattgttgaacacccttcagacctgattgtctcaaaaggagaacctgcaactttgaactgcaaagctgaaggccgccccacacccactattgaatggtacaaagggggagagagagtggagacagacaaagatgaccctcgctcacaccgaatgttgctgccgagtggatctttatttttcttacgtatagtacatggacggaaaagtagacctgatgaaggagtctatgtctgtgtagcaaggaattaccttggagaggctgtgagccacaatgcatcgctggaagtagccatacttcgggatgacttcagacaaaacccttcggatgtcatggttgcagtaggagagcctgcagtaatggaatgccaacctccacgaggccatcctgagcccaccatttcatggaagaaagatggctctccactggatgataaagatgaaagaataactatacgaggaggaaagctcatgatcacttacacccgtaaaagtgacgctggcaaatatgtttgtgttggtaccaatatggttggggaacgtgagagtgaagtagccgagctgactgtcttagagagaccatcatttgtgaagagacccagtaacttggcagtaactgtggatgacagtgcagaatttaaatgtgaggcccgaggtgaccctgtacctacagtacgatggaggaaagatgatggagagctgcccaaatccagatatgaaatccgagatgatcataccttgaaaattaggaaggtgacagctggtgacatgggttcatacacttgtgttgcagaaaatatggtgggcaaagctgaagcatctgctactctgactgttcaagaacctccacattttgttgtgaaaccccgtgaccaggttgttgctttgggacggactgtaacttttcagtgtgaagcaaccggaaatcctcaaccagctattttctggaggagagaagggagtcagaatctacttttctcatatcaaccaccacagtcatccagccgattttcagtctcccagactggcgacctcacaattactaatgtccagcgatctgatgttggttattacatctgccagactttaaatgttgctggaagcatcatcacaaaggcatatttggaagttacagatgtgattgcagatcggcctcccccagttattcgacaaggtcctgtgaatcagactgtagccgtggatggcactttcgtcctcagctgtgtggccacaggcagtccagtgcccaccattctgtggagaaaggatggagtcctcgtttcaacccaagactctcgaatcaaacagttggagaatggagtactgcagatccgatatgctaagctgggtgatactggtcggtacacctgcattgcatcaacccccagtggtgaagcaacatggagtgcttacattgaagttcaagaatttggagttccagttcagcctccaagacctactgacccaaatttaatccctagtgccccatcaaaacctgaagtgacagatgtcagcagaaatacagtcacattatcgtggcaaccaaatttgaattcaggagcaactccaacatcttatattatagaagccttcagccatgcatctggtagcagctggcagaccgtagcagagaatgtgaaaacagaaacatctgccattaaaggactcaaacctaatgcaatttaccttttccttgtgagggcagctaatgcatatggaattagtgatccaagccaaatatcagatccagtgaaaacacaagatgtcctaccaacaagtcagggggtggaccacaagcaggtccagagagagctgggaaatgctgttctgcacctccacaaccccaccgtcctttcttcctcttccatcgaagtgcactggacagtagatcaacagtctcagtatatacaaggatataaaattctctatcggccatctggagccaaccacggagaatcagactggttagtttttgaagtgaggacgccagccaaaaacagtgtggtaatccctgatctcagaaagggagtcaactatgaaattaaggctcgccctttttttaatgaatttcaaggagcagatagtgaaatcaagtttgccaaaaccctggaagaagcacccagtgccccaccccaaggtgtaactgtatccaagaatgatggaaacggaactgcaattctagttagttggcagccacctccagaagacactcaaaatggaatggtccaagagtataaggtttggtgtctgggcaatgaaactcgataccacatcaacaaaacagtggatggttccaccttttccgtggtcattccctttcttgttcctggaatccgatacagtgtggaagtggcagccagcactggggctgggtctggggtaaagagtgagcctcagttcatccagctggatgcccatggaaaccctgtgtcacctgaggaccaagtcagcctcgctcagcagatttcagatgtggtgaagcagccggccttcatagcaggtattggagcagcctgttggatcatcctcatggtcttcagcatctggctttatcgacaccgcaagaagagaaacggacttactagtacctacgcgggtatcagaaaagtcccgtcttttaccttcacaccaacagtaacttaccagagaggaggcgaagctgtcagcagtggagggaggcctggacttctcaacatcagtgaacctgccgcgcagccatggctggcagacacgtggcctaatactggcaacaaccacaatgactgctccatcagctgctgcacggcaggcaatggaaacagcgacagcaacctcactacctacagtcgcccagctgattgtatagcaaattataacaaccaactggataacaaacaaacaaatctgatgctccctgagtcaactgtttatggtgatgtggaccttagtaacaaaatcaatgagatgaaaaccttcaatagcccaaatctgaaggatgggcgttttgtcaatccatcagggcagcctactccttacgccaccactcagctcatccagtcaaacctcagcaacaacatgaacaatggcagcggggactctggcgagaagcactggaaaccactgggacagcagaaacaagaagtggcaccagttcagtacaacatcgtggagcaaaacaagctgaacaaagattatcgagcaaatgacacagttcctccaactatcccatacaaccaatcatacgaccagaacacaggaggatcctacaacagctcagaccggggcagtagtacatctgggagtcaggggcacaagaaaggggcaagaacacccaaggtaccaaaacagggtggcatgaactgggcagacctgcttcctcctcccccagcacatcctcctccacacagcaatagcgaagagtacaacatttctgtagatgaaagctatgaccaagaaatgccatgtcccgtgccaccagcaaggatgtatttgcaacaagatgaattagaagaggaggaagatgaacgaggccccactccccctgttcggggagcagcttcttctccagctgccgtgtcctatagccatcagtccactgccactctgactccctccccacaggaagaactccagcccatgttacaggattgtccagaggagactggccacatgcagcaccagcccgacaggagacggcagcctgtgagtcctcctccaccaccacggccgatctcccctccacatacctatggctacatttcaggacccctggtctcagatatggatacggatgcgccagaagaggaagaagacgaagccgacatggaggtagccaagatgcaaaccagaaggcttttgttacgtgggcttgagcagacacctgcctccagtgttggggacctggagagctctgtcacggggtccatgatcaacggctggggctcagcctcagaggaggacaacatttccagcggacgctccagtgttagttcttcggacggctcctttttcactgatgctgactttgcccaggcagtcgcagcagcggcagagtatgctggtctgaaagtagcacgacggcaaatgcaggatgctgctggccgtcgacattttcatgcgtctcagtgccctaggcccacaagtcccgtgtctacagacagcaacatgagtgccgccgtaatgcagaaaaccagaccagccaagaaactgaaacaccagccaggacatctgcgcagagaaacctacacagatgatcttccaccacctcctgtgccgccacctgctataaagtcacctactgcccaatccaagacacagctggaagtacgacctgtagtggtgccaaaactcccttctatggatgcaagaacagacagatcatcagacagaaaaggaagcagttacaaggggagagaagtgttggatggaagacaggttgttgacatgcgaacaaatccaggtgatcccagagaagcacaggaacagcaaaatgacgggaaaggacgtggaaacaaggcagcaaaacgagaccttccaccagcaaagactcatctcatccaagaggatattctaccttattgtagacctacttttccaacatcaaataatcccagagatcccagttcctcaagctcaatgtcatcaagaggatcaggaagcagacaaagagaacaagcaaatgtaggtcgaagaaatattgcagaaatgcaggtacttggaggatatgaaagaggagaagataataatgaagaattagaggaaactgaaagctgaagacaaccaagaggcttatgagatctaatgtgaaaatcatcactcaagatgcctcctgtcagatgacacatgacgccagataaaatgttcagtgcaatcagagtgtacaaattgtcgtttttattcctcttattgggatatcattttaaaaactttattgggtttttattgttgttgtttgatccctaaccctacaaagagccttcctattcccctcgctgttggagcaaaccattataccttacttccagcaagcaaagtgctttgacttcttgcttcagtcatcagccagcaagagggaacaaaactgttcttttgcattttgccgctgagatatggcattgcactgcttatatgccaagctaatttatagcaagatattgatcaaatatagaaagttgatattcaacctcacaagggctctcaaagtataatctttctatagccaactgctaatgcaaattaaaacatatttcattttaacatgatttcaaaatcagtttttcatactaccctttgctggaagaaactaaaaatatagcaaatgcagaaccacaaacaattcgaatggggtagaaacattgtaaatatttactctttgcaaaccctggtggtattttattttggcttcatttcaatcattgaagtatattcttattggaaatgtacttttggataagtagggctaagccagttggatctctggttgtctagtcattgtcataagtaaacctagtaaaaccttgttctatttttcaatcatcaaaaagtaattataaatacgtattacaaacaagtggatgtttttaatgaccaattgagtaagaacatccctgtcttaactggcctaaatttcttctggtagtgtcagttcaactttcagaagtgccacttaaggaagtttgatttttgtttttgtaatgcactgtttttaatctctctctctttttttttttttttttggttttaaaagcacaatcactaaactttatttgtaaaccattgtaactattaaccttttttgtcttattgaaaaaaaaaatgttgagaagcgtttttaacctgttttgttaatgctctatgtttgtatttggaatatttgaataatgacagatggtgaagtaacatgcatactttattgtgggccatgaaccaaatggttcttacttttcctggacttaaagaaaaaaagaggtttaagtttgttgtggccaatgtcgaaacctacaagatttccttaaaatctctaatagaggcattacttgctttcaattgacaaatgatgccctctgactagtagatttctatgatccttttttgtcattttatgaatatcattgattttataattggtgctatttgaagaaaaaaatgtacatttattcatagatagataagtatcaggtctgaccccagtggaaaacaaagccaaacaaaactgaaccacaaaaaaaaaggctggtgttcaccaaaaccaaacttgttcatttagataatttgaaaaagttccatagaaaaggcgtgcagtactaagggaacaatccatgtgattaatgttttcattatgttcatgtaagaagccccttatttttagccataattttgcatactgaaaatccaataatcagaaaagtaattttgtcacattatttattaaaaatgttctcaaatacataaaaaaaaaaaaaaaaaaaaaaaaaaaaaaaaaaaaaaaaaaaaaaaaaaaaaaaa

SEQ ID NO: 4798 - DNA, 7385 bp, Homo sapiens
aattgagctggagaggaggcagcgtgagagcagaaacttcagacgccgctgatccgggaggagctggggtgagccgcggcggccgtctctcccacccgcagcagcatcctctctgcccttctctgccaccccggggagagccgggagctgcctctttacagcttccacgagccaggggtgcaggcagctgcccccaggaagtttgggcttctgcgtagtttaggggtgcctgcgagcgccccagagggcgaggggccgagggcgatgttgggcgccgcgcggggctgggggcgcccagaagacgtgcgagtgtccgcggtcctgctgctgtctccagtaccctccgcatcccccaagtgatgggaacaagggcccgcccaggcagccgctgtcgccgcaccgccccctcgctcgctctctgcgcgcggagtcacccagtcacactcccggcaccccgagcccttcctccggagctgctgcttctactttggctgctatcgccgccgccgcgggtggcccgctgctgactgggctcgccgggagacggagaagcactttttggccctccctcagcagctctcacaccccaactttgccgccgccgccgcgcctgccctcgcagcggcgctcggccgcacattgtgggggcgcacgccgggaggctccgcaagaccgtggaggcaggaaacggcactactgcgcttctgcctcggctctttgttgttcgctttggatggttcttgaaagtgtctgagcctcctcggaaatcctggggccggagaagacaaaccttggaattcttcctctgcaaaagtctctgagatactgacaagcgtccggaaaggtcgacgagtaattgccctgaaaactcttggctaattgacccacgttgcttatattaagcctttgtgtgtggtgtgtggcttcatacatttggggaccctatttccactccctcctcttggcatgagactgtatacaggatccacccgaggacaatgattgcggagcccgctcacttttacctgtttggattaatatgtctctgttcaggctcccgtcttcgtcaggaagattttccacctcgcattgttgaacacccttcagacctgattgtctcaaaaggagaacctgcaactttgaactgcaaagctgaaggccgccccacacccactattgaatggtacaaagggggagagagagtggagacagacaaagatgaccctcgctcacaccgaatgttgctgccgagtggatctttatttttcttacgtatagtacatggacggaaaagtagacctgatgaaggagtctatgtctgtgtagcaaggaattaccttggagaggctgtgagccacaatgcatcgctggaagtagccatacttcgggatgacttcagacaaaacccttcggatgtcatggttgcagtaggagagcctgcagtaatggaatgccaacctccacgaggccatcctgagcccaccatttcatggaagaaagatggctctccactggatgataaagatgaaagaataactatacgaggaggaaagctcatgatcacttacacccgtaaaagtgacgctggcaaatatgtttgtgttggtaccaatatggttggggaacgtgagagtgaagtagccgagctgactgtcttagagagaccatcatttgtgaagagacccagtaacttggcagtaactgtggatgacagtgcagaatttaaatgtgaggcccgaggtgaccctgtacctacagtacgatggaggaaagatgatggagagctgcccaaatccagatatgaaatccgagatgatcataccttgaaaattaggaaggtgacagctggtgacatgggttcatacacttgtgttgcagaaaatatggtgggcaaagctgaagcatctgctactctgactgttcaagttgggtctgaacctccacattttgttgtgaaaccccgtgaccaggttgttgctttgggacggactgtaacttttcagtgtgaagcaaccggaaatcctcaaccagctattttctggaggagagaagggagtcagaatctacttttctcatatcaaccaccacagtcatccagccgattttcagtctcccagactggcgacctcacaattactaatgtccagcgatctgatgttggttattacatctgccagactttaaatgttgctggaagcatcatcacaaaggcatatttggaagttacagatgtgattgcagatcggcctcccccagttattcgacaaggtcctgtgaatcagactgtagccgtggatggcactttcgtcctcagctgtgtggccacaggcagtccagtgcccaccattctgtggagaaaggatggagtcctcgtttcaacccaagactctcgaatcaaacagttggagaatggagtactgcagatccgatatgctaagctgggtgatactggtcggtacacctgcattgcatcaacccccagtggtgaagcaacatggagtgcttacattgaagttcaagaatttggagttccagttcagcctccaagacctactgacccaaatttaatccctagtgccccatcaaaacctgaagtgacagatgtcagcagaaatacagtcacattatcgtggcaaccaaatttgaattcaggagcaactccaacatcttatattatagaagccttcagccatgcatctggtagcagctggcagaccgtagcagagaatgtgaaaacagaaacatctgccattaaaggactcaaacctaatgcaatttaccttttccttgtgagggcagctaatgcatatggaattagtgatccaagccaaatatcagatccagtgaaaacacaagatgtcctaccaacaagtcagggggtggaccacaagcaggtccagagagagctgggaaatgctgttctgcacctccacaaccccaccgtcctttcttcctcttccatcgaagtgcactggacagtagatcaacagtctcagtatatacaaggatataaaattctctatcggccatctggagccaaccacggagaatcagactggttagtttttgaagtgaggacgccagccaaaaacagtgtggtaatccctgatctcagaaagggagtcaactatgaaattaaggctcgccctttttttaatgaatttcaaggagcagatagtgaaatcaagtttgccaaaaccctggaagaagcacccagtgccccaccccaaggtgtaactgtatccaagaatgatggaaacggaactgcaattctagttagttggcagccacctccagaagacactcaaaatggaatggtccaagagtataaggtttggtgtctgggcaatgaaactcgataccacatcaacaaaacagtggatggttccaccttttccgtggtcattccctttcttgttcctggaatccgatacagtgtggaagtggcagccagcactggggctgggtctggggtaaagagtgagcctcagttcatccagctggatgcccatggaaaccctgtgtcacctgaggaccaagtcagcctcgctcagcagatttcagatgtggtgaagcagccggccttcatagcaggtattggagcagcctgttggatcatcctcatggtcttcagcatctggctttatcgacaccgcaagaagagaaacggacttactagtacctacgcgggtatcagaaaagtaacttaccagagaggaggcgaagctgtcagcagtggagggaggcctggacttctcaacatcagtgaacctgccgcgcagccatggctggcagacacgtggcctaatactggcaacaaccacaatgactgctccatcagctgctgcacggcaggcaatggaaacagcgacagcaacctcactacctacagtcgcccagggcagcctactccttacgccaccactcagctcatccagtcaaacctcagcaacaacatgaacaatggcagcggggactctggcgagaagcactggaaaccactgggacagcagaaacaagaagtggcaccagttcagtacaacatcgtggagcaaaacaagctgaacaaagattatcgagcaaatgacacagttcctccaactatcccatacaaccaatcatacgaccagaacacaggaggatcctacaacagctcagaccggggcagtagtacatctgggagtcaggggcacaagaaaggggcaagaacacccaaggtaccaaaacagggtggcatgaactgggcagacctgcttcctcctcccccagcacatcctcctccacacagcaatagcgaagagtacaacatttctgtagatgaaagctatgaccaagaaatgccatgtcccgtgccaccagcaaggatgtatttgcaacaagatgaattagaagaggaggaagatgaacgaggccccactccccctgttcggggagcagcttcttctccagctgccgtgtcctatagccatcagtccactgccactctgactccctccccacaggaagaactccagcccatgttacaggattgtccagaggagactggccacatgcagcaccagcccgacaggagacggcagcctgtgagtcctcctccaccaccacggccgatctcccctccacatacctatggctacatttcaggacccctggtctcagatatggatacggatgcgccagaagaggaagaagacgaagccgacatggaggtagccaagatgcaaaccagaaggcttttgttacgtgggcttgagcagacacctgcctccagtgttggggacctggagagctctgtcacggggtccatgatcaacggctggggctcagcctcagaggaggacaacatttccagcggacgctccagtgttagttcttcggacggctcctttttcactgatgctgactttgcccaggcagtcgcagcagcggcagagtatgctggtctgaaagtagcacgacggcaaatgcaggatgctgctggccgtcgacattttcatgcgtctcagtgccctaggcccacaagtcccgtgtctacagacagcaacatgagtgccgccgtaatgcagaaaaccagaccagccaagaaactgaaacaccagccaggacatctgcgcagagaaacctacacagatgatcttccaccacctcctgtgccgccacctgctataaagtcacctactgcccaatccaagacacagctggaagtacgacctgtagtggtgccaaaactcccttctatggatgcaagaacagacagatcatcagacagaaaaggaagcagttacaaggggagagaagtgttggatggaagacaggttgttgacatgcgaacaaatccaggtgatcccagagaagcacaggaacagcaaaatgacgggaaaggacgtggaaacaaggcagcaaaacgagaccttccaccagcaaagactcatctcatccaagaggatattctaccttattgtagacctacttttccaacatcaaataatcccagagatcccagttcctcaagctcaatgtcatcaagaggatcaggaagcagacaaagagaacaagcaaatgtaggtcgaagaaatattgcagaaatgcaggtacttggaggatatgaaagaggagaagataataatgaagaattagaggaaactgaaagctgaagacaaccaagaggcttatgagatctaatgtgaaaatcatcactcaagatgcctcctgtcagatgacacatgacgccagataaaatgttcagtgcaatcagagtgtacaaattgtcgtttttattcctcttattgggatatcattttaaaaactttattgggtttttattgttgttgtttgatccctaaccctacaaagagccttcctattcccctcgctgttggagcaaaccattataccttacttccagcaagcaaagtgctttgacttcttgcttcagtcatcagccagcaagagggaacaaaactgttcttttgcattttgccgctgagatatggcattgcactgcttatatgccaagctaatttatagcaagatattgatcaaatatagaaagttgatattcaacctcacaagggctctcaaagtataatctttctatagccaactgctaatgcaaattaaaacatatttcattttaacatgatttcaaaatcagtttttcatactaccctttgctggaagaaactaaaaatatagcaaatgcagaaccacaaacaattcgaatggggtagaaacattgtaaatatttactctttgcaaaccctggtggtattttattttggcttcatttcaatcattgaagtatattcttattggaaatgtacttttggataagtagggctaagccagttggatctctggttgtctagtcattgtcataagtaaacctagtaaaaccttgttctatttttcaatcatcaaaaagtaattataaatacgtattacaaacaagtggatgtttttaatgaccaattgagtaagaacatccctgtcttaactggcctaaatttcttctggtagtgtcagttcaactttcagaagtgccacttaaggaagtttgatttttgtttttgtaatgcactgtttttaatctctctctctttttttttttttttttggttttaaaagcacaatcactaaactttatttgtaaaccattgtaactattaaccttttttgtcttattgaaaaaaaaaatgttgagaagcgtttttaacctgttttgttaatgctctatgtttgtatttggaatatttgaataatgacagatggtgaagtaacatgcatactttattgtgggccatgaaccaaatggttcttacttttcctggacttaaagaaaaaaagaggtttaagtttgttgtggccaatgtcgaaacctacaagatttccttaaaatctctaatagaggcattacttgctttcaattgacaaatgatgccctctgactagtagatttctatgatccttttttgtcattttatgaatatcattgattttataattggtgctatttgaagaaaaaaatgtacatttattcatagatagataagtatcaggtctgaccccagtggaaaacaaagccaaacaaaactgaaccacaaaaaaaaaggctggtgttcaccaaaaccaaacttgttcatttagataatttgaaaaagttccatagaaaaggcgtgcagtactaagggaacaatccatgtgattaatgttttcattatgttcatgtaagaagccccttatttttagccataattttgcatactgaaaatccaataatcagaaaagtaattttgtcacattatttattaaaaatgttctcaaatacataaaaaaaaaaaaaaaaaaaaaaaaaaaaaaaaaaaaaaaaaaaaaaaaaaaaaaaa

SEQ ID NO: 4799 - DNA, 1597 bp, Homo sapiens; identical to SEQ ID NO: 843

SEQ ID NO: 4800 - DNA, 459 bp, Homo sapiens
cgaggctcccacctgctctaagcgcttggtaccagggagggaatgggaggacgcttgcgggatagggaggcgggggctggaaattggcagggtgagagctggggaaactagtctgggacgcagccctccttgtcccccttcttcattcacccccttgttgaggcccttggcttttgcataattatggaagctccaaaaggaaagataccagattgatcttgatcacctctgcctccccagcacctagtcttccttggcacatcgtgagtgctcgggtcaggctgtgccacatccacccagccttgcctggggtcatttatcctacatgtactcagatcacgtgaactggtgatgggccacccatgtgcctgcctggagactcctattcacccttcagatcaatatcccccaaataaactcccagtcactctggcaaaaaaaaaaaaaaaaaaaaaaaaa

SEQ ID NO: 4801 - DNA, 2922 bp, Homo sapiens; identical to SEQ ID NO: 769

SEQ ID NO: 4802 - DNA, 2976 bp, Homo sapiens
gtgctccgggcggagcgcgctagctgctcgggcgcggggcgttcttggtgcgccgggccgtggtgagtccgggctcccgtggccgcgtgctgggaggagactggagcccggttaggaagaatggagttggcgactcgctaccagagcacttcgcaggcatagtttggaagtcatcagggctggttcttttccttccagatccctaaagaagtggctgacatctttaacgcccccagtgatgatgaagagtttgttggcttccgagatgatgttcccatggaaaccctctcgtcagaggagagctgcgatagttttgactcactagagtcagggaaacagcaggatgtgcgctttcattccaaatacttcacagaagagctaagaagaatttttatagaggacactgactcagagactgaggattttgcaggatttacgcagagtgatctgaatggaaagactaacccagaagtaatggtcgtggagtcagatttgagtgatgatggcaaagcatctttggtgagcgaggaagaggaagatgaagaagaagataaggctacccctagaagaagcaggtctagaagaagtagtattggtcttcgagtagcctttcagttccccaccaagaagctggccaacaaaccagataaaaacagttcttccgagcagttgttttctagcgcacgcttacagaatgagaaaaaaacaattcttgaaagaaagaaagactgtagacaggtgatacaaagggaagattctacctctgagtctgaggatgactctcgggatgagagccaggagagttcagatgctttgctgaaaaggaccatgaacatcaaggagaacaaagccatgcttgcccagttattggcggaattgaactcgatgccagatttcttcccagtacgaaccccaacctcagcttctaggaagaagacagtgaggcgggccttctcggagggacagatcacgcggcgtatgaacccaacccggagtgcgcggcctcctgagaagtttgctctagagaacttcactgtctcagccgctaaatttgcggaagagttttacagcttccgaagaaggaagacaattggggggaaatgccgggagtacagacgacgtcaccgtatatcttcttttcggccagtggaggatatcaccgaagaggacttagaaaatgttgccataactgttcgagataaaatctatgataaagttctgggtaacacgtgccatcagtgtcgacaaaagaccatcgacaccaagacagtgtgtcggaaccagggttgctgtggtgtgcgaggacagttctgtggaccatgcctgcggaaccgctatggggaggatgtcagatcggcattgctggacccggattgggtgtgtcccccctgtcgtgggatctgcaattgcagctactgtcggaagcgtgacggccgctgtgccacaggaatcctcattcatctggccaagttttatggttatgacaatgttaaggaatatctggagagcttacaaaaggagctggtagaagacaattaagaggaaaacaaacagaaccagccacctcaccatagagtactccaacaagacatgcataccattggtgcctaagaaagatttttttacagttgtgtttttatacagaaattctttgtagaaattactattttttgttaaagattgtttatatgcttacaaagatttctcaggaagacagcagagcagaggaatctatatagatgtatgcacagacctgtctgtatgctgaactttgttaaaaatatctgccagttattaaaaagcacagtttaaatggggtggggttaaagttcaggtaagtaagttagagagaaaacattgtatgatcagctcctgcacttgatctatctatctttggcttcccaaacagtaactcactccaggccaagtgtgccttagcacgagtgaccacagtttaatagaccacacacatcgtttaacctgctcttggtcattggaaatttacactgaacaaagtgcaattaactgtagaacagttttatttttattaaaacttgactgaacaaaaggggaccatcaacattgtagacactggacactggaggccttacagagtgctagcctcttccttcaggactcacctggggcctgctgcttttatattttgaaagagtttaagggctaataatttaatttgttgtttgttaaaaattaaaatctccgttctttccggctgcattgcttttgcatgttcacatatgatgtacttttatgatgtacttttttttttttgagatggagtcttgttctgttgcccaggagggagtgcagtggtgcaacctcggctcactgcaacctttgcctcctaggttcaagtgattctcctacctcctgagtaactgggattacagtcgtgtgccaccacgctcagccctgagttagtttctagtatttttttctgactttcactctaaggatagcgttgaaaaaagaatgcacgtgtgagttactaaaaagttagaataatgtgcatgggaacagtgcagcaacatgctagaaaatcctcactgcactccagcagaggctagaggaatgccagtgttaccttacgcttctagaagcagagccactccagccagaacccattttgcagtcttctcttcgctcttcagcctgaaggtccagatgtagctggggcctctcagtttggttctatacacagggcactcgtaggtctgtttggtttcttgtctgtccacgggggtggcttttgcaaagatgaccggcatagggcatgccagctccttgagacgggcttcaacaatggttcctgcttgggtgtcccagcgggcgcctatggcaaaaacacagcggttgcaattgtgtggcagcttgctactaatgataatgatcaagtaagttgtttgatgcaataaacattcaacattctggttttgtcataaaaaaaaaaaaaaa

SEQ ID NO: 4803 - DNA, 2784 bp, Homo sapiens
gtgctccgggcggagcgcgctagctgctcgggcgcggggcgttcttggtgcgccgggccgtggtgagtccgggctcccgtggccgcgtgctgggaggagactggagcccggttaggaagaatggagttggcgactcgctaccagatccctaaagaagtggctgacatctttaacgcccccagtgatgatgaagagtttgttggcttccgagatgatgttcccatggaaaccctctcgtcagaggagagctgcgatagttttgactcactagagtcagggaaacaggtcgtggagtcagatttgagtgatgatggcaaagcatctttggtgagcgaggaagaggaagatgaagaagaagataaggctacccctagaagaagcaggtctagaagaagtagtattggtcttcgagtagcctttcagttccccaccaagaagctggccaacaaaccagataaaaacagttcttccgagcagttgttttctagcgcacgcttacagaatgagaaaaaaacaattcttgaaagaaagaaagactgtagacaggtgatacaaagggaagattctacctctgagtctgaggatgactctcgggatgagagccaggagagttcagatgctttgctgaaaaggaccatgaacatcaaggagaacaaagccatgcttgcccagttattggcggaattgaactcgatgccagatttcttcccagtacgaaccccaacctcagcttctaggaagaagacagtgaggcgggccttctcggagggacagatcacgcggcgtatgaacccaacccggagtgcgcggcctcctgagaagtttgctctagagaacttcactgtctcagccgctaaatttgcggaagagttttacagcttccgaagaaggaagacaattggggggaaatgccgggagtacagacgacgtcaccgtatatcttcttttcggccagtggaggatatcaccgaagaggacttagaaaatgttgccataactgttcgagataaaatctatgataaagttctgggtaacacgtgccatcagtgtcgacaaaagaccatcgacaccaagacagtgtgtcggaaccagggttgctgtggtgtgcgaggacagttctgtggaccatgcctgcggaaccgctatggggaggatgtcagatcggcattgctggacccggattgggtgtgtcccccctgtcgtgggatctgcaattgcagctactgtcggaagcgtgacggccgctgtgccacaggaatcctcattcatctggccaagttttatggttatgacaatgttaaggaatatctggagagcttacaaaaggagctggtagaagacaattaagaggaaaacaaacagaaccagccacctcaccatagagtactccaacaagacatgcataccattggtgcctaagaaagatttttttacagttgtgtttttatacagaaattctttgtagaaattactattttttgttaaagattgtttatatgcttacaaagatttctcaggaagacagcagagcagaggaatctatatagatgtatgcacagacctgtctgtatgctgaactttgttaaaaatatctgccagttattaaaaagcacagtttaaatggggtggggttaaagttcaggtaagtaagttagagagaaaacattgtatgatcagctcctgcacttgatctatctatctttggcttcccaaacagtaactcactccaggccaagtgtgccttagcacgagtgaccacagtttaatagaccacacacatcgtttaacctgctcttggtcattggaaatttacactgaacaaagtgcaattaactgtagaacagttttatttttattaaaacttgactgaacaaaaggggaccatcaacattgtagacactggacactggaggccttacagagtgctagcctcttccttcaggactcacctggggcctgctgcttttatattttgaaagagtttaagggctaataatttaatttgttgtttgttaaaaattaaaatctccgttctttccggctgcattgcttttgcatgttcacatatgatgtacttttatgatgtacttttttttttttgagatggagtcttgttctgttgcccaggagggagtgcagtggtgcaacctcggctcactgcaacctttgcctcctaggttcaagtgattctcctacctcctgagtaactgggattacagtcgtgtgccaccacgctcagccctgagttagtttctagtatttttttctgactttcactctaaggatagcgttgaaaaaagaatgcacgtgtgagttactaaaaagttagaataatgtgcatgggaacagtgcagcaacatgctagaaaatcctcactgcactccagcagaggctagaggaatgccagtgttaccttacgcttctagaagcagagccactccagccagaacccattttgcagtcttctcttcgctcttcagcctgaaggtccagatgtagctggggcctctcagtttggttctatacacagggcactcgtaggtctgtttggtttcttgtctgtccacgggggtggcttttgcaaagatgaccggcatagggcatgccagctccttgagacgggcttcaacaatggttcctgcttgggtgtcccagcgggcgcctatggcaaaaacacagcggttgcaattgtgtggcagcttgctactaatgataatgatcaagtaagttgtttgatgcaataaacattcaacattctggttttgtcataaaaaaaaaaaaaaa

SEQ ID NO: 4804 - DNA, 6806 bp, Homo sapiens
aatcgccggcagcctatgacatcagacaggaacgcctgggatgccgcgctgctcctggccaacctccgaggaggaggagggtcccgccggctaagagttaattagccccgcacggcgaggggggaggcgccagttttctggggacactggctgccactgtactcctacccaggggagctcacggagagttggatgaattctgggttgttagctgcggtcagctgggctcccgggagcctgttgctggtggagaacagggggcgcctggccaagggaccagcggcttgctgagactcaacatgacactcctggggtctgagcattccttgctgattaggagcaagttcagatcagttttacagttaagacttcaacaaagaaggacccaggaacaactggctaaccaaggcataataccaccactgaaacgtccagctgaattccatgagcaaagaaaacatttggatagtgacaaggctaaaaattccctgaagcgcaaagccagaaacaggtgcaacagtgccgacttggttaatatgcacatactccaagcttccactgcagagaggtccattccaactgctcagatgaagctgaaaagagcccgactcgccgatgatctcaatgaaaaaattgctctacgaccagggccactggagctggtggaaaaaaacattcttcctgtggattctgctgtgaaagaggccataaaaggtaaccaggtgagtttctccaaatccacggatgcttttgcctttgaagaggacagcagcagcgatgggctttctccggatcagactcgaagtgaagacccccaaaactcagcgggatccccgccagacgctaaagcctcagataccccttcgacaggttctctggggacaaaccaggatcttgcttctggctcagaaaatgacagaaatgactcagcctcacagcccagccaccagtcagatgcggggaagcaggggcttggcccccccagcacccccatagccgtgcatgctgctgtaaagtccaaatccttgggtgacagtaagaaccgccacaaaaagcccaaggaccccaagccaaaggtgaagaagcttaaatatcaccagtacattcccccagaccagaaggcagagaagtcccctccacctatggactcagcctacgctcggctgctccagcaacagcagctgttcctgcagctccaaatcctcagccagcagcagcagcagcagcaacaccgattcagctacctagggatgcaccaagctcagcttaaggaaccaaatgaacagatggtcagaaatccaaactcttcttcaacgccactgagcaatacccccttgtctcctgtcaaaaacagtttttctggacaaactggtgtctcttctttcaaaccaggcccactcccacctaacctggatgatctgaaggtctctgaattaagacaacagcttcgaattcggggcttgcctgtgtcaggcaccaaaacggctctcatggaccggcttcgacccttccaggactgctctggcaacccagtgccgaactttggggatataacgactgtcacttttcctgtcacacccaacacgctgcccaattaccagtcttcctcttctaccagtgccctgtccaacggcttctaccactttggcagcaccagctccagccccccgatctccccagcctcctctgacctgtcagtcgctgggtccctgccggacaccttcaatgatgcctccccctccttcggcctgcacccgtccccagtccacgtgtgcacggaggaaagtctcatgagcagcctgaatgggggctctgttccttctgagctggatgggctggactccgagaaggacaagatgctggtggagaagcagaaggtgatcaatgaactcacctggaaactccagcaagagcagaggcaggtggaggagctgaggatgcagcttcagaagcagaaaaggaataactgttcagagaagaagccgctgcctttcctggctgcctccatcaagcaggaagaggctgtctccagctgtccttttgcatcccaagtacctgtgaaaagacaaagcagcagctcagagtgtcacccaccggcttgtgaagctgctcaactccagcctcttggaaatgctcattgtgtggagtcctcagatcaaaccaatgtactttcttccacatttctcagcccccagtgttcccctcagcattcaccgctgggggctgtgaaaagcccacagcacatcagtttgcccccatcacccaacaaccctcactttctgccctcatcctccggggcccagggagaagggcacagggtctcctcgcccatcagcagccaggtgtgcactgcacagatggctggtttacactcttctgataaggtggggccaaagttttcaattccatccccaactttttctaagtcaagttcagcaatttcagaggtaacacagcctccatcctatgaagatgccgtaaagcagcaaatgacccggagtcagcagatggatgaactcctggacgtgcttattgaaagcggagaaatgccagcagacgctagagaggatcactcatgtcttcaaaaagtcccaaagatacccagatcttcccgaagtccaactgctgtcctcaccaagccctcggcttcctttgaacaagcctcttcaggcagccagatcccctttgatccctatgccaccgacagtgatgagcatcttgaagtcttattaaattcccagagccccctaggaaagatgagtgatgtcacccttctaaaaattgggagcgaagagcctcactttgatgggataatggatggattctctgggaaggctgcagaagacctcttcaatgcacatgagatcttgccaggccccctctctccaatgcagacacagttttcaccctcttctgtggacagcaatgggctgcagttaagcttcactgaatctccctgggaaaccatggagtggctggacctcactccgccaaattccacaccaggctttagcgccctcaccaccagcagccccagcatcttcaacatcgatttcctggatgtcactgatctcaatttgaattcttccatggaccttcacttgcagcagtggtagaatgcccaatgcaccagtgctatggaagaccaatggagttccatgggggaaagcacacagccatacatactttactgtccaaaaacagaagaagaagaagagaattaaaaagaagcaatgatttctgtgccaatgaacaagaacaaaagtcatttttagaaatacatatactgtaatatttaccaacagtcagtaactgttaatgatttcaacaatgcattaaaagaatgtgctttctcagattaaggatgccaaaaaagatatttcactgccttttcaaagaccagtatattttctagcccataatttttctcaggcattgttggggcataagctcacactgtaagcttttctcatgaattcactagacataacgtggaaggaaaacgtagtcttttgggagtacagggaagccagcccctcaaagcttatggaagacatacctgcaatggaagctgttgcccaatgtctccattactatctttcaaaagagaagccagacccagcttcagatcaaaagttcttgagacagaggaacaaaaccaatcgatttccagggaagctaatcaactctcttttccctctaccacaaaactgccctgctggagtggttctgaacctgtacccaggactcgatgtggtcactaataacaattaacctgaactgagtccacagaactccactcggaactttcttcttttttaactagtggcccaatcattcccaccatctctgtgctgataagtacgtgtcctagatgagaaccctgaagaatgcagaccttcttcccccgaaggagatgccacaagctctccaacacagccccctttagttccaaagactagagatgaccacattggtagaagtatatctcgaggcacaggaagggagccccaccagggataattcagacaggactagagaataacatcatttcacataccctgggataaacaccctgggttcctatagaaggactattacttatgggagtccaacttctccttttgttttgttattatcagtttatctttctcccactccacttttccttcaaggtaccaatcctttcctgttcctcgtttggccatctttctttttctgcctccacattgggaggggaggacttctcagttctaacaagctgccatactcctaagaaagccatttttgaaaaatttaacaatccaggttcttctggagaactcattctccacacgcacagtttgctgcaaaaggaagttgcaagaatttcttgaggaagaaactggtgacttggtccatcagtcacgaagttctttctattctcgtttagttttcaagaaattattggtttgtgttgctctggggaaattggaaatcattacattgtaaagacaaatatggatgatatttacaagagagaatttcagatctgggtttttgaaagaaaacagaattgcgcattgaaaacgatggaaggaaaaagacaatggtctaatgtgcattcctcattacctctcgtggctttggctgggagttggaaaaagctaaaatttcagaacagtctctgtaaggctctctgtggctccagttcaccattttatattgttgcatgctgtagaaaggagctattgctgttgttttgtttttttatttaaatcactaaggcactgtttttatcttttgtaaaaaaaaaaaaaaagttgttcactgtgcacttatagaaaaaataatcaaaaatgttgggattttagaagctctctttttgataaaccaaagatttagaagtcattccattgttaacttgtaaaaatgtgtgaacacagagagtttttggtgattgctactctgaaagctgccagatcttattctgggggtgggatgtggaggaatacacatacacacacaaacatacatgtatgtataatagatatatacatatgtgtatattatatctgtgtgtgcatgtatctccaaaagcggcgttacagagttctacaccaaaagcctttaacccttaatctgctgtgaatgatacctggcctttctcactatgaatttctgattaaccaaccagactacacgttgcctctctgtgtatgactaacggctccaacccgatgactcacagctacttgcttatcgtgaacaagctcatcttggcaatgaatatggatgtgaaaagacagaacagcttcaccattagtagctggaaatggtatcacagtctcttatagaggaatatgaaaggaacaagaaaatcattttacattccttttatctgtattgtgctttaaaagatccacatggtaaattttttattttgcttttatgtcagtcatcagaaccaaaaaaatccagaagaaaaaattgccagtgtttcctttgaagatgaagctactggggaagaaaaccttattaatacactccacacatttgttcattcctcagctgttggtgttttcttggggtcttgacaaagcttgctggtcagtgcacttttcaggtgtcacgttttgctgtttgtatgttttttcttccccttacttcctttggaaaacaaactcacacagtgcccctactctgagacctgggactgagtgttaattattttttccttgggtatttctatctgagagactagacctagttaggaggcctctgtacttctccagattgtacctttttatggggatctttgaggctatgacccaggactgatagatatgccttacggaagacaaaagataaaatggttcctatatcctaatgcaaaccaacacagttaaaagagcagatctctggataactgctctcaacctgcttctacagtctccacaaaccgcattcaccctctctcttcatagctcagacatgaaatttgagggagaaaactggagataattgggagaaaattgatgaagttggctgcttccagtagatcagataatccatgaatttgtctcccattgagaattttattttaaattcttttaaactcttcgttgtgtcttttgtgatgacaaatcaggcatgactaaaagatgtacagagacttacgaagatggtcacattcaagttccctaatgctcttagaacctgaagatgaccatgtgtagttttcttaagacctctgaacccccatggtgatgaagacttgaagacatttgcagctatctgctgcagtctggtagattcatacttatctaaagaagtcaaaaaatttattcgtgcaagtgcttgcaggaagccagtgcttattagtagtgaccctgcttctatcaacgttattgagacaacacatattctattctaagggagaaagagggaggaagagagggagggagggaggaagaagagggagggagcgaggaaggaagataggagatgggtaggggggtaaagagaaaaggagggagaagggaaggaaggaaagaagagaggaaagaaaggagggaaggaaaaaagggccaaactttctgatctatgaacttctcagttcagctgtcacattatgagaagtaaatcagaatttttttaaggagaagtcattcttagcactacaataattgtaccagtaattgaggaaaccaagacaatcttcacctgaataatagagggtctgagaactgtcagccttttgccattcaaaaacatttatgtccaacctgaaaaaaaagcatcaataaaacctatcccaagcattc

SEQ ID NO: 4805 - DNA, 6950 bp, Homo sapiens
aatcgccggcagcctatgacatcagacaggaacgcctgggatgccgcgctgctcctggccaacctccgaggaggaggagggtcccgccggctaagagttaattagccccgcacggcgaggggggaggcgccagttttctggggacactggctgccactgtactcctacccaggggagctcacggagagttggatgaattctgggttgttagctgcggtcagctgggctcccgggagcctgttgctggtggagaacagggggcgcctggccaagggaccagcggcttgctgagactcaacatgacactcctggggtctgagcattccttgctgattaggagcaagttcagatcagttttacagttaagacttcaacaaagaaggacccaggaacaactggctaaccaaggcataataccaccactgaaacgtccagctgaattccatgagcaaagaaaacatttggatagtgacaaggctaaaaattccctgaagcgcaaagccagaaacaggtgcaacagtgccgacttggttaatatgcacatactccaagcttccactgcagagaggtccattccaactgctcagatgaagctgaaaagagcccgactcgccgatgatctcaatgaaaaaattgctctacgaccagggccactggagctggtggaaaaaaacattcttcctgtggattctgctgtgaaagaggccataaaaggtaaccaggtgagtttctccaaatccacggatgcttttgcctttgaagaggacagcagcagcgatgggctttctccggatcagactcgaagtgaagacccccaaaactcagcgggatccccgccagacgctaaagcctcagataccccttcgacaggttctctggggacaaaccaggatcttgcttctggctcagaaaatgacagaaatgactcagcctcacagcccagccaccagtcagatgcggggaagcaggggcttggcccccccagcacccccatagccgtgcatgctgctgtaaagtccaaatccttgggtgacagtaagaaccgccacaaaaagcccaaggaccccaagccaaaggtgaagaagcttaaatatcaccagtacattcccccagaccagaaggcagagaagtcccctccacctatggactcagcctacgctcggctgctccagcaacagcagctgttcctgcagctccaaatcctcagccagcagcagcagcagcagcaacaccgattcagctacctagggatgcaccaagctcagcttaaggaaccaaatgaacagatggtcagaaatccaaactcttcttcaacgccactgagcaatacccccttgtctcctgtcaaaaacagtttttctggacaaactggtgtctcttctttcaaaccaggcccactcccacctaacctggatgatctgaaggtctctgaattaagacaacagcttcgaattcggggcttgcctgtgtcaggcaccaaaacggctctcatggaccggcttcgacccttccaggactgctctggcaacccagtgccgaactttggggatataacgactgtcacttttcctgtcacacccaacacgctgcccaattaccagtcttcctcttctaccagtgccctgtccaacggcttctaccactttggcagcaccagctccagccccccgatctccccagcctcctctgacctgtcagtcgctgggtccctgccggacaccttcaatgatgcctccccctccttcggcctgcacccgtccccagtccacgtgtgcacggaggaaagtctcatgagcagcctgaatgggggctctgttccttctgagctggatgggctggactccgagaaggacaagatgctggtggagaagcagaaggtgatcaatgaactcacctggaaactccagcaagagcagaggcaggtggaggagctgaggatgcagcttcagaagcagaaaaggaataactgttcagagaagaagccgctgcctttcctggctgcctccatcaagcaggaagaggctgtctccagctgtccttttgcatcccaagtacctgtgaaaagacaaagcagcagctcagagtgtcacccaccggcttgtgaagctgctcaactccagcctcttggaaatgctcattgtgtggagtcctcagatcaaaccaatgtactttcttccacatttctcagcccccagtgttcccctcagcattcaccgctgggggctgtgaaaagcccacagcacatcagtttgcccccatcacccaacaaccctcactttctgccctcatcctccggggcccagggagaagggcacagggtctcctcgcccatcagcagccaggtgtgcactgcacagaactcaggagcacacgatggccatcctccaagcttctctccccattcttccagcctccacccgcccttctctggagcccaagcagacagcagtcatggtgccgggggaaacccttgtcccaaaagcccatgtgtacagcaaaagatggctggtttacactcttctgataaggtggggccaaagttttcaattccatccccaactttttctaagtcaagttcagcaatttcagaggtaacacagcctccatcctatgaagatgccgtaaagcagcaaatgacccggagtcagcagatggatgaactcctggacgtgcttattgaaagcggagaaatgccagcagacgctagagaggatcactcatgtcttcaaaaagtcccaaagatacccagatcttcccgaagtccaactgctgtcctcaccaagccctcggcttcctttgaacaagcctcttcaggcagccagatcccctttgatccctatgccaccgacagtgatgagcatcttgaagtcttattaaattcccagagccccctaggaaagatgagtgatgtcacccttctaaaaattgggagcgaagagcctcactttgatgggataatggatggattctctgggaaggctgcagaagacctcttcaatgcacatgagatcttgccaggccccctctctccaatgcagacacagttttcaccctcttctgtggacagcaatgggctgcagttaagcttcactgaatctccctgggaaaccatggagtggctggacctcactccgccaaattccacaccaggctttagcgccctcaccaccagcagccccagcatcttcaacatcgatttcctggatgtcactgatctcaatttgaattcttccatggaccttcacttgcagcagtggtagaatgcccaatgcaccagtgctatggaagaccaatggagttccatgggggaaagcacacagccatacatactttactgtccaaaaacagaagaagaagaagagaattaaaaagaagcaatgatttctgtgccaatgaacaagaacaaaagtcatttttagaaatacatatactgtaatatttaccaacagtcagtaactgttaatgatttcaacaatgcattaaaagaatgtgctttctcagattaaggatgccaaaaaagatatttcactgccttttcaaagaccagtatattttctagcccataatttttctcaggcattgttggggcataagctcacactgtaagcttttctcatgaattcactagacataacgtggaaggaaaacgtagtcttttgggagtacagggaagccagcccctcaaagcttatggaagacatacctgcaatggaagctgttgcccaatgtctccattactatctttcaaaagagaagccagacccagcttcagatcaaaagttcttgagacagaggaacaaaaccaatcgatttccagggaagctaatcaactctcttttccctctaccacaaaactgccctgctggagtggttctgaacctgtacccaggactcgatgtggtcactaataacaattaacctgaactgagtccacagaactccactcggaactttcttcttttttaactagtggcccaatcattcccaccatctctgtgctgataagtacgtgtcctagatgagaaccctgaagaatgcagaccttcttcccccgaaggagatgccacaagctctccaacacagccccctttagttccaaagactagagatgaccacattggtagaagtatatctcgaggcacaggaagggagccccaccagggataattcagacaggactagagaataacatcatttcacataccctgggataaacaccctgggttcctatagaaggactattacttatgggagtccaacttctccttttgttttgttattatcagtttatctttctcccactccacttttccttcaaggtaccaatcctttcctgttcctcgtttggccatctttctttttctgcctccacattgggaggggaggacttctcagttctaacaagctgccatactcctaagaaagccatttttgaaaaatttaacaatccaggttcttctggagaactcattctccacacgcacagtttgctgcaaaaggaagttgcaagaatttcttgaggaagaaactggtgacttggtccatcagtcacgaagttctttctattctcgtttagttttcaagaaattattggtttgtgttgctctggggaaattggaaatcattacattgtaaagacaaatatggatgatatttacaagagagaatttcagatctgggtttttgaaagaaaacagaattgcgcattgaaaacgatggaaggaaaaagacaatggtctaatgtgcattcctcattacctctcgtggctttggctgggagttggaaaaagctaaaatttcagaacagtctctgtaaggctctctgtggctccagttcaccattttatattgttgcatgctgtagaaaggagctattgctgttgttttgtttttttatttaaatcactaaggcactgtttttatcttttgtaaaaaaaaaaaaaaagttgttcactgtgcacttatagaaaaaataatcaaaaatgttgggattttagaagctctctttttgataaaccaaagatttagaagtcattccattgttaacttgtaaaaatgtgtgaacacagagagtttttggtgattgctactctgaaagctgccagatcttattctgggggtgggatgtggaggaatacacatacacacacaaacatacatgtatgtataatagatatatacatatgtgtatattatatctgtgtgtgcatgtatctccaaaagcggcgttacagagttctacaccaaaagcctttaacccttaatctgctgtgaatgatacctggcctttctcactatgaatttctgattaaccaaccagactacacgttgcctctctgtgtatgactaacggctccaacccgatgactcacagctacttgcttatcgtgaacaagctcatcttggcaatgaatatggatgtgaaaagacagaacagcttcaccattagtagctggaaatggtatcacagtctcttatagaggaatatgaaaggaacaagaaaatcattttacattccttttatctgtattgtgctttaaaagatccacatggtaaattttttattttgcttttatgtcagtcatcagaaccaaaaaaatccagaagaaaaaattgccagtgtttcctttgaagatgaagctactggggaagaaaaccttattaatacactccacacatttgttcattcctcagctgttggtgttttcttggggtcttgacaaagcttgctggtcagtgcacttttcaggtgtcacgttttgctgtttgtatgttttttcttccccttacttcctttggaaaacaaactcacacagtgcccctactctgagacctgggactgagtgttaattattttttccttgggtatttctatctgagagactagacctagttaggaggcctctgtacttctccagattgtacctttttatggggatctttgaggctatgacccaggactgatagatatgccttacggaagacaaaagataaaatggttcctatatcctaatgcaaaccaacacagttaaaagagcagatctctggataactgctctcaacctgcttctacagtctccacaaaccgcattcaccctctctcttcatagctcagacatgaaatttgagggagaaaactggagataattgggagaaaattgatgaagttggctgcttccagtagatcagataatccatgaatttgtctcccattgagaattttattttaaattcttttaaactcttcgttgtgtcttttgtgatgacaaatcaggcatgactaaaagatgtacagagacttacgaagatggtcacattcaagttccctaatgctcttagaacctgaagatgaccatgtgtagttttcttaagacctctgaacccccatggtgatgaagacttgaagacatttgcagctatctgctgcagtctggtagattcatacttatctaaagaagtcaaaaaatttattcgtgcaagtgcttgcaggaagccagtgcttattagtagtgaccctgcttctatcaacgttattgagacaacacatattctattctaagggagaaagagggaggaagagagggagggagggaggaagaagagggagggagcgaggaaggaagataggagatgggtaggggggtaaagagaaaaggagggagaagggaaggaaggaaagaagagaggaaagaaaggagggaaggaaaaaagggccaaactttctgatctatgaacttctcagttcagctgtcacattatgagaagtaaatcagaatttttttaaggagaagtcattcttagcactacaataattgtaccagtaattgaggaaaccaagacaatcttcacctgaataatagagggtctgagaactgtcagccttttgccattcaaaaacatttatgtccaacctgaaaaaaaagcatcaataaaacctatcccaagcattc

SEQ ID NO: 4806 - DNA, 2344 bp, Homo sapiens; identical to SEQ ID NO: 1966

SEQ ID NO: 4807 - DNA, 4362 bp, Homo sapiens; identical to SEQ ID NO: 211

SEQ ID NO: 4808 - DNA, 4286 bp, Homo sapiens; identical to SEQ ID NO: 1429

SEQ ID NO: 4809 - DNA, 1447 bp, Homo sapiens; identical to SEQ ID NO: 1573

SEQ ID NO: 4810 - DNA, 5434 bp, Homo sapiens; identical to SEQ ID NO: 1941

SEQ ID NO: 4811 - DNA, 4821 bp, Homo sapiens
tcctttgggcctagcagggccagagaaagacggaatcactctacccactcaggttgcccagagagcactttaggttctgactcgcgtggggcgcgaggtaccccgtggggcagctaggtgcctccaagaaaccccgccccagaggacccgcacgagttgctgccatttttcgctgaagcccctgccctggggctggtgttcttctctatgattctaccaatcgtcggcatttttttcctcccttctttctttttaggaaggcgctggggtgtgcggcggcaacggcggcggtgaagggatcctcttgtgcccggagaaataggggagtgggggcccaagaacgagaagacgagaacgcgtcgccctgcgctatgtcagaatggggcgggtgtgaggggaacagctctcttgcgatcagctcaggagtatgagcctcccggaggacggcatgagttctggacacttcaggagtcctcagctagtgacatggtcgatatggataaactcataaacaacttggaggtccaacttaattcagaaggtggctcaatgcaggtattcaagcaggtcactgcttctgttcggaacagagatccccctgagatagaatacagaagtaatatgacttctccaacactcctggatgccaaccccatggagaacccagcactgtttaatgacatcaagattgagcccccagaagaacttttggctagtgatttcagcctgccccaagtggaaccagttgacctctcctttcacaagcccaaggctcctctccagcctgctagcatgctacaagctccaatacgtccccccaagccacagtcttctccccagacccttgtggtgtccacgtcaacatctgacatgagcacttcagcaaacattcctactgttctgaccccaggctctgtcctgacctcctctcagagcactggtagccagcagatcttacatgtcattcacactatcccctcagtcagtctgccaaataagatgggtggcctgaagaccatcccagtggtagtgcagtctctgcccatggtgtatactactttgcctgcagatgggggccctgcagccattacagtcccactcattggaggagatggtaaaaatgctggatcagtgaaagttgaccccacctccatgtctccactggaaattccaagtgacagtgaggagagtacaattgagagtggatcctcagccttgcagagtctgcagggactacagcaagagagagaagccttataaatgcacctgggatggctgctcctggaaatttgctcgctcagatgagctcactcgccatttccgcaagcacacaggcatcaagccttttcggtgcacagactgcaaccgcagcttttctcgttctgaccacctgtccctgcatcgccgtcgccatgacaccatgtgagccgcacaggtcacactagagaagctgcgctggtatctttcctggtcgtgtgctgaggttgggacaattttttcctctttgacttcagcttgcatatggggttgaagcagcccactgagccaagttgaggagactggaggaaaagagagctggtctcccgtggggctcttcatattctaccttcacttctccactgtccagacccgtttttttcaacctccacatgggttgaattccagtgtggcacccatggctgccttcccatccccccctgctctgaaataggacatttttcctacagtaacaaaacaggaatcaaactcaaggctgtgaacaaacatacgctgctttattctttccaatttttctcttgttttctagaactcttatccatatgtttttaaaataagtacctaaaagtggtttgatagtgtcctaaacgacttttttaacttcctaaatggaaagagcataacaatgtagttgattggtaagatttacagggatttggtttctgagtttgaggcacattcccagtgaataagctgagtcccataccacactcaaaaggttttaataaatctaatcctatttcttcttaaagtttggttttcagacagtgctggtgcttctgcttcttaagttcatcaagggaatgaggagttcttgtccttctcctcctcttttttttcttttccactttctccttcaggattaaagattttgctgcacaattgttatttgttaggttaaatttggacaaatattcaaagcacacatagacatataagtaaggagaaaaatgttccaggagagtaggttgggcagtgacaggaacaaacagacctaggatgatcctgagaacaaatagaggggttcctttacttgtataggatatcaaaagtgctgttaatcacaaacctcattcaaatggcaggctgtcgagacagtgtcttgaggggctggctgtactgtttattttttcgtttacacaaagaagcaattgagtatattgcatgatgagaaatcacacactagggtcatgttatacagaagtaaggggttggaaaaatggaatgttgttcactccatggaattattggcattcattcctgtgtttcaaatgaaacatagatgcttttcatgaaaactgacctacaaaaagcaatttgatgttctgcaactgctatgaaaacctaagccatttattttagctgatagcagattgcataatatactcatttagctgcccaatcagattgttttataatattacctggggtacaaaatcctctgttcctggccctggaccacagatctacctccacatggcatatttcctttctggggtcaggggtaggggagggggctttgcatcacttgaatttagactcagcctctctttaaaagattgtctttatattgaacacctttttcttttcaaccctgcttgaatactttaggttactatttcctgaggctgtccattctcactatattgtagaattctagcaccaagaagggatcccgttaaccatctagtcctatccatccctcatattttacagatgagacaaatacgggtcagatttttttctccagatgtttctttgagcccttatacacctgcacgcttattctcctggggatcacataattttatttatttattttttgagagacggtttcactccatcacccaggctggagtgcagtggcgtaatcttggctcactgcaacctccgcctcctgggttcaagtgattctcctgcctcagcctcccaaatagcttggattacaggtgcgtgccaccacacctagctaagttttgtattattagtagagatggggtttcgccatgttggccaggctggtctcaaactcctgacctcaagtgatccccccacctcggcctcccaaagtgctgggatcacaggtgtgagtcaccacacctggccaggatcacattattaaaccaaattaaagtttatgtgattggttgcaatatttgtctaattttatatgttttcttcaggaaaactttagaactcaaaaatcatttacagctgattaaatagcaagtaaaatgtacttgtggtcattgccgtataacattaggcacacgcttctaacacttctataatatctagattttatttacctcattttaacttgcaatgtctgtctatctcatgaactctccataaatccaagaactgcctgtagttttcaaaatgacatgtgggtttttactgttatcattgttatttcgatagggctttttcctgattttgggtatacaagttccaaacttgcataataattgctaacgcactaggcgatatctagggccagtctgttaaaggggacctctaatgtagctataagacaggttggtaaagatgaactaacataagtttaagctaataattcagtagttgatgcagtatttcacagtagagcccgagcttactcatttttttcaaaatttggatcctgatactcctttttcagagttcagaactgaactgctcccctaagacctcagaatcttttgcattgagacatatgatctatttataaataaaggttatcaaatatcttgttgaactaattaggttgatcaaattaggatcccaaatattggggtccctgacatctgagcctttatctaaaaatgtttctgtaacataatgacagcctttatgtttgttaattgcctatagtaaagaagcaattttaagcctattctcatttccctctcccctacaaaaaatgataaaagctttccaattacttacatatgctctaacaagtgtctcaggattcattaacagaattttatagagtacagtaattcaaatatagcacagtacagagtttaccaaaaacacataaaactttgctagatagacagtgaggtggaaaggaactaaaatgtatctctcttgaatagcatttggggttcaattgaatttgttgtgtttacaacagcaaagcaccgttagcctggacagttgcttatggcatcgatagggttggataatattctgggatttgttgcagcagaattcctctatctgatgatcagcagttgaacataaacttcataattatagtaaaatttaggaaaaactatgagtgtgaagagtatgaactgattgggtagattaggcagagtgcattatgggcaagacaaaggttttcgatattaacttcttttaaaataaactttttattttcaaacagtttcagttttacagaaaaaatgtgaagctagtacagagaggtctcatttaccccacacccagtttctcctgttattagcatctcacattaatatgtggtatatttgttacaattaataaaacacattgatatgttaatattattaa

SEQ ID NO: 4812 - DNA, 3345 bp, Homo sapiens
cttgcctgtctgcgtctaaagcccctgcccagagtccgccttctcaggtccagtactcccagttcacctgccctcgggagccctccttccttcggaaaactcccggctctgactcctcctcagcccctccccccgccctgctcacctttaattgagatgctaatgagattcctgtcgcttccatccctggccggccagcgggcgggctccccagccaggccgctgcacctgtcaggggaacaagctggaggagcaggaccctagacctctgcagcccataccaggtctcatggaggggaacaagctggaggagcaggactctagccctccacagtccactccagggctcatgaaggggaacaagcgtgaggagcaggggctgggccccgaacctgcggcgccccagcagcccacggcggaggaggaggccctgatcgagttccaccgctcctaccgagagctcttcgagttcttctgcaacaacaccaccatccacggcgccatccgcctggtgtgctcccagcacaaccgcatgaagacggccttctgggcagtgctgtggctctgcacctttggcatgatgtactggcaattcggcctgcttttcggagagtacttcagctaccccgtcagcctcaacatcaacctcaactcggacaagctcgtcttccccgcagtgaccatctgcaccctcaatccctacaggtacccggaaattaaagaggagctggaggagctggaccgcatcacagagcagacgctctttgacctgtacaaatacagctccttcaccactctcgtggccggctcccgcagccgtcgcgacctgcgggggactctgccgcaccccttgcagcgcctgagggtcccgcccccgcctcacggggcccgtcgagcccgtagcgtggcctccagcttgcgggacaacaacccccaggtggactggaaggactggaagatcggcttccagctgtgcaaccagaacaaatcggactgcttctaccagacatactcatcaggggtggatgcggtgagggagtggtaccgcttccactacatcaacatcctgtcgaggctgccagagactctgccatccctggaggaggacacgctgggcaacttcatcttcgcctgccgcttcaaccaggtctcctgcaaccaggcgaattactctcacttccaccacccgatgtatggaaactgctatactttcaatgacaagaacaactccaacctctggatgtcttccatgcctggaatcaacaacggtctgtccctgatgctgcgcgcagagcagaatgacttcattcccctgctgtccacagtgactggggcccgggtaatggtgcacgggcaggatgaacctgcctttatggatgatggtggctttaacttgcggcctggcgtggagacctccatcagcatgaggaaggaaaccctggacagacttgggggcgattatggcgactgcaccaagaatggcagtgatgttcctgttgagaacctttacccttcaaagtacacacagcaggtgtgtattcactcctgcttccaggagagcatgatcaaggagtgtggctgtgcctacatcttctatccgcggccccagaacgtggagtactgtgactacagaaagcacagttcctgggggtactgctactataagctccaggttgacttctcctcagaccacctgggctgtttcaccaagtgccggaagccatgcagcgtgaccagctaccagctctctgctggttactcacgatggccctcggtgacatcccaggaatgggtcttccagatgctatcgcgacagaacaattacaccgtcaacaacaagagaaatggagtggccaaagtcaacatcttcttcaaggagctgaactacaaaaccaattctgagtctccctctgtcacgatggtcaccctcctgtccaacctgggcagccagtggagcctgtggttcggctcctcggtgttgtctgtggtggagatggctgagctcgtctttgacctgctggtcatcatgttcctcatgctgctccgaaggttccgaagccgatactggtctccaggccgagggggcaggggtgctcaggaggtagcctccaccctggcatcctcccctccttcccacttctgcccccaccccatgtctctgtccttgtcccagccaggccctgctccctctccagccttgacagcccctccccctgcctatgccaccctgggcccccgcccatctccagggggctctgcaggggccagttcctccacctgtcctctgggggggccctgagagggaaggagaggtttctcacaccaaggcagatgctcctctggtgggagggtgctggccctggcaagattgaaggatgtgcagggcttcctctcagagccgcccaaactgccgttgatgtgtggaggggaagcaagatgggtaagggctcaggaagttgctccaagaacagtagctgatgaagctgcccagaagtgccttggctccagccctgtaccccttggtactgcctctgaacactctggtttccccacccaactgcggctaagtctctttttcccttggatcagccaagcgaaacttggagctttgacaaggaactttcctaagaaaccgctgataaccaggacaaaacacaaccaagggtacacgcaggcatgcacgggtttcctgcccagcgacggcttaagccagcccccgactggcctggccacactgctctccagtagcacagatgtctgctcctcctcttgaacttgggtgggaaaccccacccaaaagccccctttgttacttaggcaattccccttccctgactcccgagggctagggctagagcagacccgggtaagtaaaggcagacccagggctcctctagcctcatacccgtgccctcacagagccatgccccggcacctctgccctgtgtctttcatacctctacatgtctgcttgagatatttcctcagcctgaaagtttccccaaccatctgccagagaactcctatgcatcccttagaaccctgctcagacaccattacttttgtgaacgcttctgccacatcttgtcttccccaaaattgatcactccgccttctcctgggctcccgtagcacactataacatctgctggagtgttgctgttgcaccatactttcttgtacatttgtgtctcccttcccaactagactgtaagtgccttgcggtcagggactgaatcttgcccgtttatgtatgctccatgtctagcccatcatcctgcttggagcaagtaggcaggagctcaataaatgtttgttgcatgaaggaaaaaaaaaaaaaaaaaa

SEQ ID NO: 4813 - DNA, 3216 bp, Homo sapiens; identical to SEQ ID NO: 1556

SEQ ID NO: 4814 - DNA, 3497 bp, Homo sapiens
aaacagaaggcagatagagagggagtgagaggcaggagctgagacacagatcctggaggaagaagaccaaaggaagggggcagagacagaaagggaggtgctaggacaaaactcgaaaggtggccctatcagggaagcagaggagaggccgttctagggaagcccagctccggcacttttggccccaactcccgcaggtctgctggctccaggaaaggtggaggagggagggaggagtgggagaatgtgggcgcagggtgggacatgggcatggccaggggcagcctcactcgggttccaggggtgatgggagagggcactcagggcccagagctcagccttgaccctgacccttgctctccccaatccactccggggctcatgaaggggaacaagctggaggagcaggaccctagacctctgcagcccataccaggtctcatggaggggaacaagctggaggagcaggactctagccctccacagtccactccagggctcatgaaggggaacaagcgtgaggagcaggggctgggccccgaacctgcggcgccccagcagcccacggcggaggaggaggccctgatcgagttccaccgctcctaccgagagctcttcgagttcttctgcaacaacaccaccatccacggcgccatccgcctggtgtgctcccagcacaaccgcatgaagacggccttctgggcagtgctgtggctctgcacctttggcatgatgtactggcaattcggcctgcttttcggagagtacttcagctaccccgtcagcctcaacatcaacctcaactcggacaagctcgtcttccccgcagtgaccatctgcaccctcaatccctacaggtacccggaaattaaagaggagctggaggagctggaccgcatcacagagcagacgctctttgacctgtacaaatacagctccttcaccactctcgtggccggctcccgcagccgtcgcgacctgcgggggactctgccgcaccccttgcagcgcctgagggtcccgcccccgcctcacggggcccgtcgagcccgtagcgtggcctccagcttgcgggacaacaacccccaggtggactggaaggactggaagatcggcttccagctgtgcaaccagaacaaatcggactgcttctaccagacatactcatcaggggtggatgcggtgagggagtggtaccgcttccactacatcaacatcctgtcgaggctgccagagactctgccatccctggaggaggacacgctgggcaacttcatcttcgcctgccgcttcaaccaggtctcctgcaaccaggcgaattactctcacttccaccacccgatgtatggaaactgctatactttcaatgacaagaacaactccaacctctggatgtcttccatgcctggaatcaacaacggtctgtccctgatgctgcgcgcagagcagaatgacttcattcccctgctgtccacagtgactggggcccgggtaatggtgcacgggcaggatgaacctgcctttatggatgatggtggctttaacttgcggcctggcgtggagacctccatcagcatgaggaaggaaaccctggacagacttgggggcgattatggcgactgcaccaagaatggcagtgatgttcctgttgagaacctttacccttcaaagtacacacagcaggtgtgtattcactcctgcttccaggagagcatgatcaaggagtgtggctgtgcctacatcttctatccgcggccccagaacgtggagtactgtgactacagaaagcacagttcctgggggtactgctactataagctccaggttgacttctcctcagaccacctgggctgtttcaccaagtgccggaagccatgcagcgtgaccagctaccagctctctgctggttactcacgatggccctcggtgacatcccaggaatgggtcttccagatgctatcgcgacagaacaattacaccgtcaacaacaagagaaatggagtggccaaagtcaacatcttcttcaaggagctgaactacaaaaccaattctgagtctccctctgtcacgatggtcaccctcctgtccaacctgggcagccagtggagcctgtggttcggctcctcggtgttgtctgtggtggagatggctgagctcgtctttgacctgctggtcatcatgttcctcatgctgctccgaaggttccgaagccgatactggtctccaggccgagggggcaggggtgctcaggaggtagcctccaccctggcatcctcccctccttcccacttctgcccccaccccatgtctctgtccttgtcccagccaggccctgctccctctccagccttgacagcccctccccctgcctatgccaccctgggcccccgcccatctccagggggctctgcaggggccagttcctccacctgtcctctgggggggccctgagagggaaggagaggtttctcacaccaaggcagatgctcctctggtgggagggtgctggccctggcaagattgaaggatgtgcagggcttcctctcagagccgcccaaactgccgttgatgtgtggaggggaagcaagatgggtaagggctcaggaagttgctccaagaacagtagctgatgaagctgcccagaagtgccttggctccagccctgtaccccttggtactgcctctgaacactctggtttccccacccaactgcggctaagtctctttttcccttggatcagccaagcgaaacttggagctttgacaaggaactttcctaagaaaccgctgataaccaggacaaaacacaaccaagggtacacgcaggcatgcacgggtttcctgcccagcgacggcttaagccagcccccgactggcctggccacactgctctccagtagcacagatgtctgctcctcctcttgaacttgggtgggaaaccccacccaaaagccccctttgttacttaggcaattccccttccctgactcccgagggctagggctagagcagacccgggtaagtaaaggcagacccagggctcctctagcctcatacccgtgccctcacagagccatgccccggcacctctgccctgtgtctttcatacctctacatgtctgcttgagatatttcctcagcctgaaagtttccccaaccatctgccagagaactcctatgcatcccttagaaccctgctcagacaccattacttttgtgaacgcttctgccacatcttgtcttccccaaaattgatcactccgccttctcctgggctcccgtagcacactataacatctgctggagtgttgctgttgcaccatactttcttgtacatttgtgtctcccttcccaactagactgtaagtgccttgcggtcagggactgaatcttgcccgtttatgtatgctccatgtctagcccatcatcctgcttggagcaagtaggcaggagctcaataaatgtttgttgcatgaaggaaaaaaaaaaaaaaaaaa

SEQ ID NO: 4815 - DNA, 1599 bp, Homo sapiens; identical to SEQ ID NO: 398

SEQ ID NO: 4816 - DNA, 6499 bp, Homo sapiens; identical to SEQ ID NO: 207

SEQ ID NO: 4817 - DNA, 7123 bp, Homo sapiens
atcgaggtccgcgggaggctcggagcgcgccaggcggacactcctctcggctcctccccggcagcggcggcggctcggagcgggctccggggctcgggtgcagcggccagcgggcgcctggcggcgaggattacccggggaagtggttgtctcctggctggagccgcgagacgggcgctcagggcgcggggccggcggcggcgaacgagaggacggactctggcggccgggtcgttggccgcggggagcgcgggcaccgggcgagcaggccgcgtcgcgctcaccatggtcagctactgggacaccggggtcctgctgtgcgcgctgctcagctgtctgcttctcacaggatctagttcaggttcaaaattaaaagatcctgaactgagtttaaaaggcacccagcacatcatgcaagcaggccagacactgcatctccaatgcaggggggaagcagcccataaatggtctttgcctgaaatggtgagtaaggaaagcgaaaggctgagcataactaaatctgcctgtggaagaaatggcaaacaattctgcagtactttaaccttgaacacagctcaagcaaaccacactggcttctacagctgcaaatatctagctgtacctacttcaaagaagaaggaaacagaatctgcaatctatatatttattagtgatacaggtagacctttcgtagagatgtacagtgaaatccccgaaattatacacatgactgaaggaagggagctcgtcattccctgccgggttacgtcacctaacatcactgttactttaaaaaagtttccacttgacactttgatccctgatggaaaacgcataatctgggacagtagaaagggcttcatcatatcaaatgcaacgtacaaagaaatagggcttctgacctgtgaagcaacagtcaatgggcatttgtataagacaaactatctcacacatcgacaaaccaatacaatcatagatgtccaaataagcacaccacgcccagtcaaattacttagaggccatactcttgtcctcaattgtactgctaccactcccttgaacacgagagttcaaatgacctggagttaccctgatgaaaaaaataagagagcttccgtaaggcgacgaattgaccaaagcaattcccatgccaacatattctacagtgttcttactattgacaaaatgcagaacaaagacaaaggactttatacttgtcgtgtaaggagtggaccatcattcaaatctgttaacacctcagtgcatatatatgataaagcattcatcactgtgaaacatcgaaaacagcaggtgcttgaaaccgtagctggcaagcggtcttaccggctctctatgaaagtgaaggcatttccctcgccggaagttgtatggttaaaagatgggttacctgcgactgagaaatctgctcgctatttgactcgtggctactcgttaattatcaaggacgtaactgaagaggatgcagggaattatacaatcttgctgagcataaaacagtcaaatgtgtttaaaaacctcactgccactctaattgtcaatgtgaaaccccagatttacgaaaaggccgtgtcatcgtttccagacccggctctctacccactgggcagcagacaaatcctgacttgtaccgcatatggtatccctcaacctacaatcaagtggttctggcacccctgtaaccataatcattccgaagcaaggtgtgacttttgttccaataatgaagagtcctttatcctggatgctgacagcaacatgggaaacagaattgagagcatcactcagcgcatggcaataatagaaggaaagaataagatggctagcaccttggttgtggctgactctagaatttctggaatctacatttgcatagcttccaataaagttgggactgtgggaagaaacataagcttttatatcacagatgtgccaaatgggtttcatgttaacttggaaaaaatgccgacggaaggagaggacctgaaactgtcttgcacagttaacaagttcttatacagagacgttacttggattttactgcggacagttaataacagaacaatgcactacagtattagcaagcaaaaaatggccatcactaaggagcactccatcactcttaatcttaccatcatgaatgtttccctgcaagattcaggcacctatgcctgcagagccaggaatgtatacacaggggaagaaatcctccagaagaaagaaattacaatcagagatcaggaagcaccatacctcctgcgaaacctcagtgatcacacagtggccatcagcagttccaccactttagactgtcatgctaatggtgtccccgagcctcagatcacttggtttaaaaacaaccacaaaatacaacaagagcctggaattattttaggaccaggaagcagcacgctgtttattgaaagagtcacagaagaggatgaaggtgtctatcactgcaaagccaccaaccagaagggctctgtggaaagttcagcatacctcactgttcaaggaacctcggacaagtctaatctggagctgatcactctaacatgcacctgtgtggctgcgactctcttctggctcctattaaccctctttatccgaaaaatgaaaaggtcttcttctgaaataaagactgactacctatcaattataatggacccagatgaagttcctttggatgagcagtgtgagcggctcccttatgatgccagcaagtgggagtttgcccgggagagacttaaactgggcaaatcacttggaagaggggcttttggaaaagtggttcaagcatcagcatttggcattaagaaatcacctacgtgccggactgtggctgtgaaaatgctgaaagagggggccacggccagcgagtacaaagctctgatgactgagctaaaaatcttgacccacattggccaccatctgaacgtggttaacctgctgggagcctgcaccaagcaaggagggcctctgatggtgattgttgaatactgcaaatatggaaatctctccaactacctcaagagcaaacgtgacttattttttctcaacaaggatgcagcactacacatggagcctaagaaagaaaaaatggagccaggcctggaacaaggcaagaaaccaagactagatagcgtcaccagcagcgaaagctttgcgagctccggctttcaggaagataaaagtctgagtgatgttgaggaagaggaggattctgacggtttctacaaggagcccatcactatggaagatctgatttcttacagttttcaagtggccagaggcatggagttcctgtcttccagaaagtgcattcatcgggacctggcagcgagaaacattcttttatctgagaacaacgtggtgaagatttgtgattttggccttgcccgggatatttataagaaccccgattatgtgagaaaaggagatactcgacttcctctgaaatggatggctcctgaatctatctttgacaaaatctacagcaccaagagcgacgtgtggtcttacggagtattgctgtgggaaatcttctccttaggtgggtctccatacccaggagtacaaatggatgaggacttttgcagtcgcctgagggaaggcatgaggatgagagctcctgagtactctactcctgaaatctatcagatcatgctggactgctggcacagagacccaaaagaaaggccaagatttgcagaacttgtggaaaaactaggtgatttgcttcaagcaaatgtacaacaggatggtaaagactacatcccaatcaatgccatactgacaggaaatagtgggtttacatactcaactcctgccttctctgaggacttcttcaaggaaagtatttcagctccgaagtttaattcaggaagctctgatgatgtcagatacgtaaatgctttcaagttcatgagcctggaaagaatcaaaacctttgaagaacttttaccgaatgccacctccatgtttgatgactaccagggcgacagcagcactctgttggcctctcccatgctgaagcgcttcacctggactgacagcaaacccaaggcctcgctcaagattgacttgagagtaaccagtaaaagtaaggagtcggggctgtctgatgtcagcaggcccagtttctgccattccagctgtgggcacgtcagcgaaggcaagcgcaggttcacctacgaccacgctgagctggaaaggaaaatcgcgtgctgctccccgcccccagactacaactcggtggtcctgtactccaccccacccatctagagtttgacacgaagccttatttctagaagcacatgtgtatttatacccccaggaaactagcttttgccagtattatgcatatataagtttacacctttatctttccatgggagccagctgctttttgtgatttttttaatagtgcttttttttttttgactaacaagaatgtaactccagatagagaaatagtgacaagtgaagaacactactgctaaatcctcatgttactcagtgttagagaaatccttcctaaacccaatgacttccctgctccaacccccgccacctcagggcacgcaggaccagtttgattgaggagctgcactgatcacccaatgcatcacgtaccccactgggccagccctgcagcccaaaacccagggcaacaagcccgttagccccagggatcactggctggcctgagcaacatctcgggagtcctctagcaggcctaagacatgtgaggaggaaaaggaaaaaaagcaaaaagcaagggagaaaagagaaaccgggagaaggcatgagaaagaatttgagacgcaccatgtgggcacggagggggacggggctcagcaatgccatttcagtggcttcccagctctgacccttctacatttgagggcccagccaggagcagatggacagcgatgaggggacattttctggattctgggaggcaagaaaaggacaaatatcttttttggaactaaagcaaattttagaactttacctatggaagtggttctatgtccattctcattcgtggcatgttttgatttgtagcactgagggtggcactcaactctgagcccatacttttggctcctctagtaagatgcactgaaaacttagccagagttaggttgtctccaggccatgatggccttacactgaaaatgtcacattctattttgggtattaatatatagtccagacacttaactcaatttcttggtattattctgttttgcacagttagttgtgaaagaaagctgagaagaatgaaaatgcagtcctgaggagaggagttttctccatatcaaaacgagggctgatggaggaaaaaggtcaataaggtcaagggaaaaccccgtctctataccaaccaaaccaattcaccaacacagttgggacccaaaacacaggaagtcagtcacgtttccttttcatttaatggggattccactatctcacactaatctgaaaggatgtggaagagcattagctggcgcatattaagcactttaagctccttgagtaaaaaggtggtatgtaatttatgcaaggtatttctccagttgggactcaggatattagttaatgagccatcactagaagaaaagcccattttcaactgctttgaaacttgcctggggtctgagcatgatgggaatagggagacagggtaggaaagggcgcctactcttcagggtctaaagatcaagtgggccttggatcgctaagctggctctgtttgatgctatttatgcaagttagggtctatgtatttatgatgtctgcaccttctgcagccagtcagaagctggagaggcaacagtggattgctgcttcttggggagaagagtatgcttccttttatccatgtaatttaactgtagaacctgagctctaagtaaccgaagaatgtatgcctctgttcttatgtgccacatccttgtttaaaggctctctgtatgaagagatgggaccgtcatcagcacattccctagtgagcctactggctcctggcagcggcttttgtggaagactcactagccagaagagaggagtgggacagtcctctccaccaagatctaaatccaaacaaaagcaggctagagccagaagagaggacaaatctttgttcttcctcttctttacatacgcaaaccacctgtgacagctggcaattttataaatcaggtaactggaaggaggttaaacacagaaaaaagaagacctcagtcaattctctacttttttttttttttccaaatcagataatagcccagcaaatagtgataacaaataaaaccttagctattcatgtcttgatttcaataattaattcttaatcattaagagaccataataaatactccttttcaagagaaaagcaaaaccattagaattgttactcagctccttcaaactcaggtttgtagcatacatgagtccatccatcagtcaaagaatggttccatctggagtcttaatgtagaaagaaaaatggagacttgtaataatgagctagttacaaagtgcttgttcattaaaatagcactgaaaattgaaacatgaattaactgataatattccaatcatttgccatttatgacaaaaatggttggcactaacaaagaacgagcacttcctttcagagtttctgagataatgtacgtggaacagtctgggtggaatggggctgaaaccatgtgcaagtctgtgtcttgtcagtccaagaagtgacaccgagatgttaattttagggacccgtgccttgtttcctagcccacaagaatgcaaacatcaaacagatactcgctagcctcatttaaattgattaaaggaggagtgcatctttggccgacagtggtgtaactgtatgtgtgtgtgtgtgtgtgtgtgtgtgtgtgtgtgtgggtgtatgtgtgttttgtgcataactatttaaggaaactggaattttaaagttacttttatacaaaccaagaatatatgctacagatataagacagacatggtttggtcctatatttctagtcatgatgaatgtattttgtataccatcttcatataataaacttccaaaaacaca

SEQ ID NO: 4818 - DNA, 2968 bp, Homo sapiens
atcgaggtccgcgggaggctcggagcgcgccaggcggacactcctctcggctcctccccggcagcggcggcggctcggagcgggctccggggctcgggtgcagcggccagcgggcgcctggcggcgaggattacccggggaagtggttgtctcctggctggagccgcgagacgggcgctcagggcgcggggccggcggcggcgaacgagaggacggactctggcggccgggtcgttggccgcggggagcgcgggcaccgggcgagcaggccgcgtcgcgctcaccatggtcagctactgggacaccggggtcctgctgtgcgcgctgctcagctgtctgcttctcacaggatctagttcaggttcaaaattaaaagatcctgaactgagtttaaaaggcacccagcacatcatgcaagcaggccagacactgcatctccaatgcaggggggaagcagcccataaatggtctttgcctgaaatggtgagtaaggaaagcgaaaggctgagcataactaaatctgcctgtggaagaaatggcaaacaattctgcagtactttaaccttgaacacagctcaagcaaaccacactggcttctacagctgcaaatatctagctgtacctacttcaaagaagaaggaaacagaatctgcaatctatatatttattagtgatacaggtagacctttcgtagagatgtacagtgaaatccccgaaattatacacatgactgaaggaagggagctcgtcattccctgccgggttacgtcacctaacatcactgttactttaaaaaagtttccacttgacactttgatccctgatggaaaacgcataatctgggacagtagaaagggcttcatcatatcaaatgcaacgtacaaagaaatagggcttctgacctgtgaagcaacagtcaatgggcatttgtataagacaaactatctcacacatcgacaaaccaatacaatcatagatgtccaaataagcacaccacgcccagtcaaattacttagaggccatactcttgtcctcaattgtactgctaccactcccttgaacacgagagttcaaatgacctggagttaccctgatgaaaaaaataagagagcttccgtaaggcgacgaattgaccaaagcaattcccatgccaacatattctacagtgttcttactattgacaaaatgcagaacaaagacaaaggactttatacttgtcgtgtaaggagtggaccatcattcaaatctgttaacacctcagtgcatatatatgataaagcattcatcactgtgaaacatcgaaaacagcaggtgcttgaaaccgtagctggcaagcggtcttaccggctctctatgaaagtgaaggcatttccctcgccggaagttgtatggttaaaagatgggttacctgcgactgagaaatctgctcgctatttgactcgtggctactcgttaattatcaaggacgtaactgaagaggatgcagggaattatacaatcttgctgagcataaaacagtcaaatgtgtttaaaaacctcactgccactctaattgtcaatgtgaaaccccagatttacgaaaaggccgtgtcatcgtttccagacccggctctctacccactgggcagcagacaaatcctgacttgtaccgcatatggtatccctcaacctacaatcaagtggttctggcacccctgtaaccataatcattccgaagcaaggtgtgacttttgttccaataatgaagagtcctttatcctggatgctgacagcaacatgggaaacagaattgagagcatcactcagcgcatggcaataatagaaggaaagaataagatggctagcaccttggttgtggctgactctagaatttctggaatctacatttgcatagcttccaataaagttgggactgtgggaagaaacataagcttttatatcacagatgtgccaaatgggtttcatgttaacttggaaaaaatgccgacggaaggagaggacctgaaactgtcttgcacagttaacaagttcttatacagagacgttacttggattttactgcggacagttaataacagaacaatgcactacagtattagcaagcaaaaaatggccatcactaaggagcactccatcactcttaatcttaccatcatgaatgtttccctgcaagattcaggcacctatgcctgcagagccaggaatgtatacacaggggaagaaatcctccagaagaaagaaattacaatcagagatcaggaagcaccatacctcctgcgaaacctcagtgatcacacagtggccatcagcagttccaccactttagactgtcatgctaatggtgtccccgagcctcagatcacttggtttaaaaacaaccacaaaatacaacaagagcctgaactgtatacatcaacgtcaccatcgtcatcgtcatcatcaccattgtcatcatcatcatcatcgtcatcatcatcatcatcatagctatcatcattatcatcatcatcatcatcatcatcatagctaccatttattgaaaactattatgtgtcaacttcaaagaacttatcctttagttggagagccaagacaatcataacaataacaaatggccgggcatggtggctcacgcctgtaatcccagcactttgggaggccaaggcaggtggatcatttgaggtcaggagttcaagaccagcctgaccaagatggtgaaatgctgtctctattaaaaatacaaaattagccaggcatggtggctcatgcctgtaatgccagctactcgggaggctgagacaggagaatcacttgaacccaggaggcagaggttgcagggagccgagatcgtgtactgcactccagcctgggcaacaagagcgaaactccgtctcaaaaaacaaataaataaataaataaataaacagacaaaattcactttttattctattaaacttaacatacatgc

SEQ ID NO: 4819 - DNA, 1911 bp, Homo sapiens
atcgaggtccgcgggaggctcggagcgcgccaggcggacactcctctcggctcctccccggcagcggcggcggctcggagcgggctccggggctcgggtgcagcggccagcgggcgcctggcggcgaggattacccggggaagtggttgtctcctggctggagccgcgagacgggcgctcagggcgcggggccggcggcggcgaacgagaggacggactctggcggccgggtcgttggccgcggggagcgcgggcaccgggcgagcaggccgcgtcgcgctcaccatggtcagctactgggacaccggggtcctgctgtgcgcgctgctcagctgtctgcttctcacaggatctagttcaggttcaaaattaaaagatcctgaactgagtttaaaaggcacccagcacatcatgcaagcaggccagacactgcatctccaatgcaggggggaagcagcccataaatggtctttgcctgaaatggtgagtaaggaaagcgaaaggctgagcataactaaatctgcctgtggaagaaatggcaaacaattctgcagtactttaaccttgaacacagctcaagcaaaccacactggcttctacagctgcaaatatctagctgtacctacttcaaagaagaaggaaacagaatctgcaatctatatatttattagtgatacaggtagacctttcgtagagatgtacagtgaaatccccgaaattatacacatgactgaaggaagggagctcgtcattccctgccgggttacgtcacctaacatcactgttactttaaaaaagtttccacttgacactttgatccctgatggaaaacgcataatctgggacagtagaaagggcttcatcatatcaaatgcaacgtacaaagaaatagggcttctgacctgtgaagcaacagtcaatgggcatttgtataagacaaactatctcacacatcgacaaaccaatacaatcatagatgtccaaataagcacaccacgcccagtcaaattacttagaggccatactcttgtcctcaattgtactgctaccactcccttgaacacgagagttcaaatgacctggagttaccctgatgaaaaaaataagagagcttccgtaaggcgacgaattgaccaaagcaattcccatgccaacatattctacagtgttcttactattgacaaaatgcagaacaaagacaaaggactttatacttgtcgtgtaaggagtggaccatcattcaaatctgttaacacctcagtgcatatatatgataaagcattcatcactgtgaaacatcgaaaacagcaggtgcttgaaaccgtagctggcaagcggtcttaccggctctctatgaaagtgaaggcatttccctcgccggaagttgtatggttaaaagatgggttacctgcgactgagaaatctgctcgctatttgactcgtggctactcgttaattatcaaggacgtaactgaagaggatgcagggaattatacaatcttgctgagcataaaacagtcaaatgtgtttaaaaacctcactgccactctaattgtcaatgtgaaaccccagatttacgaaaaggccgtgtcatcgtttccagacccggctctctacccactgggcagcagacaaatcctgacttgtaccgcatatggtatccctcaacctacaatcaagtggttctggcacccctgtaaccataatcattccgaagcaaggtgtgacttttgttccaataatgaagagtcctttatcctggatgctgacagcaacatgggaaacagaattgagagcatcactcagcgcatggcaataatagaaggaaagaataagcttccaccagctaacagttctttcatgttgccacctacaagcttctcttccaactacttccatttccttccgtga

SEQ ID NO: 4820 - DNA, 3220 bp, Homo sapiens
gaggccaggggagggtgcgaaggaggcgcctgcctccaacctgcgggcgggaggtgggtggctgcggggcaattgaaaaagagccggcgaggagttccccgaaacttgttggaactccgggctcgcgcggaggccaggagctgagcggcggcggctgccggacgatgggagcgtgagcaggacggtgataacctctccccgatcgggttgcgagggcgccgggcagaggccaggacgcgagccgccagcggtgggacccatcgacgacttcccggggcgacaggagcagccccgagagccagggcgagcgcccgttccaggtggccggaccgcccgccgcgtccgcgccgcgctccctgcaggcaacgggagacgcccccgcgcagcgcgagcgcctcagcgcggccgctcgctctccccctcgagggacaaacttttcccaaacccgatccgagcccttggaccaaactcgcctgcgccgagagccgtccgcgtagagcgctccgtctccggcgagatgtccgagcgcaaagaaggcagaggcaaagggaagggcaagaagaaggagcgaggctccggcaagaagccggagtccgcggcgggcagccagagcccagccttgcctccccgattgaaagagatgaaaagccaggaatcggctgcaggttccaaactagtccttcggtgtgaaaccagttctgaatactcctctctcagattcaagtggttcaagaatgggaatgaattgaatcgaaaaaacaaaccacaaaatatcaagatacaaaaaaagccagggaagtcagaacttcgcattaacaaagcatcactggctgattctggagagtatatgtgcaaagtgatcagcaaattaggaaatgacagtgcctctgccaatatcaccatcgtggaatcaaacgagatcatcactggtatgccagcctcaactgaaggagcatatgtgtcttcagagtctcccattagaatatcagtatccacagaaggagcaaatacttcttcatctacatctacatccaccactgggacaagccatcttgtaaaatgtgcggagaaggagaaaactttctgtgtgaatggaggggagtgcttcatggtgaaagacctttcaaacccctcgagatacttgtgcaagtgccaacctggattcactggagcaagatgtactgagaatgtgcccatgaaagtccaaaaccaagaaaaggcggaggagctgtaccagaagagagtgctgaccataaccggcatctgcatcgccctccttgtggtcggcatcatgtgtgtggtggcctactgcaaaaccaagaaacagcggaaaaagctgcatgaccgtcttcggcagagccttcggtctgaacgaaacaatatgatgaacattgccaatgggcctcaccatcctaacccaccccccgagaatgtccagctggtgaatcaatacgtatctaaaaacgtcatctccagtgagcatattgttgagagagaagcagagacatccttttccaccagtcactatacttccacagcccatcactccactactgtcacccagactcctagccacagctggagcaacggacacactgaaagcatcctttccgaaagccactctgtaatcgtgatgtcatccgtagaaaacagtaggcacagcagcccaactgggggcccaagaggacgtcttaatggcacaggaggccctcgtgaatgtaacagcttcctcaggcatgccagagaaacccctgattcctaccgagactctcctcatagtgaaagacataaccttatagctgagctaaggagaaacaaggcacacagatccaaatgcatgcagatccagctatcagcaactcatcttagatcttcttccattccccatttgggcttcattctctaagaccccttggcctttaggaaggtatgtgtcagccatgaccaccccggctcgtatgtcacctgtagatttccacacgccaagctcccccaaatcgcccccttcggaaatgtctccacccgtgtccagcatgacggtgtccatgccttccatggcggtcagccccttcatggaagaagagagacctctacttctcgtgacaccaccaaggctgcgggagaagaagtttgaccatcaccctcagcagttcagctccttccaccacaaccccgcgcatgacagtaacagcctccctgctagccccttgaggatagtggaggatgaggagtatgaaacgacccaagagtacgagccagcccaagagcctgttaagaaactcgccaatagccggcgggccaaaagaaccaagcccaatggccacattgctaacagattggaagtggacagcaacacaagctcccagagcagtaactcagagagtgaaacagaagatgaaagagtaggtgaagatacgcctttcctgggcatacagaaccccctggcagccagtcttgaggcaacacctgccttccgcctggctgacagcaggactaacccagcaggccgcttctcgacacaggaagaaatccaggccaggctgtctagtgtaattgctaaccaagaccctattgctgtataaaacctaaataaacacatagattcacctgtaaaactttattttatataataaagtattccaccttaaattaaacaatttattttattttagcagttctgcaaatagaaaacaggaaaaaaacttttataaattaaatatatgtatgtaaaaatgtgttatgtgccatatgtagcaattttttacagtatttcaaaacgagaaagatatcaatggtgcctttatgttatgttatgtcgagagcaagttttgtacagttacagtgattgcttttccacagtatttctgcaaaacctctcatagattcagtttttgctggcttcttgtgcattgcattatgatgttgactggatgtatgatttgcaagacttgcaactgtccctctgtttgcttgtagtagcacccgatcagtatgtcttgtaatggcacatccatccagatatgcctctcttgtgtatgaagttttctttgctttcagaatatgaaatgagttgtgtctactctgccagccaaaggtttgcctcattgggctctgagataatagtagatccaacagcatgctactattaaatacagcaagaaactgcattaagtaatgttaaatattaggaagaaagtaatactgtgatttaaaaaaaact

SEQ ID NO: 4821 - DNA, 2374 bp, Homo sapiens
ggcttaactgatgcctgcctgcctctctttgatttgatggcctttattccttctaattggataaaataggaagtcactggcagtcctgtgtggctggggatactgattttactcagaccagcctgcagctctagagtgtgggtagagagcggggagtgggggttgggagagggggaggaaagagagagaggagagaggacgggcttggatgaagaagggaaagaaagagaaagagactgaagcagagaagagccgcagaggaagaaagtgaatgagcactcaagaaggacaaagaggagtagtcgggggtggggtggaggcagggcggggaagggagtgaccgcccctcctggctgcactcttgcctccggagccctctgatcctgtttgcagtgatgctccgagggcaggcacctgctgctctgtaatgattcagcccctttcagccgtcgtcgcgttaacacaacaggatgctgttgctattgtcactactgcctctcctgccgccgctgctgctgccgccgccgccaccgccgctggtcctccttctgcttttacttctcctgcatgacagttgttttcttcatctgagcagacaccagcttcagatgctcgaggtgagaaacatgcctttcagtttgggctactggtttacttaattaatcagccggcagctccgtcgatctattttcgtccctgtcctcttgacgagcccgggatggtttggagtagcatttaaaagaactagaaaagtggcccagaaacagcagcttaaagaattattacgatatactttgattttgtagttgctaggagcttttcttccccccttgcatctttctgaactcttcttgattttaataatggccttggacttggacgatttatcgatttccccctgtaagatgctgtatcatttggttgggggggcctctgcgtggtaatggaccgtgagagcggccaggccttcttctggaggtgagccgatggagatttattccccagacatgtctgaggtcgccgccgagaggtcctccagcccctccactcagctgagtgcagacccatctcttgatgggcttccggcagcagaagacatgccagagccccagactgaagatgggagaacccctggactcgtgggcctggccgtgccctgctgtgcgtgcctagaagctgagcgcctgagaggttgcctcaactcagagaaaatctgcattgtccccatcctggcttgcctggtcagcctctgcctctgcatcgccggcctcaagtgggtatttgtggacaagatctttgaatatgactctcctactcaccttgaccctggggggttaggccaggaccctattatttctctggacgcaactgctgcctcagctgtgtgggtgtcgtctgaggcatacacttcacctgtctctagggctcaatctgaaagtgaggttcaagttacagtgcaaggtgacaaggctgttgtctcctttgaaccatcagcggcaccgacaccgaagaatcgtatttttgccttttctttcttgccgtccactgcgccatccttcccttcacccacccggaaccctgaggtgagaacgcccaagtcagcaactcagccacaaacaacagaaactaatctccaaactgctcctaaactttctacatctacatccaccactgggacaagccatcttgtaaaatgtgcggagaaggagaaaactttctgtgtgaatggaggggagtgcttcatggtgaaagacctttcaaacccctcgagatacttgtgcaagtgcccaaatgagtttactggtgatcgctgccaaaactacgtaatggccagcttctacagtacgtccactccctttctgtctctgcctgaataggagcatgctcagttggtgctgctttcttgttgctgcatctcccctcagattccacctagagctagatgtgtcttaccagatctaatattgactgcctctgcctgtcgcatgagaacattaacaaaagcaattgtattacttcctctgttcgcgactagttggctctgagatactaataggtgtgtgaggctccggatgtttctggaattgatattgaatgatgtgatacaaattgatagtcaatatcaagcagtgaaatatgataataaaggcatttcaaagtctcacttttattgataaaataaaaatcattctactgaacagtccatcttctttatacaatgaccacatcctgaaaagggtgttgctaagctgtaaccgatatgcacttgaaatgatggtaagttaattttgattcagaatgtgttatttgtcacaaataaacataataaaaggagttcagatgtttttcttcattaaccaaaaaaaaaaaaaaa

SEQ ID NO: 4822 - DNA, 3078 bp, Homo sapiens
gaggccaggggagggtgcgaaggaggcgcctgcctccaacctgcgggcgggaggtgggtggctgcggggcaattgaaaaagagccggcgaggagttccccgaaacttgttggaactccgggctcgcgcggaggccaggagctgagcggcggcggctgccggacgatgggagcgtgagcaggacggtgataacctctccccgatcgggttgcgagggcgccgggcagaggccaggacgcgagccgccagcggtgggacccatcgacgacttcccggggcgacaggagcagccccgagagccagggcgagcgcccgttccaggtggccggaccgcccgccgcgtccgcgccgcgctccctgcaggcaacgggagacgcccccgcgcagcgcgagcgcctcagcgcggccgctcgctctccccctcgagggacaaacttttcccaaacccgatccgagcccttggaccaaactcgcctgcgccgagagccgtccgcgtagagcgctccgtctccggcgagatgtccgagcgcaaagaaggcagaggcaaagggaagggcaagaagaaggagcgaggctccggcaagaagccggagtccgcggcgggcagccagagcccagccttgcctccccgattgaaagagatgaaaagccaggaatcggctgcaggttccaaactagtccttcggtgtgaaaccagttctgaatactcctctctcagattcaagtggttcaagaatgggaatgaattgaatcgaaaaaacaaaccacaaaatatcaagatacaaaaaaagccagggaagtcagaacttcgcattaacaaagcatcactggctgattctggagagtatatgtgcaaagtgatcagcaaattaggaaatgacagtgcctctgccaatatcaccatcgtggaatcaaacgagatcatcactggtatgccagcctcaactgaaggagcatatgtgtcttcagagtctcccattagaatatcagtatccacagaaggagcaaatacttcttcatctacatctacatccaccactgggacaagccatcttgtaaaatgtgcggagaaggagaaaactttctgtgtgaatggaggggagtgcttcatggtgaaagacctttcaaacccctcgagatacttgtgcaagtgccaacctggattcactggagcaagatgtactgagaatgtgcccatgaaagtccaaaaccaagaaaaggcggaggagctgtaccagaagagagtgctgaccataaccggcatctgcatcgccctccttgtggtcggcatcatgtgtgtggtggcctactgcaaaaccaagaaacagcggaaaaagctgcatgaccgtcttcggcagagccttcggtctgaacgaaacaatatgatgaacattgccaatgggcctcaccatcctaacccaccccccgagaatgtccagctggtgaatcaatacgtatctaaaaacgtcatctccagtgagcatattgttgagagagaagcagagacatccttttccaccagtcactatacttccacagcccatcactccactactgtcacccagactcctagccacagctggagcaacggacacactgaaagcatcctttccgaaagccactctgtaatcgtgatgtcatccgtagaaaacagtaggcacagcagcccaactgggggcccaagaggacgtcttaatggcacaggaggccctcgtgaatgtaacagcttcctcaggcatgccagagaaacccctgattcctaccgagactctcctcatagtgaaaggtatgtgtcagccatgaccaccccggctcgtatgtcacctgtagatttccacacgccaagctcccccaaatcgcccccttcggaaatgtctccacccgtgtccagcatgacggtgtccatgccttccatggcggtcagccccttcatggaagaagagagacctctacttctcgtgacaccaccaaggctgcgggagaagaagtttgaccatcaccctcagcagttcagctccttccaccacaaccccgcgcatgacagtaacagcctccctgctagccccttgaggatagtggaggatgaggagtatgaaacgacccaagagtacgagccagcccaagagcctgttaagaaactcgccaatagccggcgggccaaaagaaccaagcccaatggccacattgctaacagattggaagtggacagcaacacaagctcccagagcagtaactcagagagtgaaacagaagatgaaagagtaggtgaagatacgcctttcctgggcatacagaaccccctggcagccagtcttgaggcaacacctgccttccgcctggctgacagcaggactaacccagcaggccgcttctcgacacaggaagaaatccaggccaggctgtctagtgtaattgctaaccaagaccctattgctgtataaaacctaaataaacacatagattcacctgtaaaactttattttatataataaagtattccaccttaaattaaacaatttattttattttagcagttctgcaaatagaaaacaggaaaaaaacttttataaattaaatatatgtatgtaaaaatgtgttatgtgccatatgtagcaattttttacagtatttcaaaacgagaaagatatcaatggtgcctttatgttatgttatgtcgagagcaagttttgtacagttacagtgattgcttttccacagtatttctgcaaaacctctcatagattcagtttttgctggcttcttgtgcattgcattatgatgttgactggatgtatgatttgcaagacttgcaactgtccctctgtttgcttgtagtagcacccgatcagtatgtcttgtaatggcacatccatccagatatgcctctcttgtgtatgaagttttctttgctttcagaatatgaaatgagttgtgtctactctgccagccaaaggtttgcctcattgggctctgagataatagtagatccaacagcatgctactattaaatacagcaagaaactgcattaagtaatgttaaatattaggaagaaagtaatactgtgatttaaaaaaaact

SEQ ID NO: 4823 - DNA, 1694 bp, Homo sapiens
gaggccaggggagggtgcgaaggaggcgcctgcctccaacctgcgggcgggaggtgggtggctgcggggcaattgaaaaagagccggcgaggagttccccgaaacttgttggaactccgggctcgcgcggaggccaggagctgagcggcggcggctgccggacgatgggagcgtgagcaggacggtgataacctctccccgatcgggttgcgagggcgccgggcagaggccaggacgcgagccgccagcggtgggacccatcgacgacttcccggggcgacaggagcagccccgagagccagggcgagcgcccgttccaggtggccggaccgcccgccgcgtccgcgccgcgctccctgcaggcaacgggagacgcccccgcgcagcgcgagcgcctcagcgcggccgctcgctctccccctcgagggacaaacttttcccaaacccgatccgagcccttggaccaaactcgcctgcgccgagagccgtccgcgtagagcgctccgtctccggcgagatgtccgagcgcaaagaaggcagaggcaaagggaagggcaagaagaaggagcgaggctccggcaagaagccggagtccgcggcgggcagccagagcccagccttgcctccccgattgaaagagatgaaaagccaggaatcggctgcaggttccaaactagtccttcggtgtgaaaccagttctgaatactcctctctcagattcaagtggttcaagaatgggaatgaattgaatcgaaaaaacaaaccacaaaatatcaagatacaaaaaaagccagggaagtcagaacttcgcattaacaaagcatcactggctgattctggagagtatatgtgcaaagtgatcagcaaattaggaaatgacagtgcctctgccaatatcaccatcgtggaatcaaacgagatcatcactggtatgccagcctcaactgaaggagcatatgtgtcttcagagtctcccattagaatatcagtatccacagaaggagcaaatacttcttcatctacatctacatccaccactgggacaagccatcttgtaaaatgtgcggagaaggagaaaactttctgtgtgaatggaggggagtgcttcatggtgaaagacctttcaaacccctcgagatacttgtgcaagtaagaaaagaaatcctgtgtgtcgcttatgtctataactccttgtttcagatgattctatgtctcatgatgtattgttgctttttttccaattttgttgcatcatgttgaataatgctgttttatatgtagagtgttttaaaacattcacaccattcgtcatcactcctctgtcatatgcagaattgttttttgctcttttcaatgtgtgtgaggtgttttttgtttttgtttttgttttttgccatgttatttatagtgttgctttccttgtggtttttcttgttgttattcagaaaagatgtgcagatatcacagaggcctataacttttggtatctacttctacatccaatgtatgaattaagctgtaagataatgttgctttcttatcccagtgatcacctgccaaatgaataagacaacaaagagaagcagaagggcagaagattatttactgacatatatctattacacttgggattgtcttactgttgcataactattttttaaacggagtttagttttatattgctagtaaaaaaa

SEQ ID NO: 4824 - DNA, 3093 bp, Homo sapiens
gaggccaggggagggtgcgaaggaggcgcctgcctccaacctgcgggcgggaggtgggtggctgcggggcaattgaaaaagagccggcgaggagttccccgaaacttgttggaactccgggctcgcgcggaggccaggagctgagcggcggcggctgccggacgatgggagcgtgagcaggacggtgataacctctccccgatcgggttgcgagggcgccgggcagaggccaggacgcgagccgccagcggtgggacccatcgacgacttcccggggcgacaggagcagccccgagagccagggcgagcgcccgttccaggtggccggaccgcccgccgcgtccgcgccgcgctccctgcaggcaacgggagacgcccccgcgcagcgcgagcgcctcagcgcggccgctcgctctccccctcgagggacaaacttttcccaaacccgatccgagcccttggaccaaactcgcctgcgccgagagccgtccgcgtagagcgctccgtctccggcgagatgtccgagcgcaaagaaggcagaggcaaagggaagggcaagaagaaggagcgaggctccggcaagaagccggagtccgcggcgggcagccagagcccagccttgcctccccgattgaaagagatgaaaagccaggaatcggctgcaggttccaaactagtccttcggtgtgaaaccagttctgaatactcctctctcagattcaagtggttcaagaatgggaatgaattgaatcgaaaaaacaaaccacaaaatatcaagatacaaaaaaagccagggaagtcagaacttcgcattaacaaagcatcactggctgattctggagagtatatgtgcaaagtgatcagcaaattaggaaatgacagtgcctctgccaatatcaccatcgtggaatcaaacgagatcatcactggtatgccagcctcaactgaaggagcatatgtgtcttcagagtctcccattagaatatcagtatccacagaaggagcaaatacttcttcatctacatctacatccaccactgggacaagccatcttgtaaaatgtgcggagaaggagaaaactttctgtgtgaatggaggggagtgcttcatggtgaaagacctttcaaacccctcgagatacttgtgcaagtgcccaaatgagtttactggtgatcgctgccaaaactacgtaatggccagcttctacaagcatcttgggattgaatttatggaggcggaggagctgtaccagaagagagtgctgaccataaccggcatctgcatcgccctccttgtggtcggcatcatgtgtgtggtggcctactgcaaaaccaagaaacagcggaaaaagctgcatgaccgtcttcggcagagccttcggtctgaacgaaacaatatgatgaacattgccaatgggcctcaccatcctaacccaccccccgagaatgtccagctggtgaatcaatacgtatctaaaaacgtcatctccagtgagcatattgttgagagagaagcagagacatccttttccaccagtcactatacttccacagcccatcactccactactgtcacccagactcctagccacagctggagcaacggacacactgaaagcatcctttccgaaagccactctgtaatcgtgatgtcatccgtagaaaacagtaggcacagcagcccaactgggggcccaagaggacgtcttaatggcacaggaggccctcgtgaatgtaacagcttcctcaggcatgccagagaaacccctgattcctaccgagactctcctcatagtgaaaggtatgtgtcagccatgaccaccccggctcgtatgtcacctgtagatttccacacgccaagctcccccaaatcgcccccttcggaaatgtctccacccgtgtccagcatgacggtgtccatgccttccatggcggtcagccccttcatggaagaagagagacctctacttctcgtgacaccaccaaggctgcgggagaagaagtttgaccatcaccctcagcagttcagctccttccaccacaaccccgcgcatgacagtaacagcctccctgctagccccttgaggatagtggaggatgaggagtatgaaacgacccaagagtacgagccagcccaagagcctgttaagaaactcgccaatagccggcgggccaaaagaaccaagcccaatggccacattgctaacagattggaagtggacagcaacacaagctcccagagcagtaactcagagagtgaaacagaagatgaaagagtaggtgaagatacgcctttcctgggcatacagaaccccctggcagccagtcttgaggcaacacctgccttccgcctggctgacagcaggactaacccagcaggccgcttctcgacacaggaagaaatccaggccaggctgtctagtgtaattgctaaccaagaccctattgctgtataaaacctaaataaacacatagattcacctgtaaaactttattttatataataaagtattccaccttaaattaaacaatttattttattttagcagttctgcaaatagaaaacaggaaaaaaacttttataaattaaatatatgtatgtaaaaatgtgttatgtgccatatgtagcaattttttacagtatttcaaaacgagaaagatatcaatggtgcctttatgttatgttatgtcgagagcaagttttgtacagttacagtgattgcttttccacagtatttctgcaaaacctctcatagattcagtttttgctggcttcttgtgcattgcattatgatgttgactggatgtatgatttgcaagacttgcaactgtccctctgtttgcttgtagtagcacccgatcagtatgtcttgtaatggcacatccatccagatatgcctctcttgtgtatgaagttttctttgctttcagaatatgaaatgagttgtgtctactctgccagccaaaggtttgcctcattgggctctgagataatagtagatccaacagcatgctactattaaatacagcaagaaactgcattaagtaatgttaaatattaggaagaaagtaatactgtgatttaaaaaaaact

SEQ ID NO: 4825 - DNA, 3069 bp, Homo sapiens
gaggccaggggagggtgcgaaggaggcgcctgcctccaacctgcgggcgggaggtgggtggctgcggggcaattgaaaaagagccggcgaggagttccccgaaacttgttggaactccgggctcgcgcggaggccaggagctgagcggcggcggctgccggacgatgggagcgtgagcaggacggtgataacctctccccgatcgggttgcgagggcgccgggcagaggccaggacgcgagccgccagcggtgggacccatcgacgacttcccggggcgacaggagcagccccgagagccagggcgagcgcccgttccaggtggccggaccgcccgccgcgtccgcgccgcgctccctgcaggcaacgggagacgcccccgcgcagcgcgagcgcctcagcgcggccgctcgctctccccctcgagggacaaacttttcccaaacccgatccgagcccttggaccaaactcgcctgcgccgagagccgtccgcgtagagcgctccgtctccggcgagatgtccgagcgcaaagaaggcagaggcaaagggaagggcaagaagaaggagcgaggctccggcaagaagccggagtccgcggcgggcagccagagcccagccttgcctccccgattgaaagagatgaaaagccaggaatcggctgcaggttccaaactagtccttcggtgtgaaaccagttctgaatactcctctctcagattcaagtggttcaagaatgggaatgaattgaatcgaaaaaacaaaccacaaaatatcaagatacaaaaaaagccagggaagtcagaacttcgcattaacaaagcatcactggctgattctggagagtatatgtgcaaagtgatcagcaaattaggaaatgacagtgcctctgccaatatcaccatcgtggaatcaaacgagatcatcactggtatgccagcctcaactgaaggagcatatgtgtcttcagagtctcccattagaatatcagtatccacagaaggagcaaatacttcttcatctacatctacatccaccactgggacaagccatcttgtaaaatgtgcggagaaggagaaaactttctgtgtgaatggaggggagtgcttcatggtgaaagacctttcaaacccctcgagatacttgtgcaagtgcccaaatgagtttactggtgatcgctgccaaaactacgtaatggccagcttctacaaggcggaggagctgtaccagaagagagtgctgaccataaccggcatctgcatcgccctccttgtggtcggcatcatgtgtgtggtggcctactgcaaaaccaagaaacagcggaaaaagctgcatgaccgtcttcggcagagccttcggtctgaacgaaacaatatgatgaacattgccaatgggcctcaccatcctaacccaccccccgagaatgtccagctggtgaatcaatacgtatctaaaaacgtcatctccagtgagcatattgttgagagagaagcagagacatccttttccaccagtcactatacttccacagcccatcactccactactgtcacccagactcctagccacagctggagcaacggacacactgaaagcatcctttccgaaagccactctgtaatcgtgatgtcatccgtagaaaacagtaggcacagcagcccaactgggggcccaagaggacgtcttaatggcacaggaggccctcgtgaatgtaacagcttcctcaggcatgccagagaaacccctgattcctaccgagactctcctcatagtgaaaggtatgtgtcagccatgaccaccccggctcgtatgtcacctgtagatttccacacgccaagctcccccaaatcgcccccttcggaaatgtctccacccgtgtccagcatgacggtgtccatgccttccatggcggtcagccccttcatggaagaagagagacctctacttctcgtgacaccaccaaggctgcgggagaagaagtttgaccatcaccctcagcagttcagctccttccaccacaaccccgcgcatgacagtaacagcctccctgctagccccttgaggatagtggaggatgaggagtatgaaacgacccaagagtacgagccagcccaagagcctgttaagaaactcgccaatagccggcgggccaaaagaaccaagcccaatggccacattgctaacagattggaagtggacagcaacacaagctcccagagcagtaactcagagagtgaaacagaagatgaaagagtaggtgaagatacgcctttcctgggcatacagaaccccctggcagccagtcttgaggcaacacctgccttccgcctggctgacagcaggactaacccagcaggccgcttctcgacacaggaagaaatccaggccaggctgtctagtgtaattgctaaccaagaccctattgctgtataaaacctaaataaacacatagattcacctgtaaaactttattttatataataaagtattccaccttaaattaaacaatttattttattttagcagttctgcaaatagaaaacaggaaaaaaacttttataaattaaatatatgtatgtaaaaatgtgttatgtgccatatgtagcaattttttacagtatttcaaaacgagaaagatatcaatggtgcctttatgttatgttatgtcgagagcaagttttgtacagttacagtgattgcttttccacagtatttctgcaaaacctctcatagattcagtttttgctggcttcttgtgcattgcattatgatgttgactggatgtatgatttgcaagacttgcaactgtccctctgtttgcttgtagtagcacccgatcagtatgtcttgtaatggcacatccatccagatatgcctctcttgtgtatgaagttttctttgctttcagaatatgaaatgagttgtgtctactctgccagccaaaggtttgcctcattgggctctgagataatagtagatccaacagcatgctactattaaatacagcaagaaactgcattaagtaatgttaaatattaggaagaaagtaatactgtgatttaaaaaaaact

SEQ ID NO: 4826 - DNA, 1740 bp, Homo sapiens; identical to SEQ ID NO: 2406

SEQ ID NO: 4827 - DNA, 2553 bp, Homo sapiens
gcactcggggcgacagagagggaggaggcgcgcggggacggggacgcccaggaggacccactcgcgggtcccgctccgctccggcagcagcatggggaaaggacgcgcgggccgagttggcaccacagccttgcctccccgattgaaagagatgaaaagccaggaatcggctgcaggttccaaactagtccttcggtgtgaaaccagttctgaatactcctctctcagattcaagtggttcaagaatgggaatgaattgaatcgaaaaaacaaaccacaaaatatcaagatacaaaaaaagccagggaagtcagaacttcgcattaacaaagcatcactggctgattctggagagtatatgtgcaaagtgatcagcaaattaggaaatgacagtgcctctgccaatatcaccatcgtggaatcaaacgagatcatcactggtatgccagcctcaactgaaggagcatatgtgtcttcagctacatctacatccaccactgggacaagccatcttgtaaaatgtgcggagaaggagaaaactttctgtgtgaatggaggggagtgcttcatggtgaaagacctttcaaacccctcgagatacttgtgcaagtgcccaaatgagtttactggtgatcgctgccaaaactacgtaatggccagcttctacaagcatcttgggattgaatttatggaggcggaggagctgtaccagaagagagtgctgaccataaccggcatctgcatcgccctccttgtggtcggcatcatgtgtgtggtggcctactgcaaaaccaagaaacagcggaaaaagctgcatgaccgtcttcggcagagccttcggtctgaacgaaacaatatgatgaacattgccaatgggcctcaccatcctaacccaccccccgagaatgtccagctggtgaatcaatacgtatctaaaaacgtcatctccagtgagcatattgttgagagagaagcagagacatccttttccaccagtcactatacttccacagcccatcactccactactgtcacccagactcctagccacagctggagcaacggacacactgaaagcatcctttccgaaagccactctgtaatcgtgatgtcatccgtagaaaacagtaggcacagcagcccaactgggggcccaagaggacgtcttaatggcacaggaggccctcgtgaatgtaacagcttcctcaggcatgccagagaaacccctgattcctaccgagactctcctcatagtgaaaggtatgtgtcagccatgaccaccccggctcgtatgtcacctgtagatttccacacgccaagctcccccaaatcgcccccttcggaaatgtctccacccgtgtccagcatgacggtgtccatgccttccatggcggtcagccccttcatggaagaagagagacctctacttctcgtgacaccaccaaggctgcgggagaagaagtttgaccatcaccctcagcagttcagctccttccaccacaaccccgcgcatgacagtaacagcctccctgctagccccttgaggatagtggaggatgaggagtatgaaacgacccaagagtacgagccagcccaagagcctgttaagaaactcgccaatagccggcgggccaaaagaaccaagcccaatggccacattgctaacagattggaagtggacagcaacacaagctcccagagcagtaactcagagagtgaaacagaagatgaaagagtaggtgaagatacgcctttcctgggcatacagaaccccctggcagccagtcttgaggcaacacctgccttccgcctggctgacagcaggactaacccagcaggccgcttctcgacacaggaagaaatccaggccaggctgtctagtgtaattgctaaccaagaccctattgctgtataaaacctaaataaacacatagattcacctgtaaaactttattttatataataaagtattccaccttaaattaaacaatttattttattttagcagttctgcaaatagaaaacaggaaaaaaacttttataaattaaatatatgtatgtaaaaatgtgttatgtgccatatgtagcaattttttacagtatttcaaaacgagaaagatatcaatggtgcctttatgttatgttatgtcgagagcaagttttgtacagttacagtgattgcttttccacagtatttctgcaaaacctctcatagattcagtttttgctggcttcttgtgcattgcattatgatgttgactggatgtatgatttgcaagacttgcaactgtccctctgtttgcttgtagtagcacccgatcagtatgtcttgtaatggcacatccatccagatatgcctctcttgtgtatgaagttttctttgctttcagaatatgaaatgagttgtgtctactctgccagccaaaggtttgcctcattgggctctgagataatagtagatccaacagcatgctactattaaatacagcaagaaactgcattaagtaatgttaaatattaggaagaaagtaatactgtgatttaaaaaaaact

SEQ ID NO: 4828 - DNA, 2411 bp, Homo sapiens
ctctttctgctcagcttctgctccagagcttcatcttcaggaaccacctaagcatttttttccccagtaggagttcagtctgctcattatacctaattgcaaaggagctatattcagagcaagaataataatttcagattttttaactggacttcaaagagcaggaaagtatgcagattcctaaacacataagcattgaagatattacagctacatctacatccaccactgggacaagccatcttgtaaaatgtgcggagaaggagaaaactttctgtgtgaatggaggggagtgcttcatggtgaaagacctttcaaacccctcgagatacttgtgcaagtgccaacctggattcactggagcaagatgtactgagaatgtgcccatgaaagtccaaaaccaagaaaaggcggaggagctgtaccagaagagagtgctgaccataaccggcatctgcatcgccctccttgtggtcggcatcatgtgtgtggtggcctactgcaaaaccaagaaacagcggaaaaagctgcatgaccgtcttcggcagagccttcggtctgaacgaaacaatatgatgaacattgccaatgggcctcaccatcctaacccaccccccgagaatgtccagctggtgaatcaatacgtatctaaaaacgtcatctccagtgagcatattgttgagagagaagcagagacatccttttccaccagtcactatacttccacagcccatcactccactactgtcacccagactcctagccacagctggagcaacggacacactgaaagcatcctttccgaaagccactctgtaatcgtgatgtcatccgtagaaaacagtaggcacagcagcccaactgggggcccaagaggacgtcttaatggcacaggaggccctcgtgaatgtaacagcttcctcaggcatgccagagaaacccctgattcctaccgagactctcctcatagtgaaagacataaccttatagctgagctaaggagaaacaaggcacacagatccaaatgcatgcagatccagctatcagcaactcatcttagatcttcttccattccccatttgggcttcattctctaagaccccttggcctttaggaaggtatgtgtcagccatgaccaccccggctcgtatgtcacctgtagatttccacacgccaagctcccccaaatcgcccccttcggaaatgtctccacccgtgtccagcatgacggtgtccatgccttccatggcggtcagccccttcatggaagaagagagacctctacttctcgtgacaccaccaaggctgcgggagaagaagtttgaccatcaccctcagcagttcagctccttccaccacaaccccgcgcatgacagtaacagcctccctgctagccccttgaggatagtggaggatgaggagtatgaaacgacccaagagtacgagccagcccaagagcctgttaagaaactcgccaatagccggcgggccaaaagaaccaagcccaatggccacattgctaacagattggaagtggacagcaacacaagctcccagagcagtaactcagagagtgaaacagaagatgaaagagtaggtgaagatacgcctttcctgggcatacagaaccccctggcagccagtcttgaggcaacacctgccttccgcctggctgacagcaggactaacccagcaggccgcttctcgacacaggaagaaatccaggccaggctgtctagtgtaattgctaaccaagaccctattgctgtataaaacctaaataaacacatagattcacctgtaaaactttattttatataataaagtattccaccttaaattaaacaatttattttattttagcagttctgcaaatagaaaacaggaaaaaaacttttataaattaaatatatgtatgtaaaaatgtgttatgtgccatatgtagcaattttttacagtatttcaaaacgagaaagatatcaatggtgcctttatgttatgttatgtcgagagcaagttttgtacagttacagtgattgcttttccacagtatttctgcaaaacctctcatagattcagtttttgctggcttcttgtgcattgcattatgatgttgactggatgtatgatttgcaagacttgcaactgtccctctgtttgcttgtagtagcacccgatcagtatgtcttgtaatggcacatccatccagatatgcctctcttgtgtatgaagttttctttgctttcagaatatgaaatgagttgtgtctactctgccagccaaaggtttgcctcattgggctctgagataatagtagatccaacagcatgctactattaaatacagcaagaaactgcattaagtaatgttaaatattaggaagaaagtaatactgtgatttaaaaaaaact

SEQ ID NO: 4829 - DNA, 2604 bp, Homo sapiens
gcactcggggcgacagagagggaggaggcgcgcggggacggggacgcccaggaggacccactcgcgggtcccgctccgctccggcagcagcatggggaaaggacgcgcgggccgagttggcaccacagccttgcctccccgattgaaagagatgaaaagccaggaatcggctgcaggttccaaactagtccttcggtgtgaaaccagttctgaatactcctctctcagattcaagtggttcaagaatgggaatgaattgaatcgaaaaaacaaaccacaaaatatcaagatacaaaaaaagccagggaagtcagaacttcgcattaacaaagcatcactggctgattctggagagtatatgtgcaaagtgatcagcaaattaggaaatgacagtgcctctgccaatatcaccatcgtggaatcaaacgagatcatcactggtatgccagcctcaactgaaggagcatatgtgtcttcagagtctcccattagaatatcagtatccacagaaggagcaaatacttcttcatctacatctacatccaccactgggacaagccatcttgtaaaatgtgcggagaaggagaaaactttctgtgtgaatggaggggagtgcttcatggtgaaagacctttcaaacccctcgagatacttgtgcaagtgcccaaatgagtttactggtgatcgctgccaaaactacgtaatggccagcttctacaagcatcttgggattgaatttatggaggcggaggagctgtaccagaagagagtgctgaccataaccggcatctgcatcgccctccttgtggtcggcatcatgtgtgtggtggcctactgcaaaaccaagaaacagcggaaaaagctgcatgaccgtcttcggcagagccttcggtctgaacgaaacaatatgatgaacattgccaatgggcctcaccatcctaacccaccccccgagaatgtccagctggtgaatcaatacgtatctaaaaacgtcatctccagtgagcatattgttgagagagaagcagagacatccttttccaccagtcactatacttccacagcccatcactccactactgtcacccagactcctagccacagctggagcaacggacacactgaaagcatcctttccgaaagccactctgtaatcgtgatgtcatccgtagaaaacagtaggcacagcagcccaactgggggcccaagaggacgtcttaatggcacaggaggccctcgtgaatgtaacagcttcctcaggcatgccagagaaacccctgattcctaccgagactctcctcatagtgaaaggtatgtgtcagccatgaccaccccggctcgtatgtcacctgtagatttccacacgccaagctcccccaaatcgcccccttcggaaatgtctccacccgtgtccagcatgacggtgtccatgccttccatggcggtcagccccttcatggaagaagagagacctctacttctcgtgacaccaccaaggctgcgggagaagaagtttgaccatcaccctcagcagttcagctccttccaccacaaccccgcgcatgacagtaacagcctccctgctagccccttgaggatagtggaggatgaggagtatgaaacgacccaagagtacgagccagcccaagagcctgttaagaaactcgccaatagccggcgggccaaaagaaccaagcccaatggccacattgctaacagattggaagtggacagcaacacaagctcccagagcagtaactcagagagtgaaacagaagatgaaagagtaggtgaagatacgcctttcctgggcatacagaaccccctggcagccagtcttgaggcaacacctgccttccgcctggctgacagcaggactaacccagcaggccgcttctcgacacaggaagaaatccaggccaggctgtctagtgtaattgctaaccaagaccctattgctgtataaaacctaaataaacacatagattcacctgtaaaactttattttatataataaagtattccaccttaaattaaacaatttattttattttagcagttctgcaaatagaaaacaggaaaaaaacttttataaattaaatatatgtatgtaaaaatgtgttatgtgccatatgtagcaattttttacagtatttcaaaacgagaaagatatcaatggtgcctttatgttatgttatgtcgagagcaagttttgtacagttacagtgattgcttttccacagtatttctgcaaaacctctcatagattcagtttttgctggcttcttgtgcattgcattatgatgttgactggatgtatgatttgcaagacttgcaactgtccctctgtttgcttgtagtagcacccgatcagtatgtcttgtaatggcacatccatccagatatgcctctcttgtgtatgaagttttctttgctttcagaatatgaaatgagttgtgtctactctgccagccaaaggtttgcctcattgggctctgagataatagtagatccaacagcatgctactattaaatacagcaagaaactgcattaagtaatgttaaatattaggaagaaagtaatactgtgatttaaaaaaaact

SEQ ID NO: 4830 - DNA, 2502 bp, Homo sapiens
gcactcggggcgacagagagggaggaggcgcgcggggacggggacgcccaggaggacccactcgcgggtcccgctccgctccggcagcagcatggggaaaggacgcgcgggccgagttggcaccacagccttgcctccccgattgaaagagatgaaaagccaggaatcggctgcaggttccaaactagtccttcggtgtgaaaccagttctgaatactcctctctcagattcaagtggttcaagaatgggaatgaattgaatcgaaaaaacaaaccacaaaatatcaagatacaaaaaaagccagggaagtcagaacttcgcattaacaaagcatcactggctgattctggagagtatatgtgcaaagtgatcagcaaattaggaaatgacagtgcctctgccaatatcaccatcgtggaatcaaacgctacatctacatccaccactgggacaagccatcttgtaaaatgtgcggagaaggagaaaactttctgtgtgaatggaggggagtgcttcatggtgaaagacctttcaaacccctcgagatacttgtgcaagtgcccaaatgagtttactggtgatcgctgccaaaactacgtaatggccagcttctacaagcatcttgggattgaatttatggaggcggaggagctgtaccagaagagagtgctgaccataaccggcatctgcatcgccctccttgtggtcggcatcatgtgtgtggtggcctactgcaaaaccaagaaacagcggaaaaagctgcatgaccgtcttcggcagagccttcggtctgaacgaaacaatatgatgaacattgccaatgggcctcaccatcctaacccaccccccgagaatgtccagctggtgaatcaatacgtatctaaaaacgtcatctccagtgagcatattgttgagagagaagcagagacatccttttccaccagtcactatacttccacagcccatcactccactactgtcacccagactcctagccacagctggagcaacggacacactgaaagcatcctttccgaaagccactctgtaatcgtgatgtcatccgtagaaaacagtaggcacagcagcccaactgggggcccaagaggacgtcttaatggcacaggaggccctcgtgaatgtaacagcttcctcaggcatgccagagaaacccctgattcctaccgagactctcctcatagtgaaaggtatgtgtcagccatgaccaccccggctcgtatgtcacctgtagatttccacacgccaagctcccccaaatcgcccccttcggaaatgtctccacccgtgtccagcatgacggtgtccatgccttccatggcggtcagccccttcatggaagaagagagacctctacttctcgtgacaccaccaaggctgcgggagaagaagtttgaccatcaccctcagcagttcagctccttccaccacaaccccgcgcatgacagtaacagcctccctgctagccccttgaggatagtggaggatgaggagtatgaaacgacccaagagtacgagccagcccaagagcctgttaagaaactcgccaatagccggcgggccaaaagaaccaagcccaatggccacattgctaacagattggaagtggacagcaacacaagctcccagagcagtaactcagagagtgaaacagaagatgaaagagtaggtgaagatacgcctttcctgggcatacagaaccccctggcagccagtcttgaggcaacacctgccttccgcctggctgacagcaggactaacccagcaggccgcttctcgacacaggaagaaatccaggccaggctgtctagtgtaattgctaaccaagaccctattgctgtataaaacctaaataaacacatagattcacctgtaaaactttattttatataataaagtattccaccttaaattaaacaatttattttattttagcagttctgcaaatagaaaacaggaaaaaaacttttataaattaaatatatgtatgtaaaaatgtgttatgtgccatatgtagcaattttttacagtatttcaaaacgagaaagatatcaatggtgcctttatgttatgttatgtcgagagcaagttttgtacagttacagtgattgcttttccacagtatttctgcaaaacctctcatagattcagtttttgctggcttcttgtgcattgcattatgatgttgactggatgtatgatttgcaagacttgcaactgtccctctgtttgcttgtagtagcacccgatcagtatgtcttgtaatggcacatccatccagatatgcctctcttgtgtatgaagttttctttgctttcagaatatgaaatgagttgtgtctactctgccagccaaaggtttgcctcattgggctctgagataatagtagatccaacagcatgctactattaaatacagcaagaaactgcattaagtaatgttaaatattaggaagaaagtaatactgtgatttaaaaaaaact

SEQ ID NO: 4831 - DNA, 1643 bp, Homo sapiens
gaggccaggggagggtgcgaaggaggcgcctgcctccaacctgcgggcgggaggtgggtggctgcggggcaattgaaaaagagccggcgaggagttccccgaaacttgttggaactccgggctcgcgcggaggccaggagctgagcggcggcggctgccggacgatgggagcgtgagcaggacggtgataacctctccccgatcgggttgcgagggcgccgggcagaggccaggacgcgagccgccagcggtgggacccatcgacgacttcccggggcgacaggagcagccccgagagccagggcgagcgcccgttccaggtggccggaccgcccgccgcgtccgcgccgcgctccctgcaggcaacgggagacgcccccgcgcagcgcgagcgcctcagcgcggccgctcgctctccccctcgagggacaaacttttcccaaacccgatccgagcccttggaccaaactcgcctgcgccgagagccgtccgcgtagagcgctccgtctccggcgagatgtccgagcgcaaagaaggcagaggcaaagggaagggcaagaagaaggagcgaggctccggcaagaagccggagtccgcggcgggcagccagagcccagccttgcctccccgattgaaagagatgaaaagccaggaatcggctgcaggttccaaactagtccttcggtgtgaaaccagttctgaatactcctctctcagattcaagtggttcaagaatgggaatgaattgaatcgaaaaaacaaaccacaaaatatcaagatacaaaaaaagccagggaagtcagaacttcgcattaacaaagcatcactggctgattctggagagtatatgtgcaaagtgatcagcaaattaggaaatgacagtgcctctgccaatatcaccatcgtggaatcaaacgagatcatcactggtatgccagcctcaactgaaggagcatatgtgtcttcagctacatctacatccaccactgggacaagccatcttgtaaaatgtgcggagaaggagaaaactttctgtgtgaatggaggggagtgcttcatggtgaaagacctttcaaacccctcgagatacttgtgcaagtaagaaaagaaatcctgtgtgtcgcttatgtctataactccttgtttcagatgattctatgtctcatgatgtattgttgctttttttccaattttgttgcatcatgttgaataatgctgttttatatgtagagtgttttaaaacattcacaccattcgtcatcactcctctgtcatatgcagaattgttttttgctcttttcaatgtgtgtgaggtgttttttgtttttgtttttgttttttgccatgttatttatagtgttgctttccttgtggtttttcttgttgttattcagaaaagatgtgcagatatcacagaggcctataacttttggtatctacttctacatccaatgtatgaattaagctgtaagataatgttgctttcttatcccagtgatcacctgccaaatgaataagacaacaaagagaagcagaagggcagaagattatttactgacatatatctattacacttgggattgtcttactgttgcataactattttttaaacggagtttagttttatattgctagtaaaaaaa

SEQ ID NO: 4832 - DNA, 3211 bp, Homo sapiens
gaggccaggggagggtgcgaaggaggcgcctgcctccaacctgcgggcgggaggtgggtggctgcggggcaattgaaaaagagccggcgaggagttccccgaaacttgttggaactccgggctcgcgcggaggccaggagctgagcggcggcggctgccggacgatgggagcgtgagcaggacggtgataacctctccccgatcgggttgcgagggcgccgggcagaggccaggacgcgagccgccagcggtgggacccatcgacgacttcccggggcgacaggagcagccccgagagccagggcgagcgcccgttccaggtggccggaccgcccgccgcgtccgcgccgcgctccctgcaggcaacgggagacgcccccgcgcagcgcgagcgcctcagcgcggccgctcgctctccccctcgagggacaaacttttcccaaacccgatccgagcccttggaccaaactcgcctgcgccgagagccgtccgcgtagagcgctccgtctccggcgagatgtccgagcgcaaagaaggcagaggcaaagggaagggcaagaagaaggagcgaggctccggcaagaagccggagtccgcggcgggcagccagagcccagccttgcctccccgattgaaagagatgaaaagccaggaatcggctgcaggttccaaactagtccttcggtgtgaaaccagttctgaatactcctctctcagattcaagtggttcaagaatgggaatgaattgaatcgaaaaaacaaaccacaaaatatcaagatacaaaaaaagccagggaagtcagaacttcgcattaacaaagcatcactggctgattctggagagtatatgtgcaaagtgatcagcaaattaggaaatgacagtgcctctgccaatatcaccatcgtggaatcaaacgagatcatcactggtatgccagcctcaactgaaggagcatatgtgtcttcagagtctcccattagaatatcagtatccacagaaggagcaaatacttcttcatctacatctacatccaccactgggacaagccatcttgtaaaatgtgcggagaaggagaaaactttctgtgtgaatggaggggagtgcttcatggtgaaagacctttcaaacccctcgagatacttgtgcaagtgcccaaatgagtttactggtgatcgctgccaaaactacgtaatggccagcttctacaaggcggaggagctgtaccagaagagagtgctgaccataaccggcatctgcatcgccctccttgtggtcggcatcatgtgtgtggtggcctactgcaaaaccaagaaacagcggaaaaagctgcatgaccgtcttcggcagagccttcggtctgaacgaaacaatatgatgaacattgccaatgggcctcaccatcctaacccaccccccgagaatgtccagctggtgaatcaatacgtatctaaaaacgtcatctccagtgagcatattgttgagagagaagcagagacatccttttccaccagtcactatacttccacagcccatcactccactactgtcacccagactcctagccacagctggagcaacggacacactgaaagcatcctttccgaaagccactctgtaatcgtgatgtcatccgtagaaaacagtaggcacagcagcccaactgggggcccaagaggacgtcttaatggcacaggaggccctcgtgaatgtaacagcttcctcaggcatgccagagaaacccctgattcctaccgagactctcctcatagtgaaagacataaccttatagctgagctaaggagaaacaaggcacacagatccaaatgcatgcagatccagctatcagcaactcatcttagatcttcttccattccccatttgggcttcattctctaagaccccttggcctttaggaaggtatgtgtcagccatgaccaccccggctcgtatgtcacctgtagatttccacacgccaagctcccccaaatcgcccccttcggaaatgtctccacccgtgtccagcatgacggtgtccatgccttccatggcggtcagccccttcatggaagaagagagacctctacttctcgtgacaccaccaaggctgcgggagaagaagtttgaccatcaccctcagcagttcagctccttccaccacaaccccgcgcatgacagtaacagcctccctgctagccccttgaggatagtggaggatgaggagtatgaaacgacccaagagtacgagccagcccaagagcctgttaagaaactcgccaatagccggcgggccaaaagaaccaagcccaatggccacattgctaacagattggaagtggacagcaacacaagctcccagagcagtaactcagagagtgaaacagaagatgaaagagtaggtgaagatacgcctttcctgggcatacagaaccccctggcagccagtcttgaggcaacacctgccttccgcctggctgacagcaggactaacccagcaggccgcttctcgacacaggaagaaatccaggccaggctgtctagtgtaattgctaaccaagaccctattgctgtataaaacctaaataaacacatagattcacctgtaaaactttattttatataataaagtattccaccttaaattaaacaatttattttattttagcagttctgcaaatagaaaacaggaaaaaaacttttataaattaaatatatgtatgtaaaaatgtgttatgtgccatatgtagcaattttttacagtatttcaaaacgagaaagatatcaatggtgcctttatgttatgttatgtcgagagcaagttttgtacagttacagtgattgcttttccacagtatttctgcaaaacctctcatagattcagtttttgctggcttcttgtgcattgcattatgatgttgactggatgtatgatttgcaagacttgcaactgtccctctgtttgcttgtagtagcacccgatcagtatgtcttgtaatggcacatccatccagatatgcctctcttgtgtatgaagttttctttgctttcagaatatgaaatgagttgtgtctactctgccagccaaaggtttgcctcattgggctctgagataatagtagatccaacagcatgctactattaaatacagcaagaaactgcattaagtaatgttaaatattaggaagaaagtaatactgtgatttaaaaaaaact

SEQ ID NO: 4833 - DNA, 1638 bp, Homo sapiens
gaggccaggggagggtgcgaaggaggcgcctgcctccaacctgcgggcgggaggtgggtggctgcggggcaattgaaaaagagccggcgaggagttccccgaaacttgttggaactccgggctcgcgcggaggccaggagctgagcggcggcggctgccggacgatgggagcgtgagcaggacggtgataacctctccccgatcgggttgcgagggcgccgggcagaggccaggacgcgagccgccagcggtgggacccatcgacgacttcccggggcgacaggagcagccccgagagccagggcgagcgcccgttccaggtggccggaccgcccgccgcgtccgcgccgcgctccctgcaggcaacgggagacgcccccgcgcagcgcgagcgcctcagcgcggccgctcgctctccccctcgagggacaaacttttcccaaacccgatccgagcccttggaccaaactcgcctgcgccgagagccgtccgcgtagagcgctccgtctccggcgagatgtccgagcgcaaagaaggcagaggcaaagggaagggcaagaagaaggagcgaggctccggcaagaagccggagtccgcggcgggcagccagagcccagccttgcctccccgattgaaagagatgaaaagccaggaatcggctgcaggttccaaactagtccttcggtgtgaaaccagttctgaatactcctctctcagattcaagtggttcaagaatgggaatgaattgaatcgaaaaaacaaaccacaaaatatcaagatacaaaaaaagccagggaagtcagaacttcgcattaacaaagcatcactggctgattctggagagtatatgtgcaaagtgatcagcaaattaggaaatgacagtgcctctgccaatatcaccatcgtggaatcaaacgctacatctacatccaccactgggacaagccatcttgtaaaatgtgcggagaaggagaaaactttctgtgtgaatggaggggagtgcttcatggtgaaagacctttcaaacccctcgagatacttgtgcaagtgcccaaatgagtttactggtgatcgctgccaaaactacgtaatggccagcttctacagtacgtccactccctttctgtctctgcctgaataggagcatgctcagttggtgctgctttcttgttgctgcatctcccctcagattccacctagagctagatgtgtcttaccagatctaatattgactgcctctgcctgtcgcatgagaacattaacaaaagcaattgtattacttcctctgttcgcgactagttggctctgagatactaataggtgtgtgaggctccggatgtttctggaattgatattgaatgatgtgatacaaattgatagtcaatatcaagcagtgaaatatgataataaaggcatttcaaagtctcacttttattgataaaataaaaatcattctactgaacagtccatcttctttatacaatgaccacatcctgaaaagggtgttgctaagctgtaaccgatatgcacttgaaatgatggtaagttaattttgattcagaatgtgttatttgtcacaaataaacataataaaaggagttcagatgtttttcttcattaaccaaaaaaaaaaaaaaa

SEQ ID NO: 4834 - DNA, 1592 bp, Homo sapiens
gaggccaggggagggtgcgaaggaggcgcctgcctccaacctgcgggcgggaggtgggtggctgcggggcaattgaaaaagagccggcgaggagttccccgaaacttgttggaactccgggctcgcgcggaggccaggagctgagcggcggcggctgccggacgatgggagcgtgagcaggacggtgataacctctccccgatcgggttgcgagggcgccgggcagaggccaggacgcgagccgccagcggtgggacccatcgacgacttcccggggcgacaggagcagccccgagagccagggcgagcgcccgttccaggtggccggaccgcccgccgcgtccgcgccgcgctccctgcaggcaacgggagacgcccccgcgcagcgcgagcgcctcagcgcggccgctcgctctccccctcgagggacaaacttttcccaaacccgatccgagcccttggaccaaactcgcctgcgccgagagccgtccgcgtagagcgctccgtctccggcgagatgtccgagcgcaaagaaggcagaggcaaagggaagggcaagaagaaggagcgaggctccggcaagaagccggagtccgcggcgggcagccagagcccagccttgcctccccgattgaaagagatgaaaagccaggaatcggctgcaggttccaaactagtccttcggtgtgaaaccagttctgaatactcctctctcagattcaagtggttcaagaatgggaatgaattgaatcgaaaaaacaaaccacaaaatatcaagatacaaaaaaagccagggaagtcagaacttcgcattaacaaagcatcactggctgattctggagagtatatgtgcaaagtgatcagcaaattaggaaatgacagtgcctctgccaatatcaccatcgtggaatcaaacgctacatctacatccaccactgggacaagccatcttgtaaaatgtgcggagaaggagaaaactttctgtgtgaatggaggggagtgcttcatggtgaaagacctttcaaacccctcgagatacttgtgcaagtaagaaaagaaatcctgtgtgtcgcttatgtctataactccttgtttcagatgattctatgtctcatgatgtattgttgctttttttccaattttgttgcatcatgttgaataatgctgttttatatgtagagtgttttaaaacattcacaccattcgtcatcactcctctgtcatatgcagaattgttttttgctcttttcaatgtgtgtgaggtgttttttgtttttgtttttgttttttgccatgttatttatagtgttgctttccttgtggtttttcttgttgttattcagaaaagatgtgcagatatcacagaggcctataacttttggtatctacttctacatccaatgtatgaattaagctgtaagataatgttgctttcttatcccagtgatcacctgccaaatgaataagacaacaaagagaagcagaagggcagaagattatttactgacatatatctattacacttgggattgtcttactgttgcataactattttttaaacggagtttagttttatattgctagtaaaaaaa

SEQ ID NO: 4835 - DNA, 2377 bp, Homo sapiens
gaggccaggggagggtgcgaaggaggcgcctgcctccaacctgcgggcgggaggtgggtggctgcggggcaattgaaaaagagccggcgaggagttccccgaaacttgttggaactccgggctcgcgcggaggccaggagctgagcggcggcggctgccggacgatgggagcgtgagcaggacggtgataacctctccccgatcgggttgcgagggcgccgggcagaggccaggacgcgagccgccagcggtgggacccatcgacgacttcccggggcgacaggagcagccccgagagccagggcgagcgcccgttccaggtggccggaccgcccgccgcgtccgcgccgcgctccctgcaggcaacgggagacgcccccgcgcagcgcgagcgcctcagcgcggccgctcgctctccccctcgagggacaaacttttcccaaacccgatccgagcccttggaccaaactcgcctgcgccgagagccgtccgcgtagagcgctccgtctccggcgagatgtccgagcgcaaagaaggcagaggcaaagggaagggcaagaagaaggagcgaggctccggcaagaagccggagtccgcggcgggcagccagagcccagccttgcctccccgattgaaagagatgaaaagccaggaatcggctgcaggttccaaactagtccttcggtgtgaaaccagttctgaatactcctctctcagattcaagtggttcaagaatgggaatgaattgaatcgaaaaaacaaaccacaaaatatcaagatacaaaaaaagccagggaagtcagaacttcgcattaacaaagcatcactggctgattctggagagtatatgtgcaaagtgatcagcaaattaggaaatgacagtgcctctgccaatatcaccatcgtggaatcaaacgagatcatcactggtatgccagcctcaactgaaggagcatatgtgtcttcagagtctcccattagaatatcagtatccacagaaggagcaaatacttcttcatctacatctacatccaccactgggacaagccatcttgtaaaatgtgcggagaaggagaaaactttctgtgtgaatggaggggagtgcttcatggtgaaagacctttcaaacccctcgagatacttgtgcaagtgcccaaatgagtttactggtgatcgctgccaaaactacgtaatggccagcttctacaaggcggaggagctgtaccagaagagagtgctgaccataaccggcatctgcatcgccctccttgtggtcggcatcatgtgtgtggtggcctactgcaaaaccaagaaacagcggaaaaagctgcatgaccgtcttcggcagagccttcggtctgaacgaaacaatatgatgaacattgccaatgggcctcaccatcctaacccaccccccgagaatgtccagctggtgaatcaatacgtatctaaaaacgtcatctccagtgagcatattgttgagagagaagcagagacatccttttccaccagtcactatacttccacagcccatcactccactactgtcacccagactcctagccacagctggagcaacggacacactgaaagcatcctttccgaaagccactctgtaatcgtgatgtcatccgtagaaaacagtaggcacagcagcccaactgggggcccaagaggacgtcttaatggcacaggaggccctcgtgaatgtaacagcttcctcaggcatgccagagaaacccctgattcctaccgagactctcctcatagtgaaaggtaaaaccgaagggcaaagctactgcagaggagaaactcagtcagagaatccctgtgagcacctgcggtctcacctcaggaaatctactctaatcagaataaggggcggcagttacctgttctaggagtgctcctagttgatgaagtcatctctttgtttgacggaacttatttcttctgagcttctctcgtcgtcccagtgactgacaggcaacagactcttaaagagctgggatgctttgatgcggaaggtgcagcacatggagtttccagctctggccatgggctcagacccactcggggtctcagtgtcctcagttgtaacattagagagatggcatcaatgcttgataaggacccttctataattccaattgccagttatccaaactctgattcggtggtcgagctggcctcgtgttcttatctgctaaccctgtcttaccttccagcctcagttaagtcaaatcaagggctatgtcattgctgaatgtcatggggggcaactgcttgccctccaccctatagtatctattttatgaaattccaagaagggatgaataaataaatctcttggatgctgaaaaaaaaaaaaaaaaaa

SEQ ID NO: 4836 - DNA, 2105 bp, Homo sapiens; identical to SEQ ID NO: 1698

SEQ ID NO: 4837 - DNA, 1955 bp, Homo sapiens
gtctgtgacaagcagggaacaaggcaacggacggcgcaacccagccccggctgacggacgctggcgactcagacatggacagtagctgccacaacgcgactaccaaaatgttagcgactgctccagctcggggcaacatgatgagcacgtccaaacccttggctttctccattgaacgaatcatggcgcgcaccccagagcccaaggccctgccagtcccccacttcctgcagggagccttacccaagggggaacccaagcactctctgcatctcaactcgtcgatcccctgcatgatccccttcgtgcctgtggcctacgacacgagccccaaggcaggagtgacgggctccgagccgcggaaggccagtctggaggccccggcggcgcccgcggcggtgccctcggctcccgcattcagctgcagcgacctgctcaactgcgcactgagtctcaagggcgacctggcccgcgacgcgctgccgctgcagcagtacaagctgccaaaaacgtatttagccgaaaggaataaactggtggtcccggcggtggagaaatacccttctggagtagctttcaaagacctgtcccaggctcagctgcagcattacatgaaagaaagcgcccagcttctgtcggaaaaaatcgcgttcaaaacctcggatttcagccgaggctctcctaatgccaagcccaaagttttcacttgcgaagtgtgtggaaaggtctttaatgcgcactataacttaacccgtcacatgccagtgcacacaggagccagacccttcgtttgcaaagtgtgcggaaaaggtttcaggcaagcaagcaccctgtgcaggcacaagatcattcacacgcaggaaaaacctcacaaatgtaaccagtgtggcaaagcatttaatagaagttccactttaaacactcatacccgaatacacgcgggctacaaaccgtttgtgtgtgaattctgtggcaaagggtttcatcaaaaagggaattacaaaaaccacaagttgacccacagcggggagaagcagttcaagtgcaatatctgcaacaaggctttccaccaggtttacaacctcaccttccacatgcacacccacaacgacaagaagcctttcacctgccccacgtgcggcaagggtttctgcaggaactttgacctcaagaagcatgtccgcaagctgcacgacagcagcctggggctggcccgcacgccagctggcgaaccaggcactgaaccgccgcccccgctaccgcagcagccgccgatgacgctgcctcctctgcagccgccgctgccaaccccggggcccctgcagcccgggctccaccagggccaccagtgatcgaggctaagggtcctcccagcctcagccgtgcccccacgctgaggcagcggcagactagagctcctggtccgagttcgtctgcagaccccagggcatgttgggccccacacttcagggccgaccagaagcctctgcatcccctggcctttcgcctcttgcatgcacctgctaaatggttttgtgtattatattctatataggcactaacaattatgaaaaatttggagggttttgcttgttttctgtttttctttttctttttttttaatttggaaagacttttcatcttgggtggagagatggtgtttattttgttttgttttgtttaaacaaatttctgctatatttattgagatctgtattattctacccgggaatgctgcatcattttaattttattattgtatatatttccattgtgttgattctccggtctcaagatgtctgctggatgttgatcatttcctctttccctgaagtaacaaaacactgtgtgtatgtcatatatacacgcatagatgtgtgcgcccataggggtacattccacattcgtgagcacacacccatacacattagataagggtggttcattatggatga

SEQ ID NO: 4838 - DNA, 3030 bp, Homo sapiens
gcagcgctggacgcggctagagctggggctgccgcgccctccacctccttctccaaaggcctccccggacccctggctcgggcccagcctgcgactccgccatgccctggaggaggcgcaggaaccgggtgagtgccctggagggcggccgggaggaagaggcgcccccggaggctgccgctgtgcctccggcgctgttaacgtccccgcagcagacggaggcggcggccgagcggattctgctccggggcatcttcgagatcgggagggacagttgtgacgtggtgctgagcgagcgagcactgcggtggcggcccattcagcccgagcgcccggcgggtgattctaagtatgacttgctatgtaaagaagaatttattgaactcaaagacatattctctgtgaaactgaaacggcgttgttctgttaaacagcagagaagtggtactttattaggtatcacactcttcatctgcttgaaaaaggaacaaaataaactaaagaattctacacttgatcttattaatttaagtgaagaccactgtgacatatggtttagacagttcaagaaaatattggcagtgttgtctgtgttggtggagatggatctgctagcgaagtagcccatgctttgcttctgagagctcagaagaatgctgggatggaaacagaccgaatcctgactcctgtcagagcacagcttccacttggcttaataccagcaggatctaccaatgtattggcacattctcttcatggagttcctcatgtgataactgcaacattgcacattataatggggcatgtacagctggtcgacgtctgcaccttcagcaccgctggcaagcttcttcgctttgggttctcagccatgtttggctttggtggaagaactttggctctggcagaaaaatatcgatggatgtcccctaaccaacggagagattttgctgttgttaaggcactggcaaaacttaaggcagaagactgtgaaatatcatttttaccatttaacagctctgatgatgtgcaagaaaggagggcacagggatctcccaaatctgactgtaatgatcaatggcaaatgatccagggtcagttcttgaatgtcagcattatggcaattccttgcctgtgttcagtggcacctagaggcttggcacctaataccagattaaataatggaagtatggctcttataattgcccgaaacacttctcggccagaatttataaaacacctgaaaagatatgccagtgtaaaaaatcagttcaattttccatttgttgagacttacactgttgaggaagtaaaagttcatccaaggaataatactggtggatataatccagaggaggaggaggatgaaactgcttcagaaaattgtttcccttggaatgtagatggtgacttaatggaagttgcatcagaggtccatattagattgcatccaagacttatcagtctttatggaggaagcatggaagaaatgattccaaagtaacatgtaattgtttctaaaagaaatgtacaaactagaattttaatataaagaaatgtggccatgctttaaacctgtggtccccaccctttttgggaccagtttcatggaagacaatttttccgtggatgggggaatggtttcaggatgaactgttccacctcagatcatcaggcattagattctcttgaggaacatggcactctagatccctcacataccagttcaccatatggttcgcacttctatgagaatctaatgctgctgctgatctgacagggggaggaactcagtaatgctccattgctctaacctcctgctgtgtggccaaacggatatcctaatagaaattgatgttactaacaattagcctctagggctttaaaagtcaagatgaaatatcaattcaaattctgtttttagatatcaattcaaattcttttttttacaatgtgtttattggacacacaaaaaaactttgcaaccatcataatacatcaatatttaacctagataattctgaaataatttggattctttcatttttcaggatttgagctcatcaattatgttaaatttcctatattctgttacaaatataatacagatttcataagtctgccttgattcactgctccctaatccagagcagttaaatttcaaaatcacatagttatatagcctacctgccaaaaaagaataacccatccctgtcttcttaaagtggtagggttttaaaattcatgatacaagtaacaaagtaagttgataacaaatactattttgaactgggcaaaatctagcccaatatgtaattgtgttccccttgtatctgagaggcctgtgttggacaaccatagtactctgctttcactgtgctcagataacctgaaatatatagttgtttctgagtagttctgagtaggaaagaaccaaatgtaaatttccttagagaccatcctggagaagacagttctaaatcggggcttgatttttcatctatgatcctagatgttctcctgaaagaatgactagcctttttataacgatacaaagttttttaaaaatacataaatgtcataaagtttattcctgtgtatacacactctgggttcaggaggttttgtgcttacatttcactactcaaatgccttcgcaaatctcagaacattcctcaccatcactgcaggcctgtgaacagataactttcatcaattaggatggctggctagtggcagggacttcatataaagaaatctttcccagaattgtttttccacattgccttctaatttgatcactccctataacagatgttcaaaattcggccacagctctcttatgaaggcagagtcagataaaatgatattctgcaattatctagatcataagcataaaataaatattacaaaaatgattgtatttaaagaaattttttaaaatccagaaagtcatttaaaatagaacctcatatagtatgaacaaactataaaaatattttacatttcatgaaaaaaaaaaaaaaaaaa

SEQ ID NO: 4839 - DNA, 3162 bp, Homo sapiens
gcagcgctggacgcggctagagctggggctgccgcgccctccacctccttctccaaaggcctccccggacccctggctcgggcccagcctgcgactccgccatgccctggaggaggcgcaggaaccgggtgagtgccctggagggcggccgggaggaagaggcgcccccggaggctgccgctgtgcctccggcgctgttaacgtccccgcagcagacggaggcggcggccgagcggattctgctccggggcatcttcgagatcgggagggacagttgtgacgtggtgctgagcgagcgagcactgcggtggcggcccattcagcccgagcgcccggcgggtgattctaagtatgacttgctatgtaaagaagaatttattgaactcaaagacatattctctgtgaaactgaaacggcgttgttctgttaaacagcagagaagtggtactttattaggtatcacactcttcatctgcttgaaaaaggaacaaaataaactaaagaattctacacttgatcttattaatttaagtgaagaccactgtgacatatggtttagacagttcaagaaaatattggcaggctttccaaacagaccgaagtcattaaaaatactccttaacccccaaagtcacaaaaaagaagctacccaggtttattatgagaaggttgaacctctgttgaagcttgcaggaataaaaactgatgtaacaatgttgtctgtgttggtggagatggatctgctagcgaagtagcccatgctttgcttctgagagctcagaagaatgctgggatggaaacagaccgaatcctgactcctgtcagagcacagcttccacttggcttaataccagcaggatctaccaatgtattggcacattctcttcatggagttcctcatgtgataactgcaacattgcacattataatggggcatgtacagctggtcgacgtctgcaccttcagcaccgctggcaagcttcttcgctttgggttctcagccatgtttggctttggtggaagaactttggctctggcagaaaaatatcgatggatgtcccctaaccaacggagagattttgctgttgttaaggcactggcaaaacttaaggcagaagactgtgaaatatcatttttaccatttaacagctctgatgatgtgcaagaaaggagggcacagggatctcccaaatctgactgtaatgatcaatggcaaatgatccagggtcagttcttgaatgtcagcattatggcaattccttgcctgtgttcagtggcacctagaggcttggcacctaataccagattaaataatggaagtatggctcttataattgcccgaaacacttctcggccagaatttataaaacacctgaaaagatatgccagtgtaaaaaatcagttcaattttccatttgttgagacttacactgttgaggaagtaaaagttcatccaaggaataatactggtggatataatccagaggaggaggaggatgaaactgcttcagaaaattgtttcccttggaatgtagatggtgacttaatggaagttgcatcagaggtccatattagattgcatccaagacttatcagtctttatggaggaagcatggaagaaatgattccaaagtaacatgtaattgtttctaaaagaaatgtacaaactagaattttaatataaagaaatgtggccatgctttaaacctgtggtccccaccctttttgggaccagtttcatggaagacaatttttccgtggatgggggaatggtttcaggatgaactgttccacctcagatcatcaggcattagattctcttgaggaacatggcactctagatccctcacataccagttcaccatatggttcgcacttctatgagaatctaatgctgctgctgatctgacagggggaggaactcagtaatgctccattgctctaacctcctgctgtgtggccaaacggatatcctaatagaaattgatgttactaacaattagcctctagggctttaaaagtcaagatgaaatatcaattcaaattctgtttttagatatcaattcaaattcttttttttacaatgtgtttattggacacacaaaaaaactttgcaaccatcataatacatcaatatttaacctagataattctgaaataatttggattctttcatttttcaggatttgagctcatcaattatgttaaatttcctatattctgttacaaatataatacagatttcataagtctgccttgattcactgctccctaatccagagcagttaaatttcaaaatcacatagttatatagcctacctgccaaaaaagaataacccatccctgtcttcttaaagtggtagggttttaaaattcatgatacaagtaacaaagtaagttgataacaaatactattttgaactgggcaaaatctagcccaatatgtaattgtgttccccttgtatctgagaggcctgtgttggacaaccatagtactctgctttcactgtgctcagataacctgaaatatatagttgtttctgagtagttctgagtaggaaagaaccaaatgtaaatttccttagagaccatcctggagaagacagttctaaatcggggcttgatttttcatctatgatcctagatgttctcctgaaagaatgactagcctttttataacgatacaaagttttttaaaaatacataaatgtcataaagtttattcctgtgtatacacactctgggttcaggaggttttgtgcttacatttcactactcaaatgccttcgcaaatctcagaacattcctcaccatcactgcaggcctgtgaacagataactttcatcaattaggatggctggctagtggcagggacttcatataaagaaatctttcccagaattgtttttccacattgccttctaatttgatcactccctataacagatgttcaaaattcggccacagctctcttatgaaggcagagtcagataaaatgatattctgcaattatctagatcataagcataaaataaatattacaaaaatgattgtatttaaagaaattttttaaaatccagaaagtcatttaaaatagaacctcatatagtatgaacaaactataaaaatattttacatttcatgaaaaaaaaaaaaaaaaaa

SEQ ID NO: 4840 - DNA, 3226 bp, Homo sapiens
gcagcgctggacgcggctagagctggggctgccgcgccctccacctccttctccaaaggcctccccggacccctggctcgggcccagcctgcgactccgccatgccctggaggaggcgcaggaaccgggtgagtgccctggagggcggccgggaggaagaggcgcccccggaggctgccgctgtgcctccggcgctgttaacgtccccgcagcagacggaggcggcggccgagcggattctgctccggggcatcttcgagatcgggagggacagttgtgacgtggtgctgagcgagcgagcactgcggtggcggcccattcagcccgagcgcccggcgggtgattctaagtatgacttgctatgtaaagaagaatttattgaactcaaagacatattctctgtgaaactgaaacggcgttgttctgttaaacagcagagaagtggtactttattaggtatcacactcttcatctgcttgaaaaaggaacaaaataaactaaagaattctacacttgatcttattaatttaagtgaagaccactgtgacatatggtttagacagttcaagaaaatattggcaggctttccaaacagaccgaagtcattaaaaatactccttaacccccaaagtcacaaaaaagaagctacccaggtttattatgagaaggttgaacctctgttgaagcttgcaggaataaaaactgatgtaacaataatggaatatgaagggcacgctctgtcactgcttaaggaatgtgaactccagggatttgatggtgttgtctgtgttggtggagatggatctgctagcgaagtagcccatgctttgcttctgagagctcagaagaatgctgggatggaaacagaccgaatcctgactcctgtcagagcacagcttccacttggcttaataccagcaggatctaccaatgtattggcacattctcttcatggagttcctcatgtgataactgcaacattgcacattataatggggcatgtacagctggtcgacgtctgcaccttcagcaccgctggcaagcttcttcgctttgggttctcagccatgtttggctttggtggaagaactttggctctggcagaaaaatatcgatggatgtcccctaaccaacggagagattttgctgttgttaaggcactggcaaaacttaaggcagaagactgtgaaatatcatttttaccatttaacagctctgatgatgtgcaagaaaggagggcacagggatctcccaaatctgactgtaatgatcaatggcaaatgatccagggtcagttcttgaatgtcagcattatggcaattccttgcctgtgttcagtggcacctagaggcttggcacctaataccagattaaataatggaagtatggctcttataattgcccgaaacacttctcggccagaatttataaaacacctgaaaagatatgccagtgtaaaaaatcagttcaattttccatttgttgagacttacactgttgaggaagtaaaagttcatccaaggaataatactggtggatataatccagaggaggaggaggatgaaactgcttcagaaaattgtttcccttggaatgtagatggtgacttaatggaagttgcatcagaggtccatattagattgcatccaagacttatcagtctttatggaggaagcatggaagaaatgattccaaagtaacatgtaattgtttctaaaagaaatgtacaaactagaattttaatataaagaaatgtggccatgctttaaacctgtggtccccaccctttttgggaccagtttcatggaagacaatttttccgtggatgggggaatggtttcaggatgaactgttccacctcagatcatcaggcattagattctcttgaggaacatggcactctagatccctcacataccagttcaccatatggttcgcacttctatgagaatctaatgctgctgctgatctgacagggggaggaactcagtaatgctccattgctctaacctcctgctgtgtggccaaacggatatcctaatagaaattgatgttactaacaattagcctctagggctttaaaagtcaagatgaaatatcaattcaaattctgtttttagatatcaattcaaattcttttttttacaatgtgtttattggacacacaaaaaaactttgcaaccatcataatacatcaatatttaacctagataattctgaaataatttggattctttcatttttcaggatttgagctcatcaattatgttaaatttcctatattctgttacaaatataatacagatttcataagtctgccttgattcactgctccctaatccagagcagttaaatttcaaaatcacatagttatatagcctacctgccaaaaaagaataacccatccctgtcttcttaaagtggtagggttttaaaattcatgatacaagtaacaaagtaagttgataacaaatactattttgaactgggcaaaatctagcccaatatgtaattgtgttccccttgtatctgagaggcctgtgttggacaaccatagtactctgctttcactgtgctcagataacctgaaatatatagttgtttctgagtagttctgagtaggaaagaaccaaatgtaaatttccttagagaccatcctggagaagacagttctaaatcggggcttgatttttcatctatgatcctagatgttctcctgaaagaatgactagcctttttataacgatacaaagttttttaaaaatacataaatgtcataaagtttattcctgtgtatacacactctgggttcaggaggttttgtgcttacatttcactactcaaatgccttcgcaaatctcagaacattcctcaccatcactgcaggcctgtgaacagataactttcatcaattaggatggctggctagtggcagggacttcatataaagaaatctttcccagaattgtttttccacattgccttctaatttgatcactccctataacagatgttcaaaattcggccacagctctcttatgaaggcagagtcagataaaatgatattctgcaattatctagatcataagcataaaataaatattacaaaaatgattgtatttaaagaaattttttaaaatccagaaagtcatttaaaatagaacctcatatagtatgaacaaactataaaaatattttacatttcatgaaaaaaaaaaaaaaaaaa

SEQ ID NO: 4841 - DNA, 3304 bp, Homo sapiens
gcagcgctggacgcggctagagctggggctgccgcgccctccacctccttctccaaaggcctccccggacccctggctcgggcccagcctgcgactccgccatgccctggaggaggcgcaggaaccgggtgagtgccctggagggcggccgggaggaagaggcgcccccggaggctgccgctgtgcctccggcgctgttaacgtccccgcagcagacggaggcggcggccgagcggattctgctccggggcatcttcgagatcgggagggacagttgtgacgtggtgctgagcgagcgagcactgcggtggcggcccattcagcccgagcgcccggcgggtgattctaagtatgacttgctatgtaaagaagaatttattgaactcaaagacatattctctgtgaaactgaaacggcgttgttctgttaaacagcagagaagtggtactttattaggtatcacactcttcatctgcttgaaaaaggaacaaaataaactaaagaattctacacttgatcttattaatttaagtgaagaccactgtgacatatggtttagacagttcaagaaaatattggcaggctttccaaacagaccgaagtcattaaaaatactccttaacccccaaagtcacaaaaaagaagctacccaggtttattatgagaaggttgaacctctgttgaagcttgcaggaataaaaactgatgtaacaataatggaatatgaagggcacgctctgtcactgcttaaggaatgtgaactccagggatttgatggtgggcatcggaaaccattgttcgcaatacattggagtgtacagagattgttcactggcatgcaaacgttagaaccaagtgttgtctgtgttggtggagatggatctgctagcgaagtagcccatgctttgcttctgagagctcagaagaatgctgggatggaaacagaccgaatcctgactcctgtcagagcacagcttccacttggcttaataccagcaggatctaccaatgtattggcacattctcttcatggagttcctcatgtgataactgcaacattgcacattataatggggcatgtacagctggtcgacgtctgcaccttcagcaccgctggcaagcttcttcgctttgggttctcagccatgtttggctttggtggaagaactttggctctggcagaaaaatatcgatggatgtcccctaaccaacggagagattttgctgttgttaaggcactggcaaaacttaaggcagaagactgtgaaatatcatttttaccatttaacagctctgatgatgtgcaagaaaggagggcacagggatctcccaaatctgactgtaatgatcaatggcaaatgatccagggtcagttcttgaatgtcagcattatggcaattccttgcctgtgttcagtggcacctagaggcttggcacctaataccagattaaataatggaagtatggctcttataattgcccgaaacacttctcggccagaatttataaaacacctgaaaagatatgccagtgtaaaaaatcagttcaattttccatttgttgagacttacactgttgaggaagtaaaagttcatccaaggaataatactggtggatataatccagaggaggaggaggatgaaactgcttcagaaaattgtttcccttggaatgtagatggtgacttaatggaagttgcatcagaggtccatattagattgcatccaagacttatcagtctttatggaggaagcatggaagaaatgattccaaagtaacatgtaattgtttctaaaagaaatgtacaaactagaattttaatataaagaaatgtggccatgctttaaacctgtggtccccaccctttttgggaccagtttcatggaagacaatttttccgtggatgggggaatggtttcaggatgaactgttccacctcagatcatcaggcattagattctcttgaggaacatggcactctagatccctcacataccagttcaccatatggttcgcacttctatgagaatctaatgctgctgctgatctgacagggggaggaactcagtaatgctccattgctctaacctcctgctgtgtggccaaacggatatcctaatagaaattgatgttactaacaattagcctctagggctttaaaagtcaagatgaaatatcaattcaaattctgtttttagatatcaattcaaattcttttttttacaatgtgtttattggacacacaaaaaaactttgcaaccatcataatacatcaatatttaacctagataattctgaaataatttggattctttcatttttcaggatttgagctcatcaattatgttaaatttcctatattctgttacaaatataatacagatttcataagtctgccttgattcactgctccctaatccagagcagttaaatttcaaaatcacatagttatatagcctacctgccaaaaaagaataacccatccctgtcttcttaaagtggtagggttttaaaattcatgatacaagtaacaaagtaagttgataacaaatactattttgaactgggcaaaatctagcccaatatgtaattgtgttccccttgtatctgagaggcctgtgttggacaaccatagtactctgctttcactgtgctcagataacctgaaatatatagttgtttctgagtagttctgagtaggaaagaaccaaatgtaaatttccttagagaccatcctggagaagacagttctaaatcggggcttgatttttcatctatgatcctagatgttctcctgaaagaatgactagcctttttataacgatacaaagttttttaaaaatacataaatgtcataaagtttattcctgtgtatacacactctgggttcaggaggttttgtgcttacatttcactactcaaatgccttcgcaaatctcagaacattcctcaccatcactgcaggcctgtgaacagataactttcatcaattaggatggctggctagtggcagggacttcatataaagaaatctttcccagaattgtttttccacattgccttctaatttgatcactccctataacagatgttcaaaattcggccacagctctcttatgaaggcagagtcagataaaatgatattctgcaattatctagatcataagcataaaataaatattacaaaaatgattgtatttaaagaaattttttaaaatccagaaagtcatttaaaatagaacctcatatagtatgaacaaactataaaaatattttacatttcatgaaaaaaaaaaaaaaaaaa

SEQ ID NO: 4842 - DNA, 2887 bp, Homo sapiens
gcagcgctggacgcggctagagctggggctgccgcgccctccacctccttctccaaaggcctccccggacccctggctcgggcccagcctgcgactccgccatgccctggaggaggcgcaggaaccgggtgagtgccctggagggcggccgggaggaagaggcgcccccggaggctgccgctgtgcctccggcgctgttaacgtccccgcagcagacggaggcggcggccgagcggattctgctccggggcatcttcgagatcgggagggacagttgtgacgtggtgctgagcgagcgagcactgcggtggcggcccattcagcccgagcgcccggcgggtgattctaagtatgacttgctatgtaaagaagaatttattgaactcaaagacatattctctgtgaaactgaaacggcgttgttctgttaaacagcagagaagtggtactttattaggtatcacactcttcatctgcttgaaaaaggaacaaaataaactaaagaattctacacttgatcttattaatttaagtgaagaccactgtgacatatggtttagacagttcaagaaaatattggcaggatctaccaatgtattggcacattctcttcatggagttcctcatgtgataactgcaacattgcacattataatggggcatgtacagctggtcgacgtctgcaccttcagcaccgctggcaagcttcttcgctttgggttctcagccatgtttggctttggtggaagaactttggctctggcagaaaaatatcgatggatgtcccctaaccaacggagagattttgctgttgttaaggcactggcaaaacttaaggcagaagactgtgaaatatcatttttaccatttaacagctctgatgatgtgcaagaaaggagggcacagggatctcccaaatctgactgtaatgatcaatggcaaatgatccagggtcagttcttgaatgtcagcattatggcaattccttgcctgtgttcagtggcacctagaggcttggcacctaataccagattaaataatggaagtatggctcttataattgcccgaaacacttctcggccagaatttataaaacacctgaaaagatatgccagtgtaaaaaatcagttcaattttccatttgttgagacttacactgttgaggaagtaaaagttcatccaaggaataatactggtggatataatccagaggaggaggaggatgaaactgcttcagaaaattgtttcccttggaatgtagatggtgacttaatggaagttgcatcagaggtccatattagattgcatccaagacttatcagtctttatggaggaagcatggaagaaatgattccaaagtaacatgtaattgtttctaaaagaaatgtacaaactagaattttaatataaagaaatgtggccatgctttaaacctgtggtccccaccctttttgggaccagtttcatggaagacaatttttccgtggatgggggaatggtttcaggatgaactgttccacctcagatcatcaggcattagattctcttgaggaacatggcactctagatccctcacataccagttcaccatatggttcgcacttctatgagaatctaatgctgctgctgatctgacagggggaggaactcagtaatgctccattgctctaacctcctgctgtgtggccaaacggatatcctaatagaaattgatgttactaacaattagcctctagggctttaaaagtcaagatgaaatatcaattcaaattctgtttttagatatcaattcaaattcttttttttacaatgtgtttattggacacacaaaaaaactttgcaaccatcataatacatcaatatttaacctagataattctgaaataatttggattctttcatttttcaggatttgagctcatcaattatgttaaatttcctatattctgttacaaatataatacagatttcataagtctgccttgattcactgctccctaatccagagcagttaaatttcaaaatcacatagttatatagcctacctgccaaaaaagaataacccatccctgtcttcttaaagtggtagggttttaaaattcatgatacaagtaacaaagtaagttgataacaaatactattttgaactgggcaaaatctagcccaatatgtaattgtgttccccttgtatctgagaggcctgtgttggacaaccatagtactctgctttcactgtgctcagataacctgaaatatatagttgtttctgagtagttctgagtaggaaagaaccaaatgtaaatttccttagagaccatcctggagaagacagttctaaatcggggcttgatttttcatctatgatcctagatgttctcctgaaagaatgactagcctttttataacgatacaaagttttttaaaaatacataaatgtcataaagtttattcctgtgtatacacactctgggttcaggaggttttgtgcttacatttcactactcaaatgccttcgcaaatctcagaacattcctcaccatcactgcaggcctgtgaacagataactttcatcaattaggatggctggctagtggcagggacttcatataaagaaatctttcccagaattgtttttccacattgccttctaatttgatcactccctataacagatgttcaaaattcggccacagctctcttatgaaggcagagtcagataaaatgatattctgcaattatctagatcataagcataaaataaatattacaaaaatgattgtatttaaagaaattttttaaaatccagaaagtcatttaaaatagaacctcatatagtatgaacaaactataaaaatattttacatttcatgaaaaaaaaaaaaaaaaaa

SEQ ID NO: 4843 - DNA, 3019 bp, Homo sapiens
gcagcgctggacgcggctagagctggggctgccgcgccctccacctccttctccaaaggcctccccggacccctggctcgggcccagcctgcgactccgccatgccctggaggaggcgcaggaaccgggtgagtgccctggagggcggccgggaggaagaggcgcccccggaggctgccgctgtgcctccggcgctgttaacgtccccgcagcagacggaggcggcggccgagcggattctgctccggggcatcttcgagatcgggagggacagttgtgacgtggtgctgagcgagcgagcactgcggtggcggcccattcagcccgagcgcccggcgggtgattctaagtatgacttgctatgtaaagaagaatttattgaactcaaagacatattctctgtgaaactgaaacggcgttgttctgttaaacagcagagaagtggtactttattaggtatcacactcttcatctgcttgaaaaaggaacaaaataaactaaagaattctacacttgatcttattaatttaagtgaagaccactgtgacatatggtttagacagttcaagaaaatattggcaggctttccaaacagaccgaagtcattaaaaatactccttaacccccaaagtcacaaaaaagaagctacccaggtttattatgagaaggttgaacctctgttgaagcttgcaggaataaaaactgatgtaacaagatctaccaatgtattggcacattctcttcatggagttcctcatgtgataactgcaacattgcacattataatggggcatgtacagctggtcgacgtctgcaccttcagcaccgctggcaagcttcttcgctttgggttctcagccatgtttggctttggtggaagaactttggctctggcagaaaaatatcgatggatgtcccctaaccaacggagagattttgctgttgttaaggcactggcaaaacttaaggcagaagactgtgaaatatcatttttaccatttaacagctctgatgatgtgcaagaaaggagggcacagggatctcccaaatctgactgtaatgatcaatggcaaatgatccagggtcagttcttgaatgtcagcattatggcaattccttgcctgtgttcagtggcacctagaggcttggcacctaataccagattaaataatggaagtatggctcttataattgcccgaaacacttctcggccagaatttataaaacacctgaaaagatatgccagtgtaaaaaatcagttcaattttccatttgttgagacttacactgttgaggaagtaaaagttcatccaaggaataatactggtggatataatccagaggaggaggaggatgaaactgcttcagaaaattgtttcccttggaatgtagatggtgacttaatggaagttgcatcagaggtccatattagattgcatccaagacttatcagtctttatggaggaagcatggaagaaatgattccaaagtaacatgtaattgtttctaaaagaaatgtacaaactagaattttaatataaagaaatgtggccatgctttaaacctgtggtccccaccctttttgggaccagtttcatggaagacaatttttccgtggatgggggaatggtttcaggatgaactgttccacctcagatcatcaggcattagattctcttgaggaacatggcactctagatccctcacataccagttcaccatatggttcgcacttctatgagaatctaatgctgctgctgatctgacagggggaggaactcagtaatgctccattgctctaacctcctgctgtgtggccaaacggatatcctaatagaaattgatgttactaacaattagcctctagggctttaaaagtcaagatgaaatatcaattcaaattctgtttttagatatcaattcaaattcttttttttacaatgtgtttattggacacacaaaaaaactttgcaaccatcataatacatcaatatttaacctagataattctgaaataatttggattctttcatttttcaggatttgagctcatcaattatgttaaatttcctatattctgttacaaatataatacagatttcataagtctgccttgattcactgctccctaatccagagcagttaaatttcaaaatcacatagttatatagcctacctgccaaaaaagaataacccatccctgtcttcttaaagtggtagggttttaaaattcatgatacaagtaacaaagtaagttgataacaaatactattttgaactgggcaaaatctagcccaatatgtaattgtgttccccttgtatctgagaggcctgtgttggacaaccatagtactctgctttcactgtgctcagataacctgaaatatatagttgtttctgagtagttctgagtaggaaagaaccaaatgtaaatttccttagagaccatcctggagaagacagttctaaatcggggcttgatttttcatctatgatcctagatgttctcctgaaagaatgactagcctttttataacgatacaaagttttttaaaaatacataaatgtcataaagtttattcctgtgtatacacactctgggttcaggaggttttgtgcttacatttcactactcaaatgccttcgcaaatctcagaacattcctcaccatcactgcaggcctgtgaacagataactttcatcaattaggatggctggctagtggcagggacttcatataaagaaatctttcccagaattgtttttccacattgccttctaatttgatcactccctataacagatgttcaaaattcggccacagctctcttatgaaggcagagtcagataaaatgatattctgcaattatctagatcataagcataaaataaatattacaaaaatgattgtatttaaagaaattttttaaaatccagaaagtcatttaaaatagaacctcatatagtatgaacaaactataaaaatattttacatttcatgaaaaaaaaaaaaaaaaaa

SEQ ID NO: 4844 - DNA, 3172 bp, Homo sapiens
gcagcgctggacgcggctagagctggggctgccgcgccctccacctccttctccaaaggcctccccggacccctggctcgggcccagcctgcgactccgccatgccctggaggaggcgcaggaaccgggtgagtgccctggagggcggccgggaggaagaggcgcccccggaggctgccgctgtgcctccggcgctgttaacgtccccgcagcagacggaggcggcggccgagcggattctgctccggggcatcttcgagatcgggagggacagttgtgacgtggtgctgagcgagcgagcactgcggtggcggcccattcagcccgagcgcccggcgggtgattctaagtatgacttgctatgtaaagaagaatttattgaactcaaagacatattctctgtgaaactgaaacggcgttgttctgttaaacagcagagaagtggtactttattaggtatcacactcttcatctgcttgaaaaaggaacaaaataaactaaagaattctacacttgatcttattaatttaagtgaagaccactgtgacatatggtttagacagttcaagaaaatattggcagtaatggaatatgaagggcacgctctgtcactgcttaaggaatgtgaactccagggatttgatggtgggcatcggaaaccattgttcgcaatacattggagtgtacagagattgttcactggcatgcaaacgttagaaccaagtgttgtctgtgttggtggagatggatctgctagcgaagtagcccatgctttgcttctgagagctcagaagaatgctgggatggaaacagaccgaatcctgactcctgtcagagcacagcttccacttggcttaataccagcaggatctaccaatgtattggcacattctcttcatggagttcctcatgtgataactgcaacattgcacattataatggggcatgtacagctggtcgacgtctgcaccttcagcaccgctggcaagcttcttcgctttgggttctcagccatgtttggctttggtggaagaactttggctctggcagaaaaatatcgatggatgtcccctaaccaacggagagattttgctgttgttaaggcactggcaaaacttaaggcagaagactgtgaaatatcatttttaccatttaacagctctgatgatgtgcaagaaaggagggcacagggatctcccaaatctgactgtaatgatcaatggcaaatgatccagggtcagttcttgaatgtcagcattatggcaattccttgcctgtgttcagtggcacctagaggcttggcacctaataccagattaaataatggaagtatggctcttataattgcccgaaacacttctcggccagaatttataaaacacctgaaaagatatgccagtgtaaaaaatcagttcaattttccatttgttgagacttacactgttgaggaagtaaaagttcatccaaggaataatactggtggatataatccagaggaggaggaggatgaaactgcttcagaaaattgtttcccttggaatgtagatggtgacttaatggaagttgcatcagaggtccatattagattgcatccaagacttatcagtctttatggaggaagcatggaagaaatgattccaaagtaacatgtaattgtttctaaaagaaatgtacaaactagaattttaatataaagaaatgtggccatgctttaaacctgtggtccccaccctttttgggaccagtttcatggaagacaatttttccgtggatgggggaatggtttcaggatgaactgttccacctcagatcatcaggcattagattctcttgaggaacatggcactctagatccctcacataccagttcaccatatggttcgcacttctatgagaatctaatgctgctgctgatctgacagggggaggaactcagtaatgctccattgctctaacctcctgctgtgtggccaaacggatatcctaatagaaattgatgttactaacaattagcctctagggctttaaaagtcaagatgaaatatcaattcaaattctgtttttagatatcaattcaaattcttttttttacaatgtgtttattggacacacaaaaaaactttgcaaccatcataatacatcaatatttaacctagataattctgaaataatttggattctttcatttttcaggatttgagctcatcaattatgttaaatttcctatattctgttacaaatataatacagatttcataagtctgccttgattcactgctccctaatccagagcagttaaatttcaaaatcacatagttatatagcctacctgccaaaaaagaataacccatccctgtcttcttaaagtggtagggttttaaaattcatgatacaagtaacaaagtaagttgataacaaatactattttgaactgggcaaaatctagcccaatatgtaattgtgttccccttgtatctgagaggcctgtgttggacaaccatagtactctgctttcactgtgctcagataacctgaaatatatagttgtttctgagtagttctgagtaggaaagaaccaaatgtaaatttccttagagaccatcctggagaagacagttctaaatcggggcttgatttttcatctatgatcctagatgttctcctgaaagaatgactagcctttttataacgatacaaagttttttaaaaatacataaatgtcataaagtttattcctgtgtatacacactctgggttcaggaggttttgtgcttacatttcactactcaaatgccttcgcaaatctcagaacattcctcaccatcactgcaggcctgtgaacagataactttcatcaattaggatggctggctagtggcagggacttcatataaagaaatctttcccagaattgtttttccacattgccttctaatttgatcactccctataacagatgttcaaaattcggccacagctctcttatgaaggcagagtcagataaaatgatattctgcaattatctagatcataagcataaaataaatattacaaaaatgattgtatttaaagaaattttttaaaatccagaaagtcatttaaaatagaacctcatatagtatgaacaaactataaaaatattttacatttcatgaaaaaaaaaaaaaaaaaa

SEQ ID NO: 4845 - DNA, 4426 bp, Homo sapiens; identical to SEQ ID NO: 2388

SEQ ID NO: 4846 - DNA, 4524 bp, Homo sapiens
ttccttattcctgctccctccacaaacgcgtcctcatccaatccagtggaacccagccgggccaaaaggacacgagaactgcagtctggaccgtggtgggtttgtcttccagctgttgaccgagacagtctttcaatagcctcatctgctgttaaatgaaaggatttgagcaccccctccacgcctaacattctggtatgaggtgcctgcctcccggacatttcagccttcacatacagttagaccaacttgaaaccgaattctgccttgtctgtttattgctgtgggacctttgagaacctctctctagactccagttgcttctcttctccacctgtgaacttcctccaagaattgccaagctaccggtccattgcacgtaggagaacgactgtccattcccgggacaagcaaagcggaactttgctaaagccaaccgactcttacagctcccagctggaggacagaatcgctgaaaacctcagcagccattctcttcgaaattatgcactgaacatctctgagaagcggagactaagggacattcaagagacacaaatgaagtatctctccgaatgggaccagtggaagcggtatagcagcaagtcttggaagaggttcctagagaaggctcgagagatgacgacccacctggagctgtggcgggaggacatccgcagcatagaagggaaatttggcactgggattcagtcctatttctccttcttgagattcctggtgttgctgaatttggtgatatttctgatcatctttatgctggttttgctcccagtcttactcacgaaatacaagatcaccaacagcagcttcgtgctcattcctttcaaagacatggataaacaatgtacagtctatccagtaagcagttctggactcatttacttttacagttatatcatagacttgctttctggcactggtttcctggaggaaactagcctcttttacggacattacaccattgatggggtgaaatttcagaacttcacctatgatctgcccctggcgtatttgttaagcacaatcgcctccctggccctgagccttctttggatagtgaaaaggtcggtggaaggattcaaaatcaacctgattcggagtgaggagcactttcagagttactgcaacaagatatttgccggctgggacttctgcatcactaaccgcagcatggcggatctgaagcacagcagcttgcggtacgagctccgagcagatctggaggaagaaagaatgcggcagaaaatagcagaaaggacctcagaagaaacaatacgcatttactctttgagactgtttttgaactgtattgttctggctgttttaggggcatgcttttatgcaatatacgtagcaactgtcttctcgcaagagcacatgaaaaaggaaatcgacaagatggtttttggagagaacctcttcatattgtatctaccgtctattgtgatcacgctggccaattttatcaccccaatgatctttgccaagatcatccgctatgaggattattctccaggctttgagatccgtctgacaatccttaggtgtgtctttatgcggctggccaccatatgtgtcctggtgttcacgctgggctccaagatcacatcctgtgatgatgacacatgtgacctttgcggctacaaccagaaactctacccgtgctgggagacccaagttgggcaggaaatgtacaagctgatgatcttcgacttcatcatcatcttggctgtgacactcttcgtggattttcctagaaagctcctggtgacctactgttcctcttgcaagctgattcagtgctgggggcagcaggagtttgccattcctgataacgtcctggggatagtttacgggcaaaccatctgctggatcggagcctttttctcaccccttctccctgcaattgcaaccctgaaattcattatcatcttctatgtgaaagagtggagtctgctttacacctgcagaccctcccccaggccgttcagagcatccaattctaatttcttcttcctgttggtgttgttgatcgggctgtgtttggcaataatacctctgacaatcagcatatcacgcatcccttcctcgaaagcctgtgggccgttcaccaacttcaacaccacctgggaggtcatccccaagacggtgagcaccttccccagctcgctgcagtccttcatccatggtgtcacatccgaagcctttgcagttcctttcttcatgattatttgcctcatcatgttttacttcattgccttagctggagcacacaaacgggtggtcatccagctccgagagcagctatccctggaaagtcgtgacaagtgctacctaatccagaaactaacagaagcccaaagggacatgaggaactaactagactgagcgtgaagatggtgctgcctgttgcttctaagctgacctagtgattctgctgagcctacagagtctacctgggttttgagtggacatttaaaaatatatttttcttgagtttaggcttttccatatgtgcagctgtgtttacctaacccagcccttaattagggcttcagtgacttagaaaagcaggggaaacccaaggctttgcctgcagaccggccactctgtgacaactctaccaaaaaccaacaagccattcaagcttttacaagaatgaaagagcggagacggtagtttagtatttgagccacgagtttatgtgcacaagtgttttgggttgtggactgaagctcagcctgttaatcagaccagcccatgagtgtataacaaacagaattggaggctggtttcttaaacacacacgtccacattttttagggttgttttcctgtgcttacaatttttaatgcatgtgcctttatttcacaaaacatgtggctgggcgcagcggctcacgcctgttatcccaacactttgggaggccgaggcaggcggagcacctaagttggggagttcaagaccagcctgaccaacgtggagaaactccgtctccactaaaatacaaaattagctgggtgtggtggcacatgcctgtaatatcagctactcaggaggctgaggcaggagaattgcttgaacccaggaggtggagtttgcagtgagctgagatcacaccattgcactccagcctgggcaaaaagagcaaaactctccctaaaaaaaaaatgtagaatatctcttaagatttccgttatggtaaaaaccatatgcaataaatacctcattgtaagcttacccaaaattgatagatgtcaaccttttaacagaagaacagaagtttaagttattgtttaatgtaatcagttttcattttaatatctttgaaatctttttcaaaggactgtagttttgtaatggacttttcaagccttccttccattgtttttcttccgttcactggctccacacgtttcctggggagtagcctggaatttaaagttgggtgcaggttttagaaagctgttgctgttaacaataattctcccggccatctccactccactactcaaaaatgcctgaatccttgctcagaggagcaaaggtatcttctcgtccctttcttacagccattttcttgcttttccacaaagatattatttaaagtggaatatttttgtaactgggataccaatgagcttttcggtcttttcctgacttggtaaggtttatgggtttctaaatctaataactacagtcataccaccctgaaaatgcctgatctcgtctaaatctaataactggtgtcatggaattttgagtaaccaaagattcattccagtctcacttaaaaaaataaattctgctgggcacagtggctcatgcctgcaatcccagaactttgggagtccaaggagggcagatcacctgaagtcagaagtttgagaccagcctggtcaatgtggcaagaccccgtctctactaaaagtacaaaaattagccaggcatggtggcgtgtgcctgtaatcccagctacttgggaggctgaggcatgagaatcacttgaacctgggaggtgaaggctgcagtgtgcgagaccgtgccactgtactccagcctaggtgacagagggagaccctatctcaaaaaaaaagataggtgaaaagaaaaaaaaagttgtaattgtaaacatttctgcccagtgcctttatatttatataacattttcactgtgaccagacttgatgatattcaagttttctatttgtgtgtgtgtgtgtgtgtgtgtgtgatgaacacaacgaaaacgtactgcgttttttttcctattataaaagtgatactgaaatatgctaattaatatattaattttagttaaatgctgctaatatgcatacctcttacttgaaggtttttaatatgttttgataactttaataacttcaggtgatgtctgtataacttttaaagtgcagctctctctaacaaatgtgccttacaactcctgattaaacggcgtcttgaaggttttaaaaaaaaaaaaaaaaaaaaaaaaaaaaa

SEQ ID NO: 4847 - DNA, 3157 bp, Homo sapiens; identical to SEQ ID NO: 118

SEQ ID NO: 4848 - DNA, 2303 bp, Homo sapiens; identical to SEQ ID NO: 1524

SEQ ID NO: 4849 - DNA, 2250 bp, Homo sapiens
gaaggaagccaagagcctataatagcgatcctggggaaaatttcagcagctggggccatgtaatttaaaacctctgaaaagtgtgctgcggtccgtgcacagcattagtataacgtgagggctgaatgcagcccattctctggagaacttcctcacacaccgcagcaaagagaagactgaaagacaaacctgggtgcagccagagaggtccagatagatgagcttgtggcatccattccccaagttcagcctagggactccacgtaccccagctgggtctcattgttccagaactgcattagttaagattacccagacttggatttcaaaggaatactttcattgttccgtctgtaacacgaagtaattggggccagctggatgtcaggatgcgtgtggttaccattgtaatcttgctctgcttttgcaaagcggctgagctgcgcaaagcaagcccaggcagtgtgagaagccgagtgaatcatggccgggcgggtggaggccggagaggctccaacccggtcaaacgctacgcaccaggcctcccgtgtgacgtgtacacatatctccatgagaaatacttagattgtcaagaaagaaaattagtttatgtgctgcctggttggcctcaggatttgctgcacatgctgctagcaagaaacaagatccgcacattgaagaacaacatgttttccaagtttaaaaagctgaaaagcctggatctgcagcagaatgagatctctaaaattgagagtgaggcgttctttggtttaaacaaactcaccaccctcttactgcagcacaaccagatcaaagtcttgacggaggaagtgttcatttacacacctctcttgagctacctgcgtctttatgacaacccctggcactgtacttgtgagatagaaacgcttatttcaatgttgcagattcccaggaaccggaatttggggaactacgccaagtgtgaaagtccacaagaacaaaaaaataaaaaactgcggcagataaaatctgaacagttgtgtaatgaagaagaaaaggaacaattggacccgaaaccccaagtgtcagggagacccccagtcatcaagcctgaggtggactcaactttttgccacaattatgtgtttcccatacaaacactggactgcaaaaggaaagagttgaaaaaagtgccaaacaacatccctccagatattgttaaacttgacttgtcatacaataaaatcaaccaacttcgacccaaggaatttgaagatgttcatgagctgaagaaattaaacctcagcagcaatggcattgaattcatcgatcctgccgcttttttagggctcacacatttagaagaattagatttatcaaacaacagtctgcaaaactttgactatggcgtattagaagacttgtattttttgaaactcttgtggctcagagataacccttggagatgtgactacaacattcactacctctactactggttaaagcaccactacaatgtccattttaatggcctggaatgcaaaacgcctgaagaatacaaaggatggtctgtgggaaaatatattagaagttactatgaagaatgccccaaagacaagttaccagcatatcctgagtcatttgaccaagacacagaagatgatgaatgggaaaaaaaacatagagatcacaccgcaaagaagcaaagcgtaataattactatagtaggataaggtagaaattgttctgattgtaattagttttgtattttctatactggtgttagaaaacatatgtttacatttgattaactgtgttgcctatttatgcagggtaatccagctaaaggaagctttctttaattataagtattattgtgactattatagtaatcaagagaatgctatcatcctgcttgcctgtccatttgtggaacagcatctggtgatatgcaattccacactggtaacctgcagcagttgggtcctaatgatggcattagactttcataatgtcctgtataaatgtttttactgcttttagaaaataaagaaaaaaaacttggttcatgtttacatgcctttcgatagctgtttgtgcatacttaaagatgatcaaaatgattttatacaaatgctgttataataaaatgtcattccctacccctctactttttttcagtaagtcatcttatacattaaataaatttccatttctgatttctgtgcattccaaaaaaaaaaaaaaaaaaaaaaaaaaaaaaaaaaa

SEQ ID NO: 4850 - DNA, 1870 bp, Homo sapiens; identical to SEQ ID NO: 1752

SEQ ID NO: 4851 - DNA, 2379 bp, Homo sapiens; identical to SEQ ID NO: 734

SEQ ID NO: 4852 - DNA, 768 bp, Homo sapiens
attataacagccaatgcagccgccatccacgcacaagcaaagaagcatgtcccatttaaatacacccacgcagccccagcgcccttagccgatcggggcgctcagcccacacgcaccgctgctcggggcttggagatccgcgcaggctgggctcccggacccggcggaccgacgcgcggaggatcgggatccggcgctgtggggctggggtgggcgggggaggctgggcccggggcctctggcgcgacacccgcatgaggacgcgagtgaaatagaccaaggtggaatttccaagggaaaagcttcggggtggttttggtccatttctccagcgaagaagtagacatggcgagcgactccccggctcgaagcctggatgaaatagatctctcggctctgagggaccccgcagggatctttgaattggtggaacttgttggaaatggaacatacgggcaagtttataagcaaatgaaccagtgagtgaagggcattatcacaactccaagaaccaactaggagtcacccatgacatcatctcctgaatttcatcaccaagcccagctgatcctatttcctaaatggttcctgatttctctcttctgttttctgtctctgccaccactgtcctagcacaggcattgcacatctctcatatgaacgcctgcaggactgtcccttgatgttatccttgcagcccctacattcctactgtgcagccagtaaagtcatattaaaatgcttatttgatcaaaaaaaaaaaaaaaa

SEQ ID NO: 4853 - DNA, 5816 bp, Homo sapiens; identical to SEQ ID NO: 1489

SEQ ID NO: 4854 - DNA, 5792 bp, Homo sapiens
attataacagccaatgcagccgccatccacgcacaagcaaagaagcatgtcccatttaaatacacccacgcagccccagcgcccttagccgatcggggcgctcagcccacacgcaccgctgctcggggcttggagatccgcgcaggctgggctcccggacccggcggaccgacgcgcggaggatcgggatccggcgctgtggggctggggtgggcgggggaggctgggcccggggcctctggcgcgacacccgcatgaggacgcgagtgaaatagaccaaggtggaatttccaagggaaaagcttcggggtggttttggtccatttctccagcgaagaagtagacatggcgagcgactccccggctcgaagcctggatgaaatagatctctcggctctgagggaccccgcagggatctttgaattggtggaacttgttggaaatggaacatacgggcaagtttataagggtcgtcatgtcaaaacgggccagcttgcagccatcaaggttatggatgtcacaggggatgaagaggaagaaatcaaacaagaaattaacatgttgaagaaatattctcatcaccggaatattgctacatactatggtgcttttatcaaaaagaacccaccaggcatggatgaccaactttggttggtgatggagttttgtggtgctggctctgtcaccgacctgatcaagaacacaaaaggtaacacgttgaaagaggagtggattgcatacatctgcagggaaatcttacgggggctgagtcacctgcaccagcataaagtgattcatcgagatattaaagggcaaaatgtcttgctgactgaaaatgcagaagttaaactagtggactttggagtcagtgctcagcttgatcgaacagtgggcaggaggaatactttcattggaactccctactggatggcaccagaagttattgcctgtgatgaaaacccagatgccacatatgatttcaagagtgacttgtggtctttgggtatcaccgccattgaaatggcagaaggtgctccccctctctgtgacatgcaccccatgagagctctcttcctcatcccccggaacccagcgcctcggctgaagtctaagaagtggtcaaaaaaattccagtcatttattgagagctgcttggtaaagaatcacagccagcgaccagcaacagaacaattgatgaagcatccatttatacgagaccaacctaatgagcgacaggtccgcattcaactcaaggaccatattgatagaacaaagaagaagcgaggagaaaaagatgagacagagtatgagtacagtggaagtgaggaagaagaggaggagaatgactcaggagagcccagctccatcctgaatctgccaggggagtcgacgctgcggagggactttctgaggctgcagctggccaacaaggagcgttctgaggccctacggaggcagcagctggagcagcagcagcgggagaatgaggagcacaagcggcagctgctggccgagcgtcagaagcgcatcgaggagcagaaagagcagaggcggcggctggaggagcaacaaaggcgagagaaggagctgcggaagcagcaggagagggagcagcgccggcactatgaggagcagatgcgccgggaggaggagaggaggcgtgcggagcatgaacaggaatacatcaggcgacagttagaggaggagcagagacagttagagatcttgcagcagcagctactgcatgaacaagctctacttctggaatataagcgcaaacaattggaagaacagagacaagcagaaagactgcagaggcagctaaagcaagaaagagactacttagtttcccttcagcatcagcggcaggagcagaggcctgtggagaagaagccactgtaccattacaaagaaggaatgagtcctagtgagaagccagcatgggccaaggaggtagaagaacggtcaaggctcaaccggcaaagttcccctgccatgcctcacaaggttgccaacaggatatctgaccccaacctgcccccaaggtcggagtccttcagcattagtggagttcagcctgctcgaacaccccccatgctcagaccagtcgatccccagatcccacatctggtagctgtaaaatcccagggacctgccttgaccgcctcccagtcagtgcacgagcagcccacaaagggcctctctgggtttcaggaggctctgaacgtgacctcccaccgcgtggagatgccacgccagaactcagatcccacctcggaaaatcctcctctccccactcgcattgaaaagtttgaccgaagctcttggttacgacaggaagaagacattccaccaaaggtgcctcaaagaacaacttctatatccccagcattagccagaaagaattctcctgggaatggtagtgctctgggacccagactaggatctcaacccatcagagcaagcaaccctgatctccggagaactgagcccatcttggagagccccttgcagaggaccagcagtggcagttcctccagctccagcacccctagctcccagcccagctcccaaggaggctcccagcctggatcacaagcaggatccagtgaacgcaccagagttcgagccaacagtaagtcagaaggatcacctgtgctcccccatgagcctgccaaggtgaaaccagaagaatccagggacattacccggcccagtcgaccagctgatctgacggcattagccaaagaactaagagaactccggattgaagaaacaaaccgcccaatgaagaaggtgactgattactcctcctccagtgaggagtcagaaagtagcgaggaagaggaggaagatggagagagcgagacccatgatgggacagtggctgtcagcgacatacccagactgataccaacaggagctccaggcagcaacgagcagtacaatgtgggaatggtggggacgcatgggctggagacctctcatgcggacagtttcagcggcagtatttcaagagaaggaaccttgatgattagagagacgtctggagagaagaagcgatctggccacagtgacagcaatggctttgctggccacatcaacctccctgacctggtgcagcagagccattctccagctggaaccccgactgagggactggggcgcgtctcaacccattcccaggagatggactctgggactgaatatggcatggggagcagcaccaaagcctccttcaccccctttgtggaccccagagtataccagacgtctcccactgatgaagatgaagaggatgaggaatcatcagccgcagctctgtttactagcgaacttcttaggcaagaacaggccaaactcaatgaagcaagaaagatttcggtggtaaatgtaaacccaaccaacattcggcctcatagcgacacaccagaaatcagaaaatacaagaaacgattcaactcagaaatactttgtgcagctctgtggggtgtaaaccttctggtggggactgaaaatggcctgatgcttttggaccgaagtgggcaaggcaaagtctataatctgatcaaccggaggcgatttcagcagatggatgtgctagagggactgaatgtccttgtgacaatttcaggaaagaagaataagctacgagtttactatctttcatggttaagaaacagaatactacataatgacccagaagtagaaaagaaacaaggctggatcactgttggggacttggaaggctgtatacattataaagttgttaaatatgaaaggatcaaatttttggtgattgccttaaagaatgctgtggaaatatatgcttgggctcctaaaccgtatcataaattcatggcatttaagtcttttgcagatctccagcacaagcctctgctagttgatctcacggtagaagaaggtcaaagattaaaggttatttttggttcacacactggtttccatgtaattgatgttgattcaggaaactcttatgatatctacataccatctcatattcagggcaatatcactcctcatgctattgtcatcttgcctaaaacagatggaatggaaatgcttgtttgctatgaggatgagggggtgtatgtaaacacctatggccggataactaaggatgtggtgctccaatggggagaaatgcccacgtctgtggcctacattcattccaatcagataatgggctggggcgagaaagctattgagatccggtcagtggaaacaggacatttggatggagtatttatgcataagcgagctcaaaggttaaagtttctatgtgaaagaaatgataaggtattttttgcatccgtgcgatctggaggaagtagccaagtgtttttcatgaccctcaacagaaattccatgatgaactggtaacagaagagcacttggcacttatcttcatggcgttatttctaatttaaaagaacataactcatgtggacttatgccagtctagaggcagaatcagaaggcttggttgaacatatcgctttccctttttcctctccctccgcccctcccagtacagtccatctttcaatgttgcagcctggttgagaaggagagaaaaaggtggcaggaatttccaggagatccccaagaatgctgccttgtctgtggacaaagatggaccatgtgcccttcggaattagggatagaaacaaatattgtgtgctcttaacgattaagctgtgttatggtgggttttcaggtttttaccttttttctttacccctttactctgcaagaatggggaaagaatgcatactgcgaaaatgagtcttttaaattctgtctgcctactagttttaagtatatggtatgttgtaaaatttccaatgatgagagacagcacaataaatgtaccttatctccttaggctgaaggccataactacatagtggagtaatttaagaactctcttgccttcaccaacccaaaaggttgctttttgatagcaactggctaatgaatttttaaaaagagaagaaaaatactagttttcccctcttttgggaaatagattttaaatggctaaactactagccttaaaactactagtctaataaaatcaactaccacttttgtgaatctgacaggccacatttttatatggccctttacagaatggagtgtgttgaacaggatactaacgccattgagttgagctggcctagcgatggagggacactctaacacaactttccctcagctattatgcaacagatcagggaaaaagatgggatgacagatggggtcagacagaaagagcttctgggaaacaagcttacatagtcttttttaaaatgcacaaagcctcccagctaagaggtcacttggtttgggcttcattaggactgagactttgttgagttctttctgggacttggagagtggatgatattcaggctctgaacattcccagcgctctcccgagggtgccactttctcaagatgaaaactgtgactgaaaaaattaataataaatgtttctgagctgcctgtgttctccctgtgtgggtgagagaagggactagactcctaagcctgcctcagatacaagaggcatcattggctccaattttagagaacttgaaagcaaggctttggacaaaattttgagaccctaatcactttaccttcctccaaattacccaacatacggtaaacaacatttgtgcagaagtatgtatgtatttagttcaggttgacttgtgtccttataaactcttactcaaatgatttgaactttaaaaaaaaaa

SEQ ID NO: 4855 - DNA, 5729 bp, Homo sapiens
attataacagccaatgcagccgccatccacgcacaagcaaagaagcatgtcccatttaaatacacccacgcagccccagcgcccttagccgatcggggcgctcagcccacacgcaccgctgctcggggcttggagatccgcgcaggctgggctcccggacccggcggaccgacgcgcggaggatcgggatccggcgctgtggggctggggtgggcgggggaggctgggcccggggcctctggcgcgacacccgcatgaggacgcgagtgaaatagaccaaggtggaatttccaagggaaaagcttcggggtggttttggtccatttctccagcgaagaagtagacatggcgagcgactccccggctcgaagcctggatgaaatagatctctcggctctgagggaccccgcagggatctttgaattggtggaacttgttggaaatggaacatacgggcaagtttataagggtcgtcatgtcaaaacgggccagcttgcagccatcaaggttatggatgtcacaggggatgaagaggaagaaatcaaacaagaaattaacatgttgaagaaatattctcatcaccggaatattgctacatactatggtgcttttatcaaaaagaacccaccaggcatggatgaccaactttggttggtgatggagttttgtggtgctggctctgtcaccgacctgatcaagaacacaaaaggtaacacgttgaaagaggagtggattgcatacatctgcagggaaatcttacgggggctgagtcacctgcaccagcataaagtgattcatcgagatattaaagggcaaaatgtcttgctgactgaaaatgcagaagttaaactagtggactttggagtcagtgctcagcttgatcgaacagtgggcaggaggaatactttcattggaactccctactggatggcaccagaagttattgcctgtgatgaaaacccagatgccacatatgatttcaagagtgacttgtggtctttgggtatcaccgccattgaaatggcagaaggtgctccccctctctgtgacatgcaccccatgagagctctcttcctcatcccccggaacccagcgcctcggctgaagtctaagaagtggtcaaaaaaattccagtcatttattgagagctgcttggtaaagaatcacagccagcgaccagcaacagaacaattgatgaagcatccatttatacgagaccaacctaatgagcgacaggtccgcattcaactcaaggaccatattgatagaacaaagaagaagcgaggagaaaaagatgagacagagtatgagtacagtggaagtgaggaagaagaggaggagaatgactcaggagagcccagctccatcctgaatctgccaggggagtcgacgctgcggagggactttctgaggctgcagctggccaacaaggagcgttctgaggccctacggaggcagcagctggagcagcagcagcgggagaatgaggagcacaagcggcagctgctggccgagcgtcagaagcgcatcgaggagcagaaagagcagaggcggcggctggaggagcaacaaaggcgagagaaggagctgcggaagcagcaggagagggagcagcgccggcactatgaggagcagatgcgccgggaggaggagaggaggcgtgcggagcatgaacaggaatataagcgcaaacaattggaagaacagagacaagcagaaagactgcagaggcagctaaagcaagaaagagactacttagtttcccttcagcatcagcggcaggagcagaggcctgtggagaagaagccactgtaccattacaaagaaggaatgagtcctagtgagaagccagcatgggccaaggaggtagaagaacggtcaaggctcaaccggcaaagttcccctgccatgcctcacaaggttgccaacaggatatctgaccccaacctgcccccaaggtcggagtccttcagcattagtggagttcagcctgctcgaacaccccccatgctcagaccagtcgatccccagatcccacatctggtagctgtaaaatcccagggacctgccttgaccgcctcccagtcagtgcacgagcagcccacaaagggcctctctgggtttcaggaggctctgaacgtgacctcccaccgcgtggagatgccacgccagaactcagatcccacctcggaaaatcctcctctccccactcgcattgaaaagtttgaccgaagctcttggttacgacaggaagaagacattccaccaaaggtgcctcaaagaacaacttctatatccccagcattagccagaaagaattctcctgggaatggtagtgctctgggacccagactaggatctcaacccatcagagcaagcaaccctgatctccggagaactgagcccatcttggagagccccttgcagaggaccagcagtggcagttcctccagctccagcacccctagctcccagcccagctcccaaggaggctcccagcctggatcacaagcaggatccagtgaacgcaccagagttcgagccaacagtaagtcagaaggatcacctgtgctcccccatgagcctgccaaggtgaaaccagaagaatccagggacattacccggcccagtcgaccagctagctacaaaaaagctatagatgaggatctgacggcattagccaaagaactaagagaactccggattgaagaaacaaaccgcccaatgaagaaggtgactgattactcctcctccagtgaggagtcagaaagtagcgaggaagaggaggaagatggagagagcgagacccatgatgggacagtggctgtcagcgacatacccagactgataccaacaggagctccaggcagcaacgagcagtacaatgtgggaatggtggggacgcatgggctggagacctctcatgcggacagtttcagcggcagtatttcaagagaaggaaccttgatgattagagagacgtctggagagaagaagcgatctggccacagtgacagcaatggctttgctggccacatcaacctccctgacctggtgcagcagagccattctccagctggaaccccgactgagggactggggcgcgtctcaacccattcccaggagatggactctgggactgaatatggcatggggagcagcaccaaagcctccttcaccccctttgtggaccccagagtataccagacgtctcccactgatgaagatgaagaggatgaggaatcatcagccgcagctctgtttactagcgaacttcttaggcaagaacaggccaaactcaatgaagcaagaaagatttcggtggtaaatgtaaacccaaccaacattcggcctcatagcgacacaccagaaatcagaaaatacaagaaacgattcaactcagaaatactttgtgcagctctgtggggtgtaaaccttctggtggggactgaaaatggcctgatgcttttggaccgaagtgggcaaggcaaagtctataatctgatcaaccggaggcgatttcagcagatggatgtgctagagggactgaatgtccttgtgacaatttcaggaaagaagaataagctacgagtttactatctttcatggttaagaaacagaatactacataatgacccagaagtagaaaagaaacaaggctggatcactgttggggacttggaaggctgtatacattataaagttgttaaatatgaaaggatcaaatttttggtgattgccttaaagaatgctgtggaaatatatgcttgggctcctaaaccgtatcataaattcatggcatttaagtcttttgcagatctccagcacaagcctctgctagttgatctcacggtagaagaaggtcaaagattaaaggttatttttggttcacacactggtttccatgtaattgatgttgattcaggaaactcttatgatatctacataccatctcatattcagggcaatatcactcctcatgctattgtcatcttgcctaaaacagatggaatggaaatgcttgtttgctatgaggatgagggggtgtatgtaaacacctatggccggataactaaggatgtggtgctccaatggggagaaatgcccacgtctgtggcctacattcattccaatcagataatgggctggggcgagaaagctattgagatccggtcagtggaaacaggacatttggatggagtatttatgcataagcgagctcaaaggttaaagtttctatgtgaaagaaatgataaggtattttttgcatccgtgcgatctggaggaagtagccaagtgtttttcatgaccctcaacagaaattccatgatgaactggtaacagaagagcacttggcacttatcttcatggcgttatttctaatttaaaagaacataactcatgtggacttatgccagtctagaggcagaatcagaaggcttggttgaacatatcgctttccctttttcctctccctccgcccctcccagtacagtccatctttcaatgttgcagcctggttgagaaggagagaaaaaggtggcaggaatttccaggagatccccaagaatgctgccttgtctgtggacaaagatggaccatgtgcccttcggaattagggatagaaacaaatattgtgtgctcttaacgattaagctgtgttatggtgggttttcaggtttttaccttttttctttacccctttactctgcaagaatggggaaagaatgcatactgcgaaaatgagtcttttaaattctgtctgcctactagttttaagtatatggtatgttgtaaaatttccaatgatgagagacagcacaataaatgtaccttatctccttaggctgaaggccataactacatagtggagtaatttaagaactctcttgccttcaccaacccaaaaggttgctttttgatagcaactggctaatgaatttttaaaaagagaagaaaaatactagttttcccctcttttgggaaatagattttaaatggctaaactactagccttaaaactactagtctaataaaatcaactaccacttttgtgaatctgacaggccacatttttatatggccctttacagaatggagtgtgttgaacaggatactaacgccattgagttgagctggcctagcgatggagggacactctaacacaactttccctcagctattatgcaacagatcagggaaaaagatgggatgacagatggggtcagacagaaagagcttctgggaaacaagcttacatagtcttttttaaaatgcacaaagcctcccagctaagaggtcacttggtttgggcttcattaggactgagactttgttgagttctttctgggacttggagagtggatgatattcaggctctgaacattcccagcgctctcccgagggtgccactttctcaagatgaaaactgtgactgaaaaaattaataataaatgtttctgagctgcctgtgttctccctgtgtgggtgagagaagggactagactcctaagcctgcctcagatacaagaggcatcattggctccaattttagagaacttgaaagcaaggctttggacaaaattttgagaccctaatcactttaccttcctccaaattacccaacatacggtaaacaacatttgtgcagaagtatgtatgtatttagttcaggttgacttgtgtccttataaactcttactcaaatgatttgaactttaaaaaaaaaa

SEQ ID NO: 4856 - DNA, 5705 bp, Homo sapiens
attataacagccaatgcagccgccatccacgcacaagcaaagaagcatgtcccatttaaatacacccacgcagccccagcgcccttagccgatcggggcgctcagcccacacgcaccgctgctcggggcttggagatccgcgcaggctgggctcccggacccggcggaccgacgcgcggaggatcgggatccggcgctgtggggctggggtgggcgggggaggctgggcccggggcctctggcgcgacacccgcatgaggacgcgagtgaaatagaccaaggtggaatttccaagggaaaagcttcggggtggttttggtccatttctccagcgaagaagtagacatggcgagcgactccccggctcgaagcctggatgaaatagatctctcggctctgagggaccccgcagggatctttgaattggtggaacttgttggaaatggaacatacgggcaagtttataagggtcgtcatgtcaaaacgggccagcttgcagccatcaaggttatggatgtcacaggggatgaagaggaagaaatcaaacaagaaattaacatgttgaagaaatattctcatcaccggaatattgctacatactatggtgcttttatcaaaaagaacccaccaggcatggatgaccaactttggttggtgatggagttttgtggtgctggctctgtcaccgacctgatcaagaacacaaaaggtaacacgttgaaagaggagtggattgcatacatctgcagggaaatcttacgggggctgagtcacctgcaccagcataaagtgattcatcgagatattaaagggcaaaatgtcttgctgactgaaaatgcagaagttaaactagtggactttggagtcagtgctcagcttgatcgaacagtgggcaggaggaatactttcattggaactccctactggatggcaccagaagttattgcctgtgatgaaaacccagatgccacatatgatttcaagagtgacttgtggtctttgggtatcaccgccattgaaatggcagaaggtgctccccctctctgtgacatgcaccccatgagagctctcttcctcatcccccggaacccagcgcctcggctgaagtctaagaagtggtcaaaaaaattccagtcatttattgagagctgcttggtaaagaatcacagccagcgaccagcaacagaacaattgatgaagcatccatttatacgagaccaacctaatgagcgacaggtccgcattcaactcaaggaccatattgatagaacaaagaagaagcgaggagaaaaagatgagacagagtatgagtacagtggaagtgaggaagaagaggaggagaatgactcaggagagcccagctccatcctgaatctgccaggggagtcgacgctgcggagggactttctgaggctgcagctggccaacaaggagcgttctgaggccctacggaggcagcagctggagcagcagcagcgggagaatgaggagcacaagcggcagctgctggccgagcgtcagaagcgcatcgaggagcagaaagagcagaggcggcggctggaggagcaacaaaggcgagagaaggagctgcggaagcagcaggagagggagcagcgccggcactatgaggagcagatgcgccgggaggaggagaggaggcgtgcggagcatgaacaggaatataagcgcaaacaattggaagaacagagacaagcagaaagactgcagaggcagctaaagcaagaaagagactacttagtttcccttcagcatcagcggcaggagcagaggcctgtggagaagaagccactgtaccattacaaagaaggaatgagtcctagtgagaagccagcatgggccaaggaggtagaagaacggtcaaggctcaaccggcaaagttcccctgccatgcctcacaaggttgccaacaggatatctgaccccaacctgcccccaaggtcggagtccttcagcattagtggagttcagcctgctcgaacaccccccatgctcagaccagtcgatccccagatcccacatctggtagctgtaaaatcccagggacctgccttgaccgcctcccagtcagtgcacgagcagcccacaaagggcctctctgggtttcaggaggctctgaacgtgacctcccaccgcgtggagatgccacgccagaactcagatcccacctcggaaaatcctcctctccccactcgcattgaaaagtttgaccgaagctcttggttacgacaggaagaagacattccaccaaaggtgcctcaaagaacaacttctatatccccagcattagccagaaagaattctcctgggaatggtagtgctctgggacccagactaggatctcaacccatcagagcaagcaaccctgatctccggagaactgagcccatcttggagagccccttgcagaggaccagcagtggcagttcctccagctccagcacccctagctcccagcccagctcccaaggaggctcccagcctggatcacaagcaggatccagtgaacgcaccagagttcgagccaacagtaagtcagaaggatcacctgtgctcccccatgagcctgccaaggtgaaaccagaagaatccagggacattacccggcccagtcgaccagctgatctgacggcattagccaaagaactaagagaactccggattgaagaaacaaaccgcccaatgaagaaggtgactgattactcctcctccagtgaggagtcagaaagtagcgaggaagaggaggaagatggagagagcgagacccatgatgggacagtggctgtcagcgacatacccagactgataccaacaggagctccaggcagcaacgagcagtacaatgtgggaatggtggggacgcatgggctggagacctctcatgcggacagtttcagcggcagtatttcaagagaaggaaccttgatgattagagagacgtctggagagaagaagcgatctggccacagtgacagcaatggctttgctggccacatcaacctccctgacctggtgcagcagagccattctccagctggaaccccgactgagggactggggcgcgtctcaacccattcccaggagatggactctgggactgaatatggcatggggagcagcaccaaagcctccttcaccccctttgtggaccccagagtataccagacgtctcccactgatgaagatgaagaggatgaggaatcatcagccgcagctctgtttactagcgaacttcttaggcaagaacaggccaaactcaatgaagcaagaaagatttcggtggtaaatgtaaacccaaccaacattcggcctcatagcgacacaccagaaatcagaaaatacaagaaacgattcaactcagaaatactttgtgcagctctgtggggtgtaaaccttctggtggggactgaaaatggcctgatgcttttggaccgaagtgggcaaggcaaagtctataatctgatcaaccggaggcgatttcagcagatggatgtgctagagggactgaatgtccttgtgacaatttcaggaaagaagaataagctacgagtttactatctttcatggttaagaaacagaatactacataatgacccagaagtagaaaagaaacaaggctggatcactgttggggacttggaaggctgtatacattataaagttgttaaatatgaaaggatcaaatttttggtgattgccttaaagaatgctgtggaaatatatgcttgggctcctaaaccgtatcataaattcatggcatttaagtcttttgcagatctccagcacaagcctctgctagttgatctcacggtagaagaaggtcaaagattaaaggttatttttggttcacacactggtttccatgtaattgatgttgattcaggaaactcttatgatatctacataccatctcatattcagggcaatatcactcctcatgctattgtcatcttgcctaaaacagatggaatggaaatgcttgtttgctatgaggatgagggggtgtatgtaaacacctatggccggataactaaggatgtggtgctccaatggggagaaatgcccacgtctgtggcctacattcattccaatcagataatgggctggggcgagaaagctattgagatccggtcagtggaaacaggacatttggatggagtatttatgcataagcgagctcaaaggttaaagtttctatgtgaaagaaatgataaggtattttttgcatccgtgcgatctggaggaagtagccaagtgtttttcatgaccctcaacagaaattccatgatgaactggtaacagaagagcacttggcacttatcttcatggcgttatttctaatttaaaagaacataactcatgtggacttatgccagtctagaggcagaatcagaaggcttggttgaacatatcgctttccctttttcctctccctccgcccctcccagtacagtccatctttcaatgttgcagcctggttgagaaggagagaaaaaggtggcaggaatttccaggagatccccaagaatgctgccttgtctgtggacaaagatggaccatgtgcccttcggaattagggatagaaacaaatattgtgtgctcttaacgattaagctgtgttatggtgggttttcaggtttttaccttttttctttacccctttactctgcaagaatggggaaagaatgcatactgcgaaaatgagtcttttaaattctgtctgcctactagttttaagtatatggtatgttgtaaaatttccaatgatgagagacagcacaataaatgtaccttatctccttaggctgaaggccataactacatagtggagtaatttaagaactctcttgccttcaccaacccaaaaggttgctttttgatagcaactggctaatgaatttttaaaaagagaagaaaaatactagttttcccctcttttgggaaatagattttaaatggctaaactactagccttaaaactactagtctaataaaatcaactaccacttttgtgaatctgacaggccacatttttatatggccctttacagaatggagtgtgttgaacaggatactaacgccattgagttgagctggcctagcgatggagggacactctaacacaactttccctcagctattatgcaacagatcagggaaaaagatgggatgacagatggggtcagacagaaagagcttctgggaaacaagcttacatagtcttttttaaaatgcacaaagcctcccagctaagaggtcacttggtttgggcttcattaggactgagactttgttgagttctttctgggacttggagagtggatgatattcaggctctgaacattcccagcgctctcccgagggtgccactttctcaagatgaaaactgtgactgaaaaaattaataataaatgtttctgagctgcctgtgttctccctgtgtgggtgagagaagggactagactcctaagcctgcctcagatacaagaggcatcattggctccaattttagagaacttgaaagcaaggctttggacaaaattttgagaccctaatcactttaccttcctccaaattacccaacatacggtaaacaacatttgtgcagaagtatgtatgtatttagttcaggttgacttgtgtccttataaactcttactcaaatgatttgaactttaaaaaaaaaa

SEQ ID NO: 4857 - DNA, 5651 bp, Homo sapiens
attataacagccaatgcagccgccatccacgcacaagcaaagaagcatgtcccatttaaatacacccacgcagccccagcgcccttagccgatcggggcgctcagcccacacgcaccgctgctcggggcttggagatccgcgcaggctgggctcccggacccggcggaccgacgcgcggaggatcgggatccggcgctgtggggctggggtgggcgggggaggctgggcccggggcctctggcgcgacacccgcatgaggacgcgagtgaaatagaccaaggtggaatttccaagggaaaagcttcggggtggttttggtccatttctccagcgaagaagtagacatggcgagcgactccccggctcgaagcctggatgaaatagatctctcggctctgagggaccccgcagggatctttgaattggtggaacttgttggaaatggaacatacgggcaagtttataagggtcgtcatgtcaaaacgggccagcttgcagccatcaaggttatggatgtcacaggggatgaagaggaagaaatcaaacaagaaattaacatgttgaagaaatattctcatcaccggaatattgctacatactatggtgcttttatcaaaaagaacccaccaggcatggatgaccaactttggttggtgatggagttttgtggtgctggctctgtcaccgacctgatcaagaacacaaaaggtaacacgttgaaagaggagtggattgcatacatctgcagggaaatcttacgggggctgagtcacctgcaccagcataaagtgattcatcgagatattaaagggcaaaatgtcttgctgactgaaaatgcagaagttaaactagtggactttggagtcagtgctcagcttgatcgaacagtgggcaggaggaatactttcattggaactccctactggatggcaccagaagttattgcctgtgatgaaaacccagatgccacatatgatttcaagagtgacttgtggtctttgggtatcaccgccattgaaatggcagaaggtgctccccctctctgtgacatgcaccccatgagagctctcttcctcatcccccggaacccagcgcctcggctgaagtctaagaagtggtcaaaaaaattccagtcatttattgagagctgcttggtaaagaatcacagccagcgaccagcaacagaacaattgatgaagcatccatttatacgagaccaacctaatgagcgacaggtccgcattcaactcaaggaccatattgatagaacaaagaagaagcgaggagaaaaagatgagacagagtatgagtacagtggaagtgaggaagaagaggaggagaatgactcaggagagcccagctccatcctgaatctgccaggggagtcgacgctgcggagggactttctgaggctgcagctggccaacaaggagcgttctgaggccctacggaggcagcagctggagcagcagcagcgggagaatgaggagcacaagcggcagctgctggccgagcgtcagaagcgcatcgaggagcagaaagagcagaggcggcggctggaggagcaacaaaggcgagagaaggagctgcggaagcagcaggagagggagcagcgccggcactatgaggagcagatgcgccgggaggaggagaggaggcgtgcggagcatgaacaggaatacatcaggcgacagttagaggaggagcagagacagttagagatcttgcagcagcagctactgcatgaacaagctctacttctggaatataagcgcaaacaattggaagaacagagacaagcagaaagactgcagaggcagctaaagcaagaaagagactacttagtttcccttcagcatcagcggcaggagcagaggcctgtggagaagaagccactgtaccattacaaagaaggaatgagtcctagtgagaagccagcatgggccaaggagatcccacatctggtagctgtaaaatcccagggacctgccttgaccgcctcccagtcagtgcacgagcagcccacaaagggcctctctgggtttcaggaggctctgaacgtgacctcccaccgcgtggagatgccacgccagaactcagatcccacctcggaaaatcctcctctccccactcgcattgaaaagtttgaccgaagctcttggttacgacaggaagaagacattccaccaaaggtgcctcaaagaacaacttctatatccccagcattagccagaaagaattctcctgggaatggtagtgctctgggacccagactaggatctcaacccatcagagcaagcaaccctgatctccggagaactgagcccatcttggagagccccttgcagaggaccagcagtggcagttcctccagctccagcacccctagctcccagcccagctcccaaggaggctcccagcctggatcacaagcaggatccagtgaacgcaccagagttcgagccaacagtaagtcagaaggatcacctgtgctcccccatgagcctgccaaggtgaaaccagaagaatccagggacattacccggcccagtcgaccagctagctacaaaaaagctatagatgaggatctgacggcattagccaaagaactaagagaactccggattgaagaaacaaaccgcccaatgaagaaggtgactgattactcctcctccagtgaggagtcagaaagtagcgaggaagaggaggaagatggagagagcgagacccatgatgggacagtggctgtcagcgacatacccagactgataccaacaggagctccaggcagcaacgagcagtacaatgtgggaatggtggggacgcatgggctggagacctctcatgcggacagtttcagcggcagtatttcaagagaaggaaccttgatgattagagagacgtctggagagaagaagcgatctggccacagtgacagcaatggctttgctggccacatcaacctccctgacctggtgcagcagagccattctccagctggaaccccgactgagggactggggcgcgtctcaacccattcccaggagatggactctgggactgaatatggcatggggagcagcaccaaagcctccttcaccccctttgtggaccccagagtataccagacgtctcccactgatgaagatgaagaggatgaggaatcatcagccgcagctctgtttactagcgaacttcttaggcaagaacaggccaaactcaatgaagcaagaaagatttcggtggtaaatgtaaacccaaccaacattcggcctcatagcgacacaccagaaatcagaaaatacaagaaacgattcaactcagaaatactttgtgcagctctgtggggtgtaaaccttctggtggggactgaaaatggcctgatgcttttggaccgaagtgggcaaggcaaagtctataatctgatcaaccggaggcgatttcagcagatggatgtgctagagggactgaatgtccttgtgacaatttcaggaaagaagaataagctacgagtttactatctttcatggttaagaaacagaatactacataatgacccagaagtagaaaagaaacaaggctggatcactgttggggacttggaaggctgtatacattataaagttgttaaatatgaaaggatcaaatttttggtgattgccttaaagaatgctgtggaaatatatgcttgggctcctaaaccgtatcataaattcatggcatttaagtcttttgcagatctccagcacaagcctctgctagttgatctcacggtagaagaaggtcaaagattaaaggttatttttggttcacacactggtttccatgtaattgatgttgattcaggaaactcttatgatatctacataccatctcatattcagggcaatatcactcctcatgctattgtcatcttgcctaaaacagatggaatggaaatgcttgtttgctatgaggatgagggggtgtatgtaaacacctatggccggataactaaggatgtggtgctccaatggggagaaatgcccacgtctgtggcctacattcattccaatcagataatgggctggggcgagaaagctattgagatccggtcagtggaaacaggacatttggatggagtatttatgcataagcgagctcaaaggttaaagtttctatgtgaaagaaatgataaggtattttttgcatccgtgcgatctggaggaagtagccaagtgtttttcatgaccctcaacagaaattccatgatgaactggtaacagaagagcacttggcacttatcttcatggcgttatttctaatttaaaagaacataactcatgtggacttatgccagtctagaggcagaatcagaaggcttggttgaacatatcgctttccctttttcctctccctccgcccctcccagtacagtccatctttcaatgttgcagcctggttgagaaggagagaaaaaggtggcaggaatttccaggagatccccaagaatgctgccttgtctgtggacaaagatggaccatgtgcccttcggaattagggatagaaacaaatattgtgtgctcttaacgattaagctgtgttatggtgggttttcaggtttttaccttttttctttacccctttactctgcaagaatggggaaagaatgcatactgcgaaaatgagtcttttaaattctgtctgcctactagttttaagtatatggtatgttgtaaaatttccaatgatgagagacagcacaataaatgtaccttatctccttaggctgaaggccataactacatagtggagtaatttaagaactctcttgccttcaccaacccaaaaggttgctttttgatagcaactggctaatgaatttttaaaaagagaagaaaaatactagttttcccctcttttgggaaatagattttaaatggctaaactactagccttaaaactactagtctaataaaatcaactaccacttttgtgaatctgacaggccacatttttatatggccctttacagaatggagtgtgttgaacaggatactaacgccattgagttgagctggcctagcgatggagggacactctaacacaactttccctcagctattatgcaacagatcagggaaaaagatgggatgacagatggggtcagacagaaagagcttctgggaaacaagcttacatagtcttttttaaaatgcacaaagcctcccagctaagaggtcacttggtttgggcttcattaggactgagactttgttgagttctttctgggacttggagagtggatgatattcaggctctgaacattcccagcgctctcccgagggtgccactttctcaagatgaaaactgtgactgaaaaaattaataataaatgtttctgagctgcctgtgttctccctgtgtgggtgagagaagggactagactcctaagcctgcctcagatacaagaggcatcattggctccaattttagagaacttgaaagcaaggctttggacaaaattttgagaccctaatcactttaccttcctccaaattacccaacatacggtaaacaacatttgtgcagaagtatgtatgtatttagttcaggttgacttgtgtccttataaactcttactcaaatgatttgaactttaaaaaaaaaa

SEQ ID NO: 4858 - DNA, 5627 bp, Homo sapiens
attataacagccaatgcagccgccatccacgcacaagcaaagaagcatgtcccatttaaatacacccacgcagccccagcgcccttagccgatcggggcgctcagcccacacgcaccgctgctcggggcttggagatccgcgcaggctgggctcccggacccggcggaccgacgcgcggaggatcgggatccggcgctgtggggctggggtgggcgggggaggctgggcccggggcctctggcgcgacacccgcatgaggacgcgagtgaaatagaccaaggtggaatttccaagggaaaagcttcggggtggttttggtccatttctccagcgaagaagtagacatggcgagcgactccccggctcgaagcctggatgaaatagatctctcggctctgagggaccccgcagggatctttgaattggtggaacttgttggaaatggaacatacgggcaagtttataagggtcgtcatgtcaaaacgggccagcttgcagccatcaaggttatggatgtcacaggggatgaagaggaagaaatcaaacaagaaattaacatgttgaagaaatattctcatcaccggaatattgctacatactatggtgcttttatcaaaaagaacccaccaggcatggatgaccaactttggttggtgatggagttttgtggtgctggctctgtcaccgacctgatcaagaacacaaaaggtaacacgttgaaagaggagtggattgcatacatctgcagggaaatcttacgggggctgagtcacctgcaccagcataaagtgattcatcgagatattaaagggcaaaatgtcttgctgactgaaaatgcagaagttaaactagtggactttggagtcagtgctcagcttgatcgaacagtgggcaggaggaatactttcattggaactccctactggatggcaccagaagttattgcctgtgatgaaaacccagatgccacatatgatttcaagagtgacttgtggtctttgggtatcaccgccattgaaatggcagaaggtgctccccctctctgtgacatgcaccccatgagagctctcttcctcatcccccggaacccagcgcctcggctgaagtctaagaagtggtcaaaaaaattccagtcatttattgagagctgcttggtaaagaatcacagccagcgaccagcaacagaacaattgatgaagcatccatttatacgagaccaacctaatgagcgacaggtccgcattcaactcaaggaccatattgatagaacaaagaagaagcgaggagaaaaagatgagacagagtatgagtacagtggaagtgaggaagaagaggaggagaatgactcaggagagcccagctccatcctgaatctgccaggggagtcgacgctgcggagggactttctgaggctgcagctggccaacaaggagcgttctgaggccctacggaggcagcagctggagcagcagcagcgggagaatgaggagcacaagcggcagctgctggccgagcgtcagaagcgcatcgaggagcagaaagagcagaggcggcggctggaggagcaacaaaggcgagagaaggagctgcggaagcagcaggagagggagcagcgccggcactatgaggagcagatgcgccgggaggaggagaggaggcgtgcggagcatgaacaggaatacatcaggcgacagttagaggaggagcagagacagttagagatcttgcagcagcagctactgcatgaacaagctctacttctggaatataagcgcaaacaattggaagaacagagacaagcagaaagactgcagaggcagctaaagcaagaaagagactacttagtttcccttcagcatcagcggcaggagcagaggcctgtggagaagaagccactgtaccattacaaagaaggaatgagtcctagtgagaagccagcatgggccaaggagatcccacatctggtagctgtaaaatcccagggacctgccttgaccgcctcccagtcagtgcacgagcagcccacaaagggcctctctgggtttcaggaggctctgaacgtgacctcccaccgcgtggagatgccacgccagaactcagatcccacctcggaaaatcctcctctccccactcgcattgaaaagtttgaccgaagctcttggttacgacaggaagaagacattccaccaaaggtgcctcaaagaacaacttctatatccccagcattagccagaaagaattctcctgggaatggtagtgctctgggacccagactaggatctcaacccatcagagcaagcaaccctgatctccggagaactgagcccatcttggagagccccttgcagaggaccagcagtggcagttcctccagctccagcacccctagctcccagcccagctcccaaggaggctcccagcctggatcacaagcaggatccagtgaacgcaccagagttcgagccaacagtaagtcagaaggatcacctgtgctcccccatgagcctgccaaggtgaaaccagaagaatccagggacattacccggcccagtcgaccagctgatctgacggcattagccaaagaactaagagaactccggattgaagaaacaaaccgcccaatgaagaaggtgactgattactcctcctccagtgaggagtcagaaagtagcgaggaagaggaggaagatggagagagcgagacccatgatgggacagtggctgtcagcgacatacccagactgataccaacaggagctccaggcagcaacgagcagtacaatgtgggaatggtggggacgcatgggctggagacctctcatgcggacagtttcagcggcagtatttcaagagaaggaaccttgatgattagagagacgtctggagagaagaagcgatctggccacagtgacagcaatggctttgctggccacatcaacctccctgacctggtgcagcagagccattctccagctggaaccccgactgagggactggggcgcgtctcaacccattcccaggagatggactctgggactgaatatggcatggggagcagcaccaaagcctccttcaccccctttgtggaccccagagtataccagacgtctcccactgatgaagatgaagaggatgaggaatcatcagccgcagctctgtttactagcgaacttcttaggcaagaacaggccaaactcaatgaagcaagaaagatttcggtggtaaatgtaaacccaaccaacattcggcctcatagcgacacaccagaaatcagaaaatacaagaaacgattcaactcagaaatactttgtgcagctctgtggggtgtaaaccttctggtggggactgaaaatggcctgatgcttttggaccgaagtgggcaaggcaaagtctataatctgatcaaccggaggcgatttcagcagatggatgtgctagagggactgaatgtccttgtgacaatttcaggaaagaagaataagctacgagtttactatctttcatggttaagaaacagaatactacataatgacccagaagtagaaaagaaacaaggctggatcactgttggggacttggaaggctgtatacattataaagttgttaaatatgaaaggatcaaatttttggtgattgccttaaagaatgctgtggaaatatatgcttgggctcctaaaccgtatcataaattcatggcatttaagtcttttgcagatctccagcacaagcctctgctagttgatctcacggtagaagaaggtcaaagattaaaggttatttttggttcacacactggtttccatgtaattgatgttgattcaggaaactcttatgatatctacataccatctcatattcagggcaatatcactcctcatgctattgtcatcttgcctaaaacagatggaatggaaatgcttgtttgctatgaggatgagggggtgtatgtaaacacctatggccggataactaaggatgtggtgctccaatggggagaaatgcccacgtctgtggcctacattcattccaatcagataatgggctggggcgagaaagctattgagatccggtcagtggaaacaggacatttggatggagtatttatgcataagcgagctcaaaggttaaagtttctatgtgaaagaaatgataaggtattttttgcatccgtgcgatctggaggaagtagccaagtgtttttcatgaccctcaacagaaattccatgatgaactggtaacagaagagcacttggcacttatcttcatggcgttatttctaatttaaaagaacataactcatgtggacttatgccagtctagaggcagaatcagaaggcttggttgaacatatcgctttccctttttcctctccctccgcccctcccagtacagtccatctttcaatgttgcagcctggttgagaaggagagaaaaaggtggcaggaatttccaggagatccccaagaatgctgccttgtctgtggacaaagatggaccatgtgcccttcggaattagggatagaaacaaatattgtgtgctcttaacgattaagctgtgttatggtgggttttcaggtttttaccttttttctttacccctttactctgcaagaatggggaaagaatgcatactgcgaaaatgagtcttttaaattctgtctgcctactagttttaagtatatggtatgttgtaaaatttccaatgatgagagacagcacaataaatgtaccttatctccttaggctgaaggccataactacatagtggagtaatttaagaactctcttgccttcaccaacccaaaaggttgctttttgatagcaactggctaatgaatttttaaaaagagaagaaaaatactagttttcccctcttttgggaaatagattttaaatggctaaactactagccttaaaactactagtctaataaaatcaactaccacttttgtgaatctgacaggccacatttttatatggccctttacagaatggagtgtgttgaacaggatactaacgccattgagttgagctggcctagcgatggagggacactctaacacaactttccctcagctattatgcaacagatcagggaaaaagatgggatgacagatggggtcagacagaaagagcttctgggaaacaagcttacatagtcttttttaaaatgcacaaagcctcccagctaagaggtcacttggtttgggcttcattaggactgagactttgttgagttctttctgggacttggagagtggatgatattcaggctctgaacattcccagcgctctcccgagggtgccactttctcaagatgaaaactgtgactgaaaaaattaataataaatgtttctgagctgcctgtgttctccctgtgtgggtgagagaagggactagactcctaagcctgcctcagatacaagaggcatcattggctccaattttagagaacttgaaagcaaggctttggacaaaattttgagaccctaatcactttaccttcctccaaattacccaacatacggtaaacaacatttgtgcagaagtatgtatgtatttagttcaggttgacttgtgtccttataaactcttactcaaatgatttgaactttaaaaaaaaaa

SEQ ID NO: 4859 - DNA, 5564 bp, Homo sapiens
attataacagccaatgcagccgccatccacgcacaagcaaagaagcatgtcccatttaaatacacccacgcagccccagcgcccttagccgatcggggcgctcagcccacacgcaccgctgctcggggcttggagatccgcgcaggctgggctcccggacccggcggaccgacgcgcggaggatcgggatccggcgctgtggggctggggtgggcgggggaggctgggcccggggcctctggcgcgacacccgcatgaggacgcgagtgaaatagaccaaggtggaatttccaagggaaaagcttcggggtggttttggtccatttctccagcgaagaagtagacatggcgagcgactccccggctcgaagcctggatgaaatagatctctcggctctgagggaccccgcagggatctttgaattggtggaacttgttggaaatggaacatacgggcaagtttataagggtcgtcatgtcaaaacgggccagcttgcagccatcaaggttatggatgtcacaggggatgaagaggaagaaatcaaacaagaaattaacatgttgaagaaatattctcatcaccggaatattgctacatactatggtgcttttatcaaaaagaacccaccaggcatggatgaccaactttggttggtgatggagttttgtggtgctggctctgtcaccgacctgatcaagaacacaaaaggtaacacgttgaaagaggagtggattgcatacatctgcagggaaatcttacgggggctgagtcacctgcaccagcataaagtgattcatcgagatattaaagggcaaaatgtcttgctgactgaaaatgcagaagttaaactagtggactttggagtcagtgctcagcttgatcgaacagtgggcaggaggaatactttcattggaactccctactggatggcaccagaagttattgcctgtgatgaaaacccagatgccacatatgatttcaagagtgacttgtggtctttgggtatcaccgccattgaaatggcagaaggtgctccccctctctgtgacatgcaccccatgagagctctcttcctcatcccccggaacccagcgcctcggctgaagtctaagaagtggtcaaaaaaattccagtcatttattgagagctgcttggtaaagaatcacagccagcgaccagcaacagaacaattgatgaagcatccatttatacgagaccaacctaatgagcgacaggtccgcattcaactcaaggaccatattgatagaacaaagaagaagcgaggagaaaaagatgagacagagtatgagtacagtggaagtgaggaagaagaggaggagaatgactcaggagagcccagctccatcctgaatctgccaggggagtcgacgctgcggagggactttctgaggctgcagctggccaacaaggagcgttctgaggccctacggaggcagcagctggagcagcagcagcgggagaatgaggagcacaagcggcagctgctggccgagcgtcagaagcgcatcgaggagcagaaagagcagaggcggcggctggaggagcaacaaaggcgagagaaggagctgcggaagcagcaggagagggagcagcgccggcactatgaggagcagatgcgccgggaggaggagaggaggcgtgcggagcatgaacaggaatataagcgcaaacaattggaagaacagagacaagcagaaagactgcagaggcagctaaagcaagaaagagactacttagtttcccttcagcatcagcggcaggagcagaggcctgtggagaagaagccactgtaccattacaaagaaggaatgagtcctagtgagaagccagcatgggccaaggagatcccacatctggtagctgtaaaatcccagggacctgccttgaccgcctcccagtcagtgcacgagcagcccacaaagggcctctctgggtttcaggaggctctgaacgtgacctcccaccgcgtggagatgccacgccagaactcagatcccacctcggaaaatcctcctctccccactcgcattgaaaagtttgaccgaagctcttggttacgacaggaagaagacattccaccaaaggtgcctcaaagaacaacttctatatccccagcattagccagaaagaattctcctgggaatggtagtgctctgggacccagactaggatctcaacccatcagagcaagcaaccctgatctccggagaactgagcccatcttggagagccccttgcagaggaccagcagtggcagttcctccagctccagcacccctagctcccagcccagctcccaaggaggctcccagcctggatcacaagcaggatccagtgaacgcaccagagttcgagccaacagtaagtcagaaggatcacctgtgctcccccatgagcctgccaaggtgaaaccagaagaatccagggacattacccggcccagtcgaccagctagctacaaaaaagctatagatgaggatctgacggcattagccaaagaactaagagaactccggattgaagaaacaaaccgcccaatgaagaaggtgactgattactcctcctccagtgaggagtcagaaagtagcgaggaagaggaggaagatggagagagcgagacccatgatgggacagtggctgtcagcgacatacccagactgataccaacaggagctccaggcagcaacgagcagtacaatgtgggaatggtggggacgcatgggctggagacctctcatgcggacagtttcagcggcagtatttcaagagaaggaaccttgatgattagagagacgtctggagagaagaagcgatctggccacagtgacagcaatggctttgctggccacatcaacctccctgacctggtgcagcagagccattctccagctggaaccccgactgagggactggggcgcgtctcaacccattcccaggagatggactctgggactgaatatggcatggggagcagcaccaaagcctccttcaccccctttgtggaccccagagtataccagacgtctcccactgatgaagatgaagaggatgaggaatcatcagccgcagctctgtttactagcgaacttcttaggcaagaacaggccaaactcaatgaagcaagaaagatttcggtggtaaatgtaaacccaaccaacattcggcctcatagcgacacaccagaaatcagaaaatacaagaaacgattcaactcagaaatactttgtgcagctctgtggggtgtaaaccttctggtggggactgaaaatggcctgatgcttttggaccgaagtgggcaaggcaaagtctataatctgatcaaccggaggcgatttcagcagatggatgtgctagagggactgaatgtccttgtgacaatttcaggaaagaagaataagctacgagtttactatctttcatggttaagaaacagaatactacataatgacccagaagtagaaaagaaacaaggctggatcactgttggggacttggaaggctgtatacattataaagttgttaaatatgaaaggatcaaatttttggtgattgccttaaagaatgctgtggaaatatatgcttgggctcctaaaccgtatcataaattcatggcatttaagtcttttgcagatctccagcacaagcctctgctagttgatctcacggtagaagaaggtcaaagattaaaggttatttttggttcacacactggtttccatgtaattgatgttgattcaggaaactcttatgatatctacataccatctcatattcagggcaatatcactcctcatgctattgtcatcttgcctaaaacagatggaatggaaatgcttgtttgctatgaggatgagggggtgtatgtaaacacctatggccggataactaaggatgtggtgctccaatggggagaaatgcccacgtctgtggcctacattcattccaatcagataatgggctggggcgagaaagctattgagatccggtcagtggaaacaggacatttggatggagtatttatgcataagcgagctcaaaggttaaagtttctatgtgaaagaaatgataaggtattttttgcatccgtgcgatctggaggaagtagccaagtgtttttcatgaccctcaacagaaattccatgatgaactggtaacagaagagcacttggcacttatcttcatggcgttatttctaatttaaaagaacataactcatgtggacttatgccagtctagaggcagaatcagaaggcttggttgaacatatcgctttccctttttcctctccctccgcccctcccagtacagtccatctttcaatgttgcagcctggttgagaaggagagaaaaaggtggcaggaatttccaggagatccccaagaatgctgccttgtctgtggacaaagatggaccatgtgcccttcggaattagggatagaaacaaatattgtgtgctcttaacgattaagctgtgttatggtgggttttcaggtttttaccttttttctttacccctttactctgcaagaatggggaaagaatgcatactgcgaaaatgagtcttttaaattctgtctgcctactagttttaagtatatggtatgttgtaaaatttccaatgatgagagacagcacaataaatgtaccttatctccttaggctgaaggccataactacatagtggagtaatttaagaactctcttgccttcaccaacccaaaaggttgctttttgatagcaactggctaatgaatttttaaaaagagaagaaaaatactagttttcccctcttttgggaaatagattttaaatggctaaactactagccttaaaactactagtctaataaaatcaactaccacttttgtgaatctgacaggccacatttttatatggccctttacagaatggagtgtgttgaacaggatactaacgccattgagttgagctggcctagcgatggagggacactctaacacaactttccctcagctattatgcaacagatcagggaaaaagatgggatgacagatggggtcagacagaaagagcttctgggaaacaagcttacatagtcttttttaaaatgcacaaagcctcccagctaagaggtcacttggtttgggcttcattaggactgagactttgttgagttctttctgggacttggagagtggatgatattcaggctctgaacattcccagcgctctcccgagggtgccactttctcaagatgaaaactgtgactgaaaaaattaataataaatgtttctgagctgcctgtgttctccctgtgtgggtgagagaagggactagactcctaagcctgcctcagatacaagaggcatcattggctccaattttagagaacttgaaagcaaggctttggacaaaattttgagaccctaatcactttaccttcctccaaattacccaacatacggtaaacaacatttgtgcagaagtatgtatgtatttagttcaggttgacttgtgtccttataaactcttactcaaatgatttgaactttaaaaaaaaaa

SEQ ID NO: 4860 - DNA, 5540 bp, Homo sapiens
attataacagccaatgcagccgccatccacgcacaagcaaagaagcatgtcccatttaaatacacccacgcagccccagcgcccttagccgatcggggcgctcagcccacacgcaccgctgctcggggcttggagatccgcgcaggctgggctcccggacccggcggaccgacgcgcggaggatcgggatccggcgctgtggggctggggtgggcgggggaggctgggcccggggcctctggcgcgacacccgcatgaggacgcgagtgaaatagaccaaggtggaatttccaagggaaaagcttcggggtggttttggtccatttctccagcgaagaagtagacatggcgagcgactccccggctcgaagcctggatgaaatagatctctcggctctgagggaccccgcagggatctttgaattggtggaacttgttggaaatggaacatacgggcaagtttataagggtcgtcatgtcaaaacgggccagcttgcagccatcaaggttatggatgtcacaggggatgaagaggaagaaatcaaacaagaaattaacatgttgaagaaatattctcatcaccggaatattgctacatactatggtgcttttatcaaaaagaacccaccaggcatggatgaccaactttggttggtgatggagttttgtggtgctggctctgtcaccgacctgatcaagaacacaaaaggtaacacgttgaaagaggagtggattgcatacatctgcagggaaatcttacgggggctgagtcacctgcaccagcataaagtgattcatcgagatattaaagggcaaaatgtcttgctgactgaaaatgcagaagttaaactagtggactttggagtcagtgctcagcttgatcgaacagtgggcaggaggaatactttcattggaactccctactggatggcaccagaagttattgcctgtgatgaaaacccagatgccacatatgatttcaagagtgacttgtggtctttgggtatcaccgccattgaaatggcagaaggtgctccccctctctgtgacatgcaccccatgagagctctcttcctcatcccccggaacccagcgcctcggctgaagtctaagaagtggtcaaaaaaattccagtcatttattgagagctgcttggtaaagaatcacagccagcgaccagcaacagaacaattgatgaagcatccatttatacgagaccaacctaatgagcgacaggtccgcattcaactcaaggaccatattgatagaacaaagaagaagcgaggagaaaaagatgagacagagtatgagtacagtggaagtgaggaagaagaggaggagaatgactcaggagagcccagctccatcctgaatctgccaggggagtcgacgctgcggagggactttctgaggctgcagctggccaacaaggagcgttctgaggccctacggaggcagcagctggagcagcagcagcgggagaatgaggagcacaagcggcagctgctggccgagcgtcagaagcgcatcgaggagcagaaagagcagaggcggcggctggaggagcaacaaaggcgagagaaggagctgcggaagcagcaggagagggagcagcgccggcactatgaggagcagatgcgccgggaggaggagaggaggcgtgcggagcatgaacaggaatataagcgcaaacaattggaagaacagagacaagcagaaagactgcagaggcagctaaagcaagaaagagactacttagtttcccttcagcatcagcggcaggagcagaggcctgtggagaagaagccactgtaccattacaaagaaggaatgagtcctagtgagaagccagcatgggccaaggagatcccacatctggtagctgtaaaatcccagggacctgccttgaccgcctcccagtcagtgcacgagcagcccacaaagggcctctctgggtttcaggaggctctgaacgtgacctcccaccgcgtggagatgccacgccagaactcagatcccacctcggaaaatcctcctctccccactcgcattgaaaagtttgaccgaagctcttggttacgacaggaagaagacattccaccaaaggtgcctcaaagaacaacttctatatccccagcattagccagaaagaattctcctgggaatggtagtgctctgggacccagactaggatctcaacccatcagagcaagcaaccctgatctccggagaactgagcccatcttggagagccccttgcagaggaccagcagtggcagttcctccagctccagcacccctagctcccagcccagctcccaaggaggctcccagcctggatcacaagcaggatccagtgaacgcaccagagttcgagccaacagtaagtcagaaggatcacctgtgctcccccatgagcctgccaaggtgaaaccagaagaatccagggacattacccggcccagtcgaccagctgatctgacggcattagccaaagaactaagagaactccggattgaagaaacaaaccgcccaatgaagaaggtgactgattactcctcctccagtgaggagtcagaaagtagcgaggaagaggaggaagatggagagagcgagacccatgatgggacagtggctgtcagcgacatacccagactgataccaacaggagctccaggcagcaacgagcagtacaatgtgggaatggtggggacgcatgggctggagacctctcatgcggacagtttcagcggcagtatttcaagagaaggaaccttgatgattagagagacgtctggagagaagaagcgatctggccacagtgacagcaatggctttgctggccacatcaacctccctgacctggtgcagcagagccattctccagctggaaccccgactgagggactggggcgcgtctcaacccattcccaggagatggactctgggactgaatatggcatggggagcagcaccaaagcctccttcaccccctttgtggaccccagagtataccagacgtctcccactgatgaagatgaagaggatgaggaatcatcagccgcagctctgtttactagcgaacttcttaggcaagaacaggccaaactcaatgaagcaagaaagatttcggtggtaaatgtaaacccaaccaacattcggcctcatagcgacacaccagaaatcagaaaatacaagaaacgattcaactcagaaatactttgtgcagctctgtggggtgtaaaccttctggtggggactgaaaatggcctgatgcttttggaccgaagtgggcaaggcaaagtctataatctgatcaaccggaggcgatttcagcagatggatgtgctagagggactgaatgtccttgtgacaatttcaggaaagaagaataagctacgagtttactatctttcatggttaagaaacagaatactacataatgacccagaagtagaaaagaaacaaggctggatcactgttggggacttggaaggctgtatacattataaagttgttaaatatgaaaggatcaaatttttggtgattgccttaaagaatgctgtggaaatatatgcttgggctcctaaaccgtatcataaattcatggcatttaagtcttttgcagatctccagcacaagcctctgctagttgatctcacggtagaagaaggtcaaagattaaaggttatttttggttcacacactggtttccatgtaattgatgttgattcaggaaactcttatgatatctacataccatctcatattcagggcaatatcactcctcatgctattgtcatcttgcctaaaacagatggaatggaaatgcttgtttgctatgaggatgagggggtgtatgtaaacacctatggccggataactaaggatgtggtgctccaatggggagaaatgcccacgtctgtggcctacattcattccaatcagataatgggctggggcgagaaagctattgagatccggtcagtggaaacaggacatttggatggagtatttatgcataagcgagctcaaaggttaaagtttctatgtgaaagaaatgataaggtattttttgcatccgtgcgatctggaggaagtagccaagtgtttttcatgaccctcaacagaaattccatgatgaactggtaacagaagagcacttggcacttatcttcatggcgttatttctaatttaaaagaacataactcatgtggacttatgccagtctagaggcagaatcagaaggcttggttgaacatatcgctttccctttttcctctccctccgcccctcccagtacagtccatctttcaatgttgcagcctggttgagaaggagagaaaaaggtggcaggaatttccaggagatccccaagaatgctgccttgtctgtggacaaagatggaccatgtgcccttcggaattagggatagaaacaaatattgtgtgctcttaacgattaagctgtgttatggtgggttttcaggtttttaccttttttctttacccctttactctgcaagaatggggaaagaatgcatactgcgaaaatgagtcttttaaattctgtctgcctactagttttaagtatatggtatgttgtaaaatttccaatgatgagagacagcacaataaatgtaccttatctccttaggctgaaggccataactacatagtggagtaatttaagaactctcttgccttcaccaacccaaaaggttgctttttgatagcaactggctaatgaatttttaaaaagagaagaaaaatactagttttcccctcttttgggaaatagattttaaatggctaaactactagccttaaaactactagtctaataaaatcaactaccacttttgtgaatctgacaggccacatttttatatggccctttacagaatggagtgtgttgaacaggatactaacgccattgagttgagctggcctagcgatggagggacactctaacacaactttccctcagctattatgcaacagatcagggaaaaagatgggatgacagatggggtcagacagaaagagcttctgggaaacaagcttacatagtcttttttaaaatgcacaaagcctcccagctaagaggtcacttggtttgggcttcattaggactgagactttgttgagttctttctgggacttggagagtggatgatattcaggctctgaacattcccagcgctctcccgagggtgccactttctcaagatgaaaactgtgactgaaaaaattaataataaatgtttctgagctgcctgtgttctccctgtgtgggtgagagaagggactagactcctaagcctgcctcagatacaagaggcatcattggctccaattttagagaacttgaaagcaaggctttggacaaaattttgagaccctaatcactttaccttcctccaaattacccaacatacggtaaacaacatttgtgcagaagtatgtatgtatttagttcaggttgacttgtgtccttataaactcttactcaaatgatttgaactttaaaaaaaaaa

SEQ ID NO: 4861 - DNA, 4559 bp, Homo sapiens; identical to SEQ ID NO: 667

SEQ ID NO: 4862 - DNA, 4517 bp, Homo sapiens
agattaacgcaaacccggaagcggatcgggtggagtgtaggtcatatcgccgcgttgactagataacgaaggacaatgcatatatacaaaattgctgtattgcctggtgatatgcagctgtacctgtgacatcataattgcaccctccgacatgatatctcttccaaatgcttgatgaaaaaggtgggaggatcacttgagccagggagttgaaggctgcagtgagccctgtttttgccaccacactccagcttgggattgattcctaaagactcatgttacgtgaggaagcagctcagaagaggaaaggaaaggagccaggcatggctcttcctcagggacgcttgactttccgggatgtggctatagaattctcattggcagagtggaaatgcctgaacccttcacagagggctttgtacagggaagtgatgttggagaactacaggaacctggaggctgtggatatctcttccaaatgcatgatgaaggaggtcttgtcaacagggcaaggcaatacagaagtgatccacacagggacattgcaaagacatgaaagtcatcacattggagatttttgcttccaggaaattgagaaagaaattcatgacattgagtttcagtgtcaagaagatgaaagaaatggccttgaagcacccatgacaaaaataaaaaagttgactggtagcacagaccaacatgatcacaggcatgctggaaacaagcctattaaagatcagcttggatcaagcttttattcacatctgcctgaactccacatatttcagatcaaaggtgaaattggtaatcaacttgagaagtctactaatgatgctccctcagtttcaacattccaaagaatttcctgtaggccccaaacccagatttctaataactatgggaataatcccctgaattcttcattactcccacaaaaacaggaagtacacatgagagaaaaatctttccaatgtaataagagtggcaaagcctttaattgtagctcactcttaaggaaacaccagataccccatttaggagacaaacaatataaatgtgatgtatgtggcaagctctttaatcacgagcaataccttgcatgccatgatagatgtcacactgttgagaaaccttacaagtgtaaagagtgtggcaagaccttcagtcaggagtcatcccttacctgccatcgtagacttcatactggagtaaaacgttacaattgtaatgagtgtggcaagatctttggtcaaaattcagcccttctaattgataaggcaattgatactggagaaaatccttacaagtgtaatgaatgtgacaaggcttttaatcaacaatcacaactttcacatcatagaattcatactggagagaaaccttacaaatgtgaagaatgtgacaaagttttcagtcggaaatcaaccattgagacacataagagaattcatactggagagaaaccatacagatgtaaggtttgtgacacagctttcacgtggcattcacagctggctcgacatagaagaattcatactgcaaagaaaacttataaatgtaatgagtgtggcaagaccttcagtcacaagtcatcccttgtatgccatcatagacttcatggtggagagaaatcttacaaatgtaaggtttgtgacaaggcttttgtgtggagttcacaactggcaaaacatactagaattgactgtggagaaaaaccttacaagtgtaatgaatgtgggaagacctttggtcaaaattcagatcttttaattcataagtcaattcatactggggagcaaccttacaaatgtgatgaatgtgaaaaggttttcagtcgtaaatcaagccttgagacacataagataggtcatactggagagaaaccatacaaatgtaaggtttgtgacaaggcttttgcgtgtcattcctatctggcaaaacatactagaattcatagtggagagaaaccttacaagtgtaatgagtgcagcaagaccttcagtcacaggtcataccttgtatgccatcatagagttcatagtggtgagaaaccttacaagtgtaatgagtgcagcaagaccttcagtcgcaggtcatcccttcattgccatcgtagacttcatagtggtgagaaaccttacaagtgtaatgagtgtggcaataccttccgtcactgctcatcccttatataccatcgtagacttcatactggagagaaatcttacaaatgtacaatttgtgacaaggctttcgtgcgtaattcactcctgtcaagacataccagaattcacactgcagagaaaccttacaagtgtaatgaatgtgggaaggcttttaatcaacaatcacacctttcacgtcatcatagaattcatactggagagaaaccttagaaatgtgaagcatgtgacaaagtttccatttggaaatcacaccttaaagacataggagaatttatactggagagaaagcttacaaatgtaaggtttctgacaagacttgggagtgattcacacctggaacaacatactggacttcacactggagagaaaccttacaagtgtaatgagtgtggcaaagcctttggcaagcagtcaacacttattcaccatcaggcaattcatggtgtagggaaacttgactaatgtaatgattgtcacaaagtcttcagtaatgctacaacgattacaaatcattggagaatccataatgaagagagatcttacaagtgtaataaatgtggcaaatttttcagagatcgttcacatattgcaggtcatcggtgaactcatactggagagaaaccttacaaatgtcatgactgtgccaaggtcttcagtcaagcttcatcctatgcaaaacataggagaatttatacaggagagaaacctcacaagtgtgatgattgtggcaaagcctttgcttcacgttcacacgtcattagacatcagagaatctatactggacagaaatcttacaaatgtcatcagtgtggcaaggtcttcagtccaagatcactccatgcagaacatcagaaaattcatttttgagataaccgttcccaatgaaatgagtatagcaaaccatcaagcattaattgacattggagtcaattcagcattgacttgagtttgtgttgacttaacattgagttcaagcctttattgacattcaagtgtttatgttaagaggatggggccaggtgtggtggctccgacctgtaatcccagcacgtcgggaggccaaggcacataggtcacttgaggtcaggagtttgaaaccagcatggccaacagatgtgagccacttttctcagcctgttttttgtttcttattttctattatttttttgagccagtactttttaaagagatagtacttttttcagttagtactttttgaaagggatatatcatagtaatttttaaaagggatatgaggccaggcacggaggctcatgcctataatcccagcactttgggaggccgaggcaggcagatcacggggtcaggagatcgagactttcctggctaacagggtgaatccctgtctctactaaaaatacaaaaaattagctgggcatggtggctggcgcctgtagtcccagctactccagatgctgaggcaggagaatggcatgaacctgtgaggcggagcttgcagggagtcgagatcgcaccactgggctccagcctgggcgacagagtgagagtctatctcaaaaaaaaaaaaaaaaaaaaggatatcaaagcctcggtacgtggtggctcatccctgcaatcagagtactttggtcgacccatgtgaactggtcacctaaggtcacaatttcaaaagcaccctaacatggtgaaaccccatctctactaaaaatacaaaagttagccgggggtgttggtgtgcacctttagttccagctacttgggaggctggggcatgagaattgcttaaacctaggaggtagaagttgcagtgaaccaaaattgtgccactatactgcagcctgggtggcagagtgagtctccatctcaaacaaacaaaaaataacaaaaaaagacctcaaaaatgcttttcttctcgtataatggacttccttctttttctttctggttcctcttcatttctctctttattttttatttatttatttatttattttgcagtttgagtttgagataaatctaagttataaaagttgtatttcttaatacataatgacttctgaaagatgcctttgcagcatcctataatcagctcacatcattcgtttctgtacttgtatattttccagttattttccggttgaccccagaattcgttagatttttttaaaaaacaatttcaaaatagttgctgttttaaattagttgcatccagttcatatcaatgtctgcatgctttctagtctttgttatttattgaaaacctttggtacctaaacttaagtttgattgtttcagtgtgtacttggtaaatatgtcagtggccttttaactaaacatcaaaatgtactttaa

SEQ ID NO: 4863 - DNA, 4417 bp, Homo sapiens
agattaacgcaaacccggaagcggatcgggtggagtgtaggtcatatcgccgcgatatctcttccaaatgcttgatgaaaaaggtgggaggatcacttgagccagggagttgaaggctgcagtgagccctgtttttgccaccacactccagcttgggattgattcctaaagactcatgttacgtgaggaagcagctcagaagaggaaaggaaaggagccaggcatggctcttcctcagggacgcttgactttccgggatgtggctatagaattctcattggcagagtggaaatgcctgaacccttcacagagggctttgtacagggaagtgatgttggagaactacaggaacctggaggctgtggatatctcttccaaatgcatgatgaaggaggtcttgtcaacagggcaaggcaatacagaagtgatccacacagggacattgcaaagacatgaaagtcatcacattggagatttttgcttccaggaaattgagaaagaaattcatgacattgagtttcagtgtcaagaagatgaaagaaatggccttgaagcacccatgacaaaaataaaaaagttgactggtagcacagaccaacatgatcacaggcatgctggaaacaagcctattaaagatcagcttggatcaagcttttattcacatctgcctgaactccacatatttcagatcaaaggtgaaattggtaatcaacttgagaagtctactaatgatgctccctcagtttcaacattccaaagaatttcctgtaggccccaaacccagatttctaataactatgggaataatcccctgaattcttcattactcccacaaaaacaggaagtacacatgagagaaaaatctttccaatgtaataagagtggcaaagcctttaattgtagctcactcttaaggaaacaccagataccccatttaggagacaaacaatataaatgtgatgtatgtggcaagctctttaatcacgagcaataccttgcatgccatgatagatgtcacactgttgagaaaccttacaagtgtaaagagtgtggcaagaccttcagtcaggagtcatcccttacctgccatcgtagacttcatactggagtaaaacgttacaattgtaatgagtgtggcaagatctttggtcaaaattcagcccttctaattgataaggcaattgatactggagaaaatccttacaagtgtaatgaatgtgacaaggcttttaatcaacaatcacaactttcacatcatagaattcatactggagagaaaccttacaaatgtgaagaatgtgacaaagttttcagtcggaaatcaaccattgagacacataagagaattcatactggagagaaaccatacagatgtaaggtttgtgacacagctttcacgtggcattcacagctggctcgacatagaagaattcatactgcaaagaaaacttataaatgtaatgagtgtggcaagaccttcagtcacaagtcatcccttgtatgccatcatagacttcatggtggagagaaatcttacaaatgtaaggtttgtgacaaggcttttgtgtggagttcacaactggcaaaacatactagaattgactgtggagaaaaaccttacaagtgtaatgaatgtgggaagacctttggtcaaaattcagatcttttaattcataagtcaattcatactggggagcaaccttacaaatgtgatgaatgtgaaaaggttttcagtcgtaaatcaagccttgagacacataagataggtcatactggagagaaaccatacaaatgtaaggtttgtgacaaggcttttgcgtgtcattcctatctggcaaaacatactagaattcatagtggagagaaaccttacaagtgtaatgagtgcagcaagaccttcagtcacaggtcataccttgtatgccatcatagagttcatagtggtgagaaaccttacaagtgtaatgagtgcagcaagaccttcagtcgcaggtcatcccttcattgccatcgtagacttcatagtggtgagaaaccttacaagtgtaatgagtgtggcaataccttccgtcactgctcatcccttatataccatcgtagacttcatactggagagaaatcttacaaatgtacaatttgtgacaaggctttcgtgcgtaattcactcctgtcaagacataccagaattcacactgcagagaaaccttacaagtgtaatgaatgtgggaaggcttttaatcaacaatcacacctttcacgtcatcatagaattcatactggagagaaaccttagaaatgtgaagcatgtgacaaagtttccatttggaaatcacaccttaaagacataggagaatttatactggagagaaagcttacaaatgtaaggtttctgacaagacttgggagtgattcacacctggaacaacatactggacttcacactggagagaaaccttacaagtgtaatgagtgtggcaaagcctttggcaagcagtcaacacttattcaccatcaggcaattcatggtgtagggaaacttgactaatgtaatgattgtcacaaagtcttcagtaatgctacaacgattacaaatcattggagaatccataatgaagagagatcttacaagtgtaataaatgtggcaaatttttcagagatcgttcacatattgcaggtcatcggtgaactcatactggagagaaaccttacaaatgtcatgactgtgccaaggtcttcagtcaagcttcatcctatgcaaaacataggagaatttatacaggagagaaacctcacaagtgtgatgattgtggcaaagcctttgcttcacgttcacacgtcattagacatcagagaatctatactggacagaaatcttacaaatgtcatcagtgtggcaaggtcttcagtccaagatcactccatgcagaacatcagaaaattcatttttgagataaccgttcccaatgaaatgagtatagcaaaccatcaagcattaattgacattggagtcaattcagcattgacttgagtttgtgttgacttaacattgagttcaagcctttattgacattcaagtgtttatgttaagaggatggggccaggtgtggtggctccgacctgtaatcccagcacgtcgggaggccaaggcacataggtcacttgaggtcaggagtttgaaaccagcatggccaacagatgtgagccacttttctcagcctgttttttgtttcttattttctattatttttttgagccagtactttttaaagagatagtacttttttcagttagtactttttgaaagggatatatcatagtaatttttaaaagggatatgaggccaggcacggaggctcatgcctataatcccagcactttgggaggccgaggcaggcagatcacggggtcaggagatcgagactttcctggctaacagggtgaatccctgtctctactaaaaatacaaaaaattagctgggcatggtggctggcgcctgtagtcccagctactccagatgctgaggcaggagaatggcatgaacctgtgaggcggagcttgcagggagtcgagatcgcaccactgggctccagcctgggcgacagagtgagagtctatctcaaaaaaaaaaaaaaaaaaaaggatatcaaagcctcggtacgtggtggctcatccctgcaatcagagtactttggtcgacccatgtgaactggtcacctaaggtcacaatttcaaaagcaccctaacatggtgaaaccccatctctactaaaaatacaaaagttagccgggggtgttggtgtgcacctttagttccagctacttgggaggctggggcatgagaattgcttaaacctaggaggtagaagttgcagtgaaccaaaattgtgccactatactgcagcctgggtggcagagtgagtctccatctcaaacaaacaaaaaataacaaaaaaagacctcaaaaatgcttttcttctcgtataatggacttccttctttttctttctggttcctcttcatttctctctttattttttatttatttatttatttattttgcagtttgagtttgagataaatctaagttataaaagttgtatttcttaatacataatgacttctgaaagatgcctttgcagcatcctataatcagctcacatcattcgtttctgtacttgtatattttccagttattttccggttgaccccagaattcgttagatttttttaaaaaacaatttcaaaatagttgctgttttaaattagttgcatccagttcatatcaatgtctgcatgctttctagtctttgttatttattgaaaacctttggtacctaaacttaagtttgattgtttcagtgtgtacttggtaaatatgtcagtggccttttaactaaacatcaaaatgtactttaa

SEQ ID NO: 4864 - DNA, 4380 bp, Homo sapiens
aaacccggaagcggatcgggtggagtgtaggtcatatcgccgcgttgactagataacgaaggacaatgcatatatacaaaattgctgtattgcctggtgatatgcagctgtacctgtgacatcataattgcaccctccgacatgatatctcttccaaatgcttgatgaaaaaggtgggaggatcacttgagccagggagttgaaggctgcagtgagccctgtttttgccaccacactccagcttgggattgattcctaaagactcatgttacgtgaggaagcagctcagaagaggaaaggaaaggagccaggcatggctcttcctcagatatctcttccaaatgcatgatgaaggaggtcttgtcaacagggcaaggcaatacagaagtgatccacacagggacattgcaaagacatgaaagtcatcacattggagatttttgcttccaggaaattgagaaagaaattcatgacattgagtttcagtgtcaagaagatgaaagaaatggccttgaagcacccatgacaaaaataaaaaagttgactggtagcacagaccaacatgatcacaggcatgctggaaacaagcctattaaagatcagcttggatcaagcttttattcacatctgcctgaactccacatatttcagatcaaaggtgaaattggtaatcaacttgagaagtctactaatgatgctccctcagtttcaacattccaaagaatttcctgtaggccccaaacccagatttctaataactatgggaataatcccctgaattcttcattactcccacaaaaacaggaagtacacatgagagaaaaatctttccaatgtaataagagtggcaaagcctttaattgtagctcactcttaaggaaacaccagataccccatttaggagacaaacaatataaatgtgatgtatgtggcaagctctttaatcacgagcaataccttgcatgccatgatagatgtcacactgttgagaaaccttacaagtgtaaagagtgtggcaagaccttcagtcaggagtcatcccttacctgccatcgtagacttcatactggagtaaaacgttacaattgtaatgagtgtggcaagatctttggtcaaaattcagcccttctaattgataaggcaattgatactggagaaaatccttacaagtgtaatgaatgtgacaaggcttttaatcaacaatcacaactttcacatcatagaattcatactggagagaaaccttacaaatgtgaagaatgtgacaaagttttcagtcggaaatcaaccattgagacacataagagaattcatactggagagaaaccatacagatgtaaggtttgtgacacagctttcacgtggcattcacagctggctcgacatagaagaattcatactgcaaagaaaacttataaatgtaatgagtgtggcaagaccttcagtcacaagtcatcccttgtatgccatcatagacttcatggtggagagaaatcttacaaatgtaaggtttgtgacaaggcttttgtgtggagttcacaactggcaaaacatactagaattgactgtggagaaaaaccttacaagtgtaatgaatgtgggaagacctttggtcaaaattcagatcttttaattcataagtcaattcatactggggagcaaccttacaaatgtgatgaatgtgaaaaggttttcagtcgtaaatcaagccttgagacacataagataggtcatactggagagaaaccatacaaatgtaaggtttgtgacaaggcttttgcgtgtcattcctatctggcaaaacatactagaattcatagtggagagaaaccttacaagtgtaatgagtgcagcaagaccttcagtcacaggtcataccttgtatgccatcatagagttcatagtggtgagaaaccttacaagtgtaatgagtgcagcaagaccttcagtcgcaggtcatcccttcattgccatcgtagacttcatagtggtgagaaaccttacaagtgtaatgagtgtggcaataccttccgtcactgctcatcccttatataccatcgtagacttcatactggagagaaatcttacaaatgtacaatttgtgacaaggctttcgtgcgtaattcactcctgtcaagacataccagaattcacactgcagagaaaccttacaagtgtaatgaatgtgggaaggcttttaatcaacaatcacacctttcacgtcatcatagaattcatactggagagaaaccttagaaatgtgaagcatgtgacaaagtttccatttggaaatcacaccttaaagacataggagaatttatactggagagaaagcttacaaatgtaaggtttctgacaagacttgggagtgattcacacctggaacaacatactggacttcacactggagagaaaccttacaagtgtaatgagtgtggcaaagcctttggcaagcagtcaacacttattcaccatcaggcaattcatggtgtagggaaacttgactaatgtaatgattgtcacaaagtcttcagtaatgctacaacgattacaaatcattggagaatccataatgaagagagatcttacaagtgtaataaatgtggcaaatttttcagagatcgttcacatattgcaggtcatcggtgaactcatactggagagaaaccttacaaatgtcatgactgtgccaaggtcttcagtcaagcttcatcctatgcaaaacataggagaatttatacaggagagaaacctcacaagtgtgatgattgtggcaaagcctttgcttcacgttcacacgtcattagacatcagagaatctatactggacagaaatcttacaaatgtcatcagtgtggcaaggtcttcagtccaagatcactccatgcagaacatcagaaaattcatttttgagataaccgttcccaatgaaatgagtatagcaaaccatcaagcattaattgacattggagtcaattcagcattgacttgagtttgtgttgacttaacattgagttcaagcctttattgacattcaagtgtttatgttaagaggatggggccaggtgtggtggctccgacctgtaatcccagcacgtcgggaggccaaggcacataggtcacttgaggtcaggagtttgaaaccagcatggccaacagatgtgagccacttttctcagcctgttttttgtttcttattttctattatttttttgagccagtactttttaaagagatagtacttttttcagttagtactttttgaaagggatatatcatagtaatttttaaaagggatatgaggccaggcacggaggctcatgcctataatcccagcactttgggaggccgaggcaggcagatcacggggtcaggagatcgagactttcctggctaacagggtgaatccctgtctctactaaaaatacaaaaaattagctgggcatggtggctggcgcctgtagtcccagctactccagatgctgaggcaggagaatggcatgaacctgtgaggcggagcttgcagggagtcgagatcgcaccactgggctccagcctgggcgacagagtgagagtctatctcaaaaaaaaaaaaaaaaaaaaggatatcaaagcctcggtacgtggtggctcatccctgcaatcagagtactttggtcgacccatgtgaactggtcacctaaggtcacaatttcaaaagcaccctaacatggtgaaaccccatctctactaaaaatacaaaagttagccgggggtgttggtgtgcacctttagttccagctacttgggaggctggggcatgagaattgcttaaacctaggaggtagaagttgcagtgaaccaaaattgtgccactatactgcagcctgggtggcagagtgagtctccatctcaaacaaacaaaaaataacaaaaaaagacctcaaaaatgcttttcttctcgtataatggacttccttctttttctttctggttcctcttcatttctctctttattttttatttatttatttatttattttgcagtttgagtttgagataaatctaagttataaaagttgtatttcttaatacataatgacttctgaaagatgcctttgcagcatcctataatcagctcacatcattcgtttctgtacttgtatattttccagttattttccggttgaccccagaattcgttagatttttttaaaaaacaatttcaaaatagttgctgttttaaattagttgcatccagttcatatcaatgtctgcatgctttctagtctttgttatttattgaaaacctttggtacctaaacttaagtttgattgtttcagtgtgtacttggtaaatatgtcagtggccttttaactaaacatcaaaatgtactttaa

SEQ ID NO: 4865 - DNA, 1393 bp, Homo sapiens; identical to SEQ ID NO: 1667

SEQ ID NO: 4866 - DNA, 1017 bp, Homo sapiens; identical to SEQ ID NO: 1674

SEQ ID NO: 4867 - DNA, 986 bp, Homo sapiens
gagtcagtgtcagcccgaaggctgaaggaaaaagagcaacagatccagggagcattcacctgccctgtctccaaacagagggagcagctatttaaggggagcaggagtgcagaacaaacaagacggcctggggatacaactctggagtcctctgagagagccaccaaggaggagcaggggagcgacggccggggcagaagttgagaccacccagcagaggagctaggccagtccatctgcatttgtcacccaagaactcttaccatgaagaccctcctactgttggcagtgatcatgatctttggcctactgcaggcccatgggaatttggtgaatttccacagaatgatcaagttgacgacaggaaaggaagccgcactcagttatggcttctacggctgccactgtggcgtgggtggcagaggatcccccaaggatgcaacggatcgctgctgtgtcactcatgactgttgctacaaacgtctggagaaacgtggatgtggcaccaaatttctgagctacaagtttagcaactcggggagcagaatcacctgtgcaaaacaggactcctgcagaagtcaactgtgtgagtgtgataaggctgctgccacctgttttgctagaaacaagacgacctacaataaaaagtaccagtactattccaataaacactgcagagggagcacccctcgttgctgagtcccctcttccctggaaaccttccacccagtgctgaatttccctctctcataccctccctccctaccctaaccaagttccttggccatgcagaaagcatccctcacccatcctagaggccaggcaggagcccttctatacccacccagaatgagacatccagcagatttccagccttctactgctctcctccacctcaactccgtgcttaaccaaagaagctgtactccggggggtctcttctgaataaagcaattagcaaatcatgtaaaaaaaaaaaaaaaaaa

SEQ ID NO: 4868 - DNA, 906 bp, Homo sapiens
gagtcagtgtcagcccgaaggctgaaggaaaaagagcaacagatccagggagcattcacctgccctgtctccaaacagagccaccaaggaggagcaggggagcgacggccggggcagaagttgagaccacccagcagaggagctaggccagtccatctgcatttgtcacccaagaactcttaccatgaagaccctcctactgttggcagtgatcatgatctttggcctactgcaggcccatgggaatttggtgaatttccacagaatgatcaagttgacgacaggaaaggaagccgcactcagttatggcttctacggctgccactgtggcgtgggtggcagaggatcccccaaggatgcaacggatcgctgctgtgtcactcatgactgttgctacaaacgtctggagaaacgtggatgtggcaccaaatttctgagctacaagtttagcaactcggggagcagaatcacctgtgcaaaacaggactcctgcagaagtcaactgtgtgagtgtgataaggctgctgccacctgttttgctagaaacaagacgacctacaataaaaagtaccagtactattccaataaacactgcagagggagcacccctcgttgctgagtcccctcttccctggaaaccttccacccagtgctgaatttccctctctcataccctccctccctaccctaaccaagttccttggccatgcagaaagcatccctcacccatcctagaggccaggcaggagcccttctatacccacccagaatgagacatccagcagatttccagccttctactgctctcctccacctcaactccgtgcttaaccaaagaagctgtactccggggggtctcttctgaataaagcaattagcaaatcatgtaaaaaaaaaaaaaaaaaa

SEQ ID NO: 4869 - DNA, 940 bp, Homo sapiens
agggagcagctatttaaggggagcaggagtgcagaacaaacaagacggcctggggatacaactctggagtcctctgagaggttggatgggagagcatgtctgtgtgtctcagagccaccaaggaggagcaggggagcgacggccggggcagaagttgagaccacccagcagaggagctaggccagtccatctgcatttgtcacccaagaactcttaccatgaagaccctcctactgttggcagtgatcatgatctttggcctactgcaggcccatgggaatttggtgaatttccacagaatgatcaagttgacgacaggaaaggaagccgcactcagttatggcttctacggctgccactgtggcgtgggtggcagaggatcccccaaggatgcaacggatcgctgctgtgtcactcatgactgttgctacaaacgtctggagaaacgtggatgtggcaccaaatttctgagctacaagtttagcaactcggggagcagaatcacctgtgcaaaacaggactcctgcagaagtcaactgtgtgagtgtgataaggctgctgccacctgttttgctagaaacaagacgacctacaataaaaagtaccagtactattccaataaacactgcagagggagcacccctcgttgctgagtcccctcttccctggaaaccttccacccagtgctgaatttccctctctcataccctccctccctaccctaaccaagttccttggccatgcagaaagcatccctcacccatcctagaggccaggcaggagcccttctatacccacccagaatgagacatccagcagatttccagccttctactgctctcctccacctcaactccgtgcttaaccaaagaagctgtactccggggggtctcttctgaataaagcaattagcaaatcatgtaaaaaaaaaaaaaaaaaa

SEQ ID NO: 4870 - DNA, 1357 bp, Homo sapiens; identical to SEQ ID NO: 250

SEQ ID NO: 4871 - DNA, 4594 bp, Homo sapiens; identical to SEQ ID NO: 1492

SEQ ID NO: 4872 - DNA, 3448 bp, Homo sapiens
tcggccaccgctcgcttcaatatggctgcccccagggagagacgaggctaccatgaaggagccgagcgcagaccctgagtccgtcacccatggatcgcagcgcggagttcaggaaatggaaggcgcaatgtttgagcaaagcggacctcagccggaagggcagtgttgacgaggatgtggtagagcttgtgcagtttctgaacatgcgagatcagtttttcaccaccagctcctgcgctggccgcatcctactccttgaccggggtataaatggttttgaggttcagaaacaaaactgttgctggctactggttacacacaaactttgtgtaaaagatgatgtgattgtagctctgaagaaagcaaatggtgatgccactttgaaatttgaaccatttgttcttcatgtgcagtgtcgacaattgcaggatgcacagattctgcattccatggcaatagattctggtttcaggaactctggcataacggtgggaaagagaggaaaaactatgttggctgtccggagtacacatggcttagaagttccattaagccataagggaaaactgatggtgacagaggaatatattgacttcctgttaaatgtggcaaatcaaaaaatggaggaaaacaagaaaagaattgagaggttttacaactgcctacagcatgctttggaaagggaaacgatgactaacttacatcccaagatcaaagagaaaaataactcatcatatattcataagaaaaaaagaaacccagaaaaaacacgtgcccagtgtattactaaagaaagtgatgaagaacttgaaaatgatgatgatgatgatctaggaatcaatgttaccatcttccctgaagattactaagctttggttctgatgtgtcttggccgtaatgtttctagtaggttttataaagctgctcttcataagagtattttagtttgttgagtgtatcagccattcataagccagtaatgacaagtgcagagcttcaaactataactttgttgcccagaggatgtgcagttgtcatctaagctctcagcagtacccggcttatcctacgacttcacctgaaatgctatagttatccctacttttttaccagtttctcccagaagcacctgcttaataaatcaaagatgtttgaatggtgtcttattctgaaataacctgacctaagacaggtatttagattattttggatacattttgaaaagggatagcataaatattttaagtaaaaagacctttattttaaataatagtggatattttaatgctggaaattagcattatagttgatatgccagaaattatatctttggttgtgatttaaacttatgctataaactaaattaatgatgtaaatacatagttttaaacattcttttagggacatgtaacttttaagtatcacttcaataatacgtattattataggaacaaagatttgggaataattgattacaggtgaggaagtactggaattccagttcaaggagataccatttcatttaggactaaaaggacaagatacaagttcacatgatgggaaaaatcagaaaacctctcgcagacaaagggtatataatggatatgaggcatcaaaaagcatggtatagtcagtgatggggaatagtccagaaaggctgaaacacagcatgtgatgcgagtcaaggtagttgatgcccaactgtgaagggccgttctaatctagcatggaggtagacagtgtttccttaatatggctgcatatcagaattacctaggtcaggacgaggcatggagatgctactttaataggccctgccgcagatcttccaaaccagaatcttaatcctggagtctaggaatctttatttttcacacaactcatccaagtggttctgataaaatcagtccagcacttttagaacccactgataacagacttattcctggagacagcatttgaggaggaattgaagatttttctaatgaaaagaaaaagggtcacatgaacagatgttgcagtgtacctgtgccagggatttcatgtgtacactttataggagaataagcaagagcttaggtaagttatagtccttaccattgggtctaaggcagtttccaggaaagcatggcaactcgttcagctatgtaagttgaactctgtaccacttgggagggaacattcccctagatgacaatgtcagtggcactcgaagttgtgcagtgcacattcttatctaccaacatatacagcagtccttctgggaaggaaatttgggcaggaaagggaactcacagtgtcggaatgcctggagcatttcttctagtctggtggacagaatatgaaagtatctgcctggcagtgcagtaaatgaaaagagaagataaatgaataaaaaaaaaagttataaataacagtaggaaagagagagtgcaggtggaacgagcctatcctgtggtgaaatgacaacacattctgcagttttaaaatctaagaggctcattgacttttcttcattcatttaaattgatctccaagaaaactatgtattttaaagattccataaactgaatatatgaatgagaattaagaagagaggggctgcttcctaatctgtttatataaggtatagtatagtataatctgtttatataaggttagtagagaggagacaccaggtgctggccataaacctaagaagacattgaatcccattcactccttaacattccttaatatacattcatgagctacataacattttaatcatcaatgatggaccatataccatatacgatatggtggccccataagattataatggacctgaaaaattcctattgctagtgatgtggtcattgtaaagctgtagcacaacacattacccacgtttgtggtgacagtcatataaaagtatggtacatataattatgtacagtgcatacataatacttgataatatgttactggtttgtgtctttgctatgctttttatcattattttagggtatactacttaaaatgttaactgtaaaacagcttctgacaggtccttcaggaagtactccagaagaaggcattgttatcatagaaggtgacagcttcatgtgtgttattgcccctgaagaccttccagtggtacaagatgtggaggaggaagacagtgatactgaggattctgaccctgtgtaggcttaggctaatgtgtgtgtttatatcttagtttttcacaaaaaggtttttccaatgttaaaaaaaatatataaaaaagcttatagaataaggatataaagaaatattttgtacagctgtacaataagctaagcattattaccaaagagtcaaaaagttttaagaaattaaagtttataaaccaaatgttcattgtgagccaaggttaatttattgaagaaataaaacatttttaatgaaaaaaaaaaaaaaaaaa

SEQ ID NO: 4873 - DNA, 3353 bp, Homo sapiens; identical to SEQ ID NO: 1430

SEQ ID NO: 4874 - DNA, 3539 bp, Homo sapiens
tggctgcccccagggagagacgaggctaccatgaaggagccgagcgcagaccctgagtccgtcacccatggatcgcagcgcggagttcaggaaatggaaggcgcaatgtttgagcaaagcggacctcagccggaagggcagtgttgacgaggatgtggtagagcttgtgcagtttctgaacatgcgagatcagtttttcaccaccagctcctgcgctggccgcatcctactccttgaccgggtgaggcccctttgcgcctgtccatcgcctgccttctagtgcgaaacttcaggagccctgttcccatccagtgacgaccggatccagcatgtctgtgtttgctcctctgagggggtataaatggttttgaggttcagaaacaaaactgttgctggctactggttacacacaaactttgtgtaaaagatgatgtgattgtagctctgaagaaagcaaatggtgatgccactttgaaatttgaaccatttgttcttcatgtgcagtgtcgacaattgcaggatgcacagattctgcattccatggcaatagattctggtttcaggaactctggcataacggtgggaaagagaggaaaaactatgttggctgtccggagtacacatggcttagaagttccattaagccataagggaaaactgatggtgacagaggaatatattgacttcctgttaaatgtggcaaatcaaaaaatggaggaaaacaagaaaagaattgagaggttttacaactgcctacagcatgctttggaaagggaaacgatgactaacttacatcccaagatcaaagagaaaaataactcatcatatattcataagaaaaaaagaaacccagaaaaaacacgtgcccagtgtattactaaagaaagtgatgaagaacttgaaaatgatgatgatgatgatctaggaatcaatgttaccatcttccctgaagattactaagctttggttctgatgtgtcttggccgtaatgtttctagtaggttttataaagctgctcttcataagagtattttagtttgttgagtgtatcagccattcataagccagtaatgacaagtgcagagcttcaaactataactttgttgcccagaggatgtgcagttgtcatctaagctctcagcagtacccggcttatcctacgacttcacctgaaatgctatagttatccctacttttttaccagtttctcccagaagcacctgcttaataaatcaaagatgtttgaatggtgtcttattctgaaataacctgacctaagacaggtatttagattattttggatacattttgaaaagggatagcataaatattttaagtaaaaagacctttattttaaataatagtggatattttaatgctggaaattagcattatagttgatatgccagaaattatatctttggttgtgatttaaacttatgctataaactaaattaatgatgtaaatacatagttttaaacattcttttagggacatgtaacttttaagtatcacttcaataatacgtattattataggaacaaagatttgggaataattgattacaggtgaggaagtactggaattccagttcaaggagataccatttcatttaggactaaaaggacaagatacaagttcacatgatgggaaaaatcagaaaacctctcgcagacaaagggtatataatggatatgaggcatcaaaaagcatggtatagtcagtgatggggaatagtccagaaaggctgaaacacagcatgtgatgcgagtcaaggtagttgatgcccaactgtgaagggccgttctaatctagcatggaggtagacagtgtttccttaatatggctgcatatcagaattacctaggtcaggacgaggcatggagatgctactttaataggccctgccgcagatcttccaaaccagaatcttaatcctggagtctaggaatctttatttttcacacaactcatccaagtggttctgataaaatcagtccagcacttttagaacccactgataacagacttattcctggagacagcatttgaggaggaattgaagatttttctaatgaaaagaaaaagggtcacatgaacagatgttgcagtgtacctgtgccagggatttcatgtgtacactttataggagaataagcaagagcttaggtaagttatagtccttaccattgggtctaaggcagtttccaggaaagcatggcaactcgttcagctatgtaagttgaactctgtaccacttgggagggaacattcccctagatgacaatgtcagtggcactcgaagttgtgcagtgcacattcttatctaccaacatatacagcagtccttctgggaaggaaatttgggcaggaaagggaactcacagtgtcggaatgcctggagcatttcttctagtctggtggacagaatatgaaagtatctgcctggcagtgcagtaaatgaaaagagaagataaatgaataaaaaaaaaagttataaataacagtaggaaagagagagtgcaggtggaacgagcctatcctgtggtgaaatgacaacacattctgcagttttaaaatctaagaggctcattgacttttcttcattcatttaaattgatctccaagaaaactatgtattttaaagattccataaactgaatatatgaatgagaattaagaagagaggggctgcttcctaatctgtttatataaggtatagtatagtataatctgtttatataaggttagtagagaggagacaccaggtgctggccataaacctaagaagacattgaatcccattcactccttaacattccttaatatacattcatgagctacataacattttaatcatcaatgatggaccatataccatatacgatatggtggccccataagattataatggacctgaaaaattcctattgctagtgatgtggtcattgtaaagctgtagcacaacacattacccacgtttgtggtgacagtcatataaaagtatggtacatataattatgtacagtgcatacataatacttgataatatgttactggtttgtgtctttgctatgctttttatcattattttagggtatactacttaaaatgttaactgtaaaacagcttctgacaggtccttcaggaagtactccagaagaaggcattgttatcatagaaggtgacagcttcatgtgtgttattgcccctgaagaccttccagtggtacaagatgtggaggaggaagacagtgatactgaggattctgaccctgtgtaggcttaggctaatgtgtgtgtttatatcttagtttttcacaaaaaggtttttccaatgttaaaaaaaatatataaaaaagcttatagaataaggatataaagaaatattttgtacagctgtacaataagctaagcattattaccaaagagtcaaaaagttttaagaaattaaagtttataaaccaaatgttcattgtgagccaaggttaatttattgaagaaataaaacatttttaatgaaaaaaaaaaaaaaaaaa

SEQ ID NO: 4875 - DNA, 863 bp, Homo sapiens
ctcacctcacagacactcctctctggatcctccagagctataaagacgggccttccaccaccagacaggcgcactctaccaccatgaatccactcctgatccttgcctttgtgggagctgctgttgctgtcccctttgatgatgatgacaagatcgttgggggctacacctgtgaggagaattctgtcccctaccaggtgtccttgaattctggctcccacttctgcggtggctccctcatcagcgaacagtgggtggtgtcagcaggtcactgctacaagccccacatccaggtgagactgggagagcacaatatcgaagtcctggaggggaatgagcagttcatcaatgcagccaagatcatccgccaccccaaatacaacaggattattctgaacaatgacatcatgctgatcaagctctccacacctgccgtcatcaatgcccatgtgtccaccatctctctgcccactgcccctccagctgctggcaccgagtgccttatctccggctggggcaataccctgagctctggggccgactacccagatgagctgcagtgcctggacgctcctgtgctgacccaggctaagtgtaaagcctcctaccctttaaagattaccagcaacatgttctgtgtgggcttccttgagggaggcaaggattcctgccagggtgactctggtggccctgtggtctgcaatggacagcttcaaggaattgtctcctggggctatggctgtgcccagaagagaaggcctggagtctacaccaaggtctacaactatgtggactggattaaggacaccatagctgccaacagctaaagcccctggtcactctgcagtctctataccaataaa

SEQ ID NO: 4876 - DNA, 5611 bp, Homo sapiens
aggcgcagaggagggcggtgttgagaccggcggagcggcgggacccctaggtggcggagggacgctccgggaaagcgaggggcgctacgagctctggcccacgtgacctgccgggggcgggagcagggggcgcgccggcctcctgcggtgcccctgccttggggaggggccgtgaccacccgtctgtcgcccgaggcggccgccgctgcaccttcaccgcgtacccgggacccgcccgcccgcgggagaaatgttgctgaagtgctgctgaaagggccagagatgcaaggatttgggatacattttgaacctttaagctgtctgacattgacctcctttcattattaataaagaagaatcaggagcttaggatgtattaacaccaactcattaatatactaaccggacaatgttctacaaacaattctacattgtaaaggactggattggcacaaaataaaataattttattttattcagcttataatatgactcgatggaggaaaatttgataagcatgagagaagaccattcttttcatgttcgttacagaatggaagcttcttgcctagagctggccttggaaggggaacgtctatgtaaatcaggagactgccgcgctggcgtgtcattctttgaagctgcagttcaagttggaactgaagacctaaaaacacttagcgctatttacagccagttgggcaatgcttatttctatttgcatgattatgccaaagcattagaatatcaccatcatgatttaacccttgcaaggactattggagaccagctgggggaagcgaaagctagtggtaatctgggaaacaccttaaaagttcttgggaattttgacgaagccatagtttgttgtcagcgacacctagatatttccagagagcttaatgacaaggtgggagaagcaagagcactttacaatcttgggaatgtgtatcatgccaaagggaaaagttttggttgccctggtccccaggatgtaggagaatttccagaagaagtgagagatgctctgcaggcagccgtggatttttatgaggaaaacctatcattagtgactgctttgggtgaccgagcggcacaaggacgtgcctttggaaatcttggaaacacacattacctccttggcaacttcagggatgcagttatagctcatgagcagcgtctccttattgcaaaagaatttggagataaagcagctgaaagaagagcatatagcaaccttggaaatgcatatatatttcttggtgaatttgaaactgcctcggaatactacaagaagacactactgttggcccgacagcttaaagaccgagctgtagaagcacagtcttgttacagtcttggaaatacatatactttacttcaagactatgaaaaggccattgattatcatctgaagcacttagcaattgctcaagagctgaatgatagaattggtgaaggaagagcatgttggagcttaggaaatgcatacacagcactaggaaatcatgatcaagcaatgcattttgctgaaaagcacttggaaatttcaagagaggttggggataaaagtggtgaactaacagcacgacttaatctctcagaccttcaaatggttcttggtctgagctacagcacaaataactccataatgtctgaaaatactgaaattgatagcagtttgaatggtgtacgccccaagttgggacgccggcatagtatggaaaatatggaacttatgaagttaacaccagaaaaggtacagaactggaacagtgaaattcttgctaagcaaaaacctcttattgccaaaccttctgcaaagctactctttgtcaacagactgaaggggaaaaaatacaaaacgaattcctccactaaagttctccaagatgccagtaattctattgaccaccgaattccaaattctcagaggaaaatcagtgcagatactattggagatgaagggttctttgacttattaagccgatttcaaagcaataggatggatgatcagagatgttgcttacaagaaaagaactgccatacagcttcaacaacaacttcttccactccccctaaaatgatgctaaaaacatcatctgttcctgtggtatcccccaacacggatgagtttttagatcttcttgccagctcacagagtcgccgtctggatgaccagagggctagtttcagtaatttgccagggcttcgtctaacacaaaacagccagtcggtacttagccacctgatgactaatgacaacaaagaggctgatgaagatttctttgacatccttgtaaaatgtcaaggatccagattagatgatcaaagatgtgctccaccacctgctaccacaaagggtccgacagtaccagatgaagactttttcagccttattttacggtcccagggaaagagaatggatgaacagagagttcttttacaaagagatcaaaacagagacactgactttgggctaaaggactttttgcaaaataatgctttgttggagtttaaaaattcagggaaaaaatcggcagaccattagttactatggatttattttttttcctttcaaacacgatattgaaggcagtttacaaggggatgataacaaagtaactaactaactgtagcaaaagacaagtatgggacagactgggacctggagtaacactggatcacagactgcaaaggcccacgcttggaacaagttgccaacttgtttcactctgcttgcttcagactgtgcacagttgggatgggatctggggatgtggacccctattctttcaaaaagtcattcaggtgatttggatgggcaaatagaactatttctctaatggccaatgttttttaagagtcataacctggaattaattacattaagtgctcagctaaaaaaaaaaaaaaaagttctaaattacaacctggattacattatgtttcatgtatactataaggtatgatgtcctggatagcattttaaaaactcaggtaagtttcatggggttcttataagaaaattcagttaagacaatataccaaaccacaacgtaaaaagtttgtgtatacaaactttttgtattatttgtacacaaagtacaaatttgtatttgtacacaaagtacaaactttgtgtattattttgtgtatacaatagttcttacagcctgtaaacattcaacattattccatttaaacattgtttttaacagctgtctaccctgttctgattttcctaaaagcttcacactatataggctgggcacagtggctcatgcctgtaatcccagcactttgggaggccgacaagggcgggtcacttgaggtcaggagttcgagaccagcctgaccaacatggtgaaaccccatctctactaaaaaaatacaaaaattagccaggcatggtgatgcacatctgtagtcctagctgctcgggagactgaggcaggagaatctcttgaacctgggaggtggaggttgcagtgagccgagattgtaccacctcactccagcctgggtgacagagcaaaactctcaaaaaaaagtaaaatttcaaaaaagcttcacaatataaaccttaattttaatgacatattggctagtcaataaacaagtcttatctcatctcatctcttttctgataacaaacacccgatgtgttcaatttgctttcatatttaagtctttcctgaattgctgtcatcattcaacaacagttgcatgtcgccttgctagctgtcaaagtagacttcatccccaaatggatatctgtaatgaaagaatacaaaggtgaaattttatttaaaaattttttaaaagaatttggttttggattaaaaggcatgcaagcagcattaattccactcacagttacagtctatcacctggggcattcactacttttcagagtcagatcacagttcaaaagacagctctcaccttgggggcatattccccaagtcagtgtgaacatgtcttgtcccaagaggacactttatacgcatggatgttcacaaatttattctaaactgcaggtgtctgtcaggattcatttgttaaacatgtcctctgtgttaaaaatcctaaaatccttttgcatttcttagaaaaaatcacgtttctgatgaaattctaaagatgtttgcaatattaaactagaatatattaacatgtataattttgagacaaggtcttgctctgtcacccaggctggagtacagtggctcgatcataactcactgccacctcacgatcctcttgcctcagccctccaagtagctgggactgcaggcgtgtaccaccatgcctggctagttttatttttagtacatagccttgaacaactgagcttaagcgatcatcctccctcaaccttccaaagtgctaggactgtaggcatgagccactgcacctggcctaaaattacattgttacaggcacgtaagtaacacttcctggatccaaaaatgtgtattctgcatttcaacaactgaacttaagcgatcatcctccctcgaccttccaaagtgctaggactgtaggcatgagccactgcacctggcctaaaattacattgttacaggcacgtaagtaacacttcctggatccaaaaatgtgtattctgcatttcaacaactgaacttaagcgatcatcctccctcaaccttccaaagtgctaggactgtaggcatgagccactgcacctggcctaaaattacattgttacaggcacgtaagtaacacttcctggatccaaaaatgtgtattctgcatttcatattaaaataaaaaagcaagtgcttgggatacaaatatctgcatgaaaatttaaagactttattcctgactggtatcacttttagtaagcagttgaacataacttgtagtgtgaatatggctaaaacaaaggacacctgatgtctgtgaagtctgctaaggacaggtacaaaatttatgcattgctttttaaaaagtttaaaatgaggaatgcttttgataatcagaaagactaatgtaaagtgctgactgatgtcctgtctgcagttaaggaagacacccaactctcttcttcctcatcatggtattctctatgtatagatctctaaaaatgcaaacttcctatggacaagacaatatgatttgctataatatgaattaagatatggtaatatctaatagtctccactgctaggattctgagtaacacaaaaaataggttttataaaaagcccatgcacttcaattggtgggggaaaagaataaagtcattttcagtcgactgactctgtaaaacagattaccaatataacaagctatgttatctaaattgccctggcagtcttcagttttctctaagtaaacaaagtaaaaggaacaataaggatgcaggcgtagtaatagctgtggaaaagatgaaactacagccacagtgacctgtgggcagcctgcgtagagataagctgaggtgtcagtcagactgatcctggtaacgatactccatggctgcatgaagatgctggaggcatcaagtgggtggccttaactctagtggattcactaggcaatgtaaattggttagtgggttcccgtaagtgcctgtaac

SEQ ID NO: 4877 - DNA, 6824 bp, Homo sapiens; identical to SEQ ID NO: 780

SEQ ID NO: 4878 - DNA, 6558 bp, Homo sapiens
aaggaaaccagcccaatagtggacctaacaccccaataatgggaactggcgactcgaaacacacggtttcagtatccccaggcgccttaacaataagcagcgggttacagaggaaatcgagtctctccgtggcgcttccaggctgaggacccagcgcctaccggccgagcaccccctagggcagaggggcgagggagacccgcgggaaggggcagcaagccgcctgattgacagcccgaaatctgatcttgtgaaagagacgcggagccaatgggaggcagcgatccatcagtttggattggaggcccctggaggagaagtagaggaaaaaccaccgaattgagctctgtcagaggcgctttcggcttccaagggggaagtgctgggctataattaatgtttttattaaatttggagggaagtttttgcagcctttcgcctagcgtggccttcaggttgatagaagtccagatcctgaggaaatctccagctaaatgctcaaaatataaaatactgagctgagatttgcgaagagcagcagcatggatggattttatgaccagcaagtgccttacatggtcaccaatagtcagcgtgggagaaattgtaacgagaaaccaacaaatgtcaggaaaagaaaattcattaacagagatctggctcatgattcagaagaactctttcaagatctaagtcaattacaggaaacatggcttgcagaagctcaggtacctgacaatgatgagcagtttgtaccagactatcaggctgaaagtttggcttttcatggcctgccactgaaaatcaagaaagaaccccacagtccatgttcagaaatcagctctgcctgcagtcaagaacagccctttaaattcagctatggagaaaagtgcctgtacaatgtcagtgcctatgatcagaagccacaagtgggaatgaggccctccaacccccccacaccatccagcacgccagtgtccccactgcatcatgcatctccaaactcaactcatacaccgaaacctgaccgggccttcccagctcacctccctccatcgcagtccataccagatagcagctaccccatggaccacagatttcgccgccagctttctgaaccctgtaactcctttcctcctttgccgacgatgccaagggaaggacgtcctatgtaccaacgccagatgtctgagccaaacatccccttcccaccacaaggctttaagcaggagtaccacgacccagtgtatgaacacaacaccatggttggcagtgcggccagccaaagctttccccctcctctgatgattaaacaggaacccagagattttgcatatgactcaggctgtatgtttgaaaagggccccaggcagttttatgatgacacctgtgttgtcccagaaaaattcgatggagacatcaaacaagagccaggaatgtatcgggaaggacccacataccaacggcgaggatcacttcagctctggcagtttttggtagctcttctggatgacccttcaaattctcattttattgcctggactggtcgaggcatggaatttaaactgattgagcctgaagaggtggcccgacgttggggcattcagaaaaacaggccagctatgaactatgataaacttagccgttcactccgctattactatgagaaaggaattatgcaaaaggtggctggagagagatatgtctacaagtttgtgtgtgatccagaagcccttttctccatggcctttccagataatcagcgtccactgctgaagacagacatggaacgtcacatcaacgaggaggacacagtgcctctttctcactttgatgagagcatggcctacatgccggaagggggctgctgcaacccccacccctacaacgaaggctacgtgtattaacacaagtgacagtcaagcagggcgtttttgcgcttttccttttttctgcaagatacagagaattgctgaatctttgttttatttctgttgtttgtattttatttttaaataataatacacaaaaaggggcttttcctgttgcattattctatggtctgccatggactgtgcactttatttgagggtgggtgggagtaatctaaacatttattctgtgtaacaggaagctaatgggtgaatgggcagagggatttggggattactttttacttaggcttgggatggggtcctacaagttttgagtatgatgaaactatatcatgtctgtttgatttcataacaacataagataatgtttattttatcggggtatctatggtacagttaatttcacgttgtgtaaatatccacttggagactatttgccttgggcattttcccctgtcatttatgagtctctgcaggtgtacaaaaaaaccccaatctactgtaaatggcagtttaattgttagaaatgactgtttttgcaccacttgtaaaaaggtatttagcgattgcatttgctgtttgttgttttattttgctttatatatgacttgcagaggataaccataaaatgggtaattctctctgaagttgaataatcaccatgactgtaaatgaggggcacaattttggactctggcgccaaactgagtcataggccagtagcattacgtgtatctggtgccaccttgctgtttagatacaaatcataccgtcttttaaatattttgaagcccatttcagttaaataatgacatgtcatggtcctttggaatcttcatttaaatgttaaatctggaatcaaaatgaagcaaaaaatatctgtctccttttcactttcttcagtacataaatacattatttaatcaataagaattaactgtactaaatcatgtattatgctgttctagttacagcaaacactctttaagaaaaatatccaatacactaaataggtactatagtaatttttagacatggtacccattgatatgcatttaaaccttttactgctgtgttatgttgataacatatataaatattagataatgctaatgcttctgctgctgtcttttctgtaatattctctttcatgctgaatttactatgaccatttataagcagtgcagttaactacagatagcatttcaggacaaaatagatgactcaaaccatttattgcttaaaaaatagcttacgccatgctatgctataagcagcttttatgcacattgacaaatgaagagtaagcttcagcttgctaaaggaaactgtggaaccttttgtaacttttggtgatatggaaaattatttacaaaccgtcaaagaatatgaggaagttgctgtatgacatagtgctggcactgatattatccatcatctctttttggacacttctgtaaatgtgattggattgtttgaaagaagatttaaagtttcaaagttttttgttctgtttttgctttgcatttggagaaaatattgaaagcagggtatgttgtttcattcaccttgaaaaaaccatgagtaaatggggatatagaatctctgaatagctcgctaaaagattcaagcaagggacatgaattttgttccatctatcaataatatccagaagaacaacttttttaaagagtctatagcaaaaagcaaaaaaaaaaaaaaattctaaacacaaagtcaaaataaacctattgtaaaagcatttcgtgatgagcatgaaaaagattgtttaaagatgatccccccagctacccattttccaaaactacacagatcacagctcatttctctaagtggagcagttatcaagaaacccaaacaccaaaattgctactcttcacatttaatcctacaaaaagtactccaatttcaaaatatgtatgtaacctgcgatttcaatgattgttgttcatatacatcatgtattattttggcccattttgggcctaaaaaagaaaactatgccttaaaaatcagaaccttttctccccactatgcttatgtggccatctacagcacttagaataaaaacagatgttaaaatattcagtgaaagttttattggaaaaaggaattgagatatataattgagatttggtgaaattgaaggagaaaatttaagtgagtctttaaaatatattctgaatgaaaactgtattgaggattcatttttgttccttttttttctttttctcttttctcctttttcttctttttaatagtctagttttagtcagtcagtgaggaagaattgggccatgctaacgttatcacaagagaacaatggcagaaatggtattagttatataatatttaaggacaaactatatgttttgctgttttaacgtagtgactcactgaactaaatacataattgaccaacattaagtgtatttccaatacagaagggttgaaaatattacattataaactcttttgaaaaatgtatctaaaattttttaagttctgttttgattccactttttggttgagtttttatgtttttgttttcaggtagattaataaatctggcagctgatttctgcaagattcttgtgttttgaatttctcattgaattggctactcaaacatagaaatcatttgttaatgatgtaatgtcttctctcagcttttatcttcactgctgtttgctgtctcttgatgatgacatgttaatacccaatagattaattgcaacaaacacttatactcaaataactaagtaaaaataatttttcttgttatgtccatgaaaagtgcttcagaataaaaatccacaagactgacagtgcagaacatttttctcaaatcatgggcggatcttggaggtctagtttcccgtagatgctgtaaccaattaccacaacttcagtaatttacacaaatttatcttatagttctggaggcagaagttcaaaagaagccttaagagactaaaaccaagatgtccttaggtctggttccttctggaggctccaggggagattcttccagctttcacttctagagtctgctgacattccttggctcctggctacatcacttcaatctctgcttccatggtcacatactcttctactatagtcaaatttccttcctgcctcttataaggatgcttgtgattacatttaggggatgctcagataatccaggacaatctctccatctcaagatccttaacttaatgacgtgtgccaagtccctttggctagataattattcataggtcccagggattaggacatggatgtaaggggtgagggcagggctgttattcagaacaccgcacggaggaggaagactgtgtagcaaagactctaattgatttactcaggaacagtggagttctgctgagggatctaggatttgaaagtactagagtttgcttttatttaccactgagatattttccccttattctgcataaataattttgaaaactttctatattaaatttcaactattccactaaaatgtctggtaatcacatcaagcctttagattattcaaatccttccccagcccccaggaaaacactaagtcatgaaacagaaaaacagaaggtatgataataatagtaataacagttaaatcagtggtctaatccagattttattttttaatacatttcttttggtgttaatatgggttactatgtgatcttatcatttgctagtgattattacttattaggtaagaacaatgtgtaaaatatgtctattactcaaaagaacaattgcaaaatgagtcaacttatctttatataaccaggaaagaaatatattgccagaagctacagaattttgccagatgatagggatttctaaaatgagccactttgtctatcatgcagccttttcagagcttgtaatgagaaaacattacagaggagaaggtcatttggatgtttgttacttggaatcctagaaaacaaaaactaaaatttaaaaataagaagtgagtaagctattttccatttgcgatttggtatggagaagagaggaaatagaattattaaaaaaatacaaattgggtaaaagtgatggtggaaaaaatataaagaaggcaaatgtacatattaagcaattctactaagaattggaaaaatcaagtttcaaaaagatggtaatagttgggcatgatactagaaaatttcacccagtttattcagagctcaactagtacttttaggacttctttttttatatacatgagactcactttgacatacttaaaaaaaaaacagtttatggaaagtacagtttaagaggagaatttgattagactaagtggatatctttatagaaatattaatgatttcagaattttcagttacaagtgtatataccgtggctattgtttatggattcatatgtaaggtagggtcttttttgcatatagactccagtattagttactttcattctaaaattatatttatgcttctatggggaagaaaatttttaattcacttggttgtattaaaattatacttacggtttgagaaaacatgctatgaaaatcatgattatagcaaattaaatatgctcaaaatttaaatctaaaataaaagcccagaaactgaaaaaaaaaaaaaaaaaa

SEQ ID NO: 4879 - DNA, 6366 bp, Homo sapiens
cgttattggctgcgggaagaacctcgccgggacctaacccgaagctccgccccctcgcggttaccctggatacccgtcaggctcgggctgcagagaaggaggatcagggcaagtggcttcagagatgcagccctcactgcttaacgtcctagttattgtccttgaaacccgagccatctcaccgctcgcccccaaccctgggctctggctgtttaaaagctggagaggaagtgaaagcgtcaagtacagttgatagaagtccagatcctgaggaaatctccagctaaatgctcaaaatataaaatactgagctgagatttgcgaagagcagcagcatggatggattttatgaccagcaagtgccttacatggtcaccaatagtcagcgtgggagaaattgtaacgagaaaccaacaaatgtcaggaaaagaaaattcattaacagagatctggctcatgattcagaagaactctttcaagatctaagtcaattacaggaaacatggcttgcagaagtggcttttcatggcctgccactgaaaatcaagaaagaaccccacagtccatgttcagaaatcagctctgcctgcagtcaagaacagccctttaaattcagctatggagaaaagtgcctgtacaatgtcagtgcctatgatcagaagccacaagtgggaatgaggccctccaacccccccacaccatccagcacgccagtgtccccactgcatcatgcatctccaaactcaactcatacaccgaaacctgaccgggccttcccagctcacctccctccatcgcagtccataccagatagcagctaccccatggaccacagatttcgccgccagctttctgaaccctgtaactcctttcctcctttgccgacgatgccaagggaaggacgtcctatgtaccaacgccagatgtctgagccaaacatccccttcccaccacaaggctttaagcaggagtaccacgacccagtgtatgaacacaacaccatggttggcagtgcggccagccaaagctttccccctcctctgatgattaaacaggaacccagagattttgcatatgactcagaagtgcctagctgccactccatttatatgaggcaagaaggcttcctggctcatcccagcagaacagaaggctgtatgtttgaaaagggccccaggcagttttatgatgacacctgtgttgtcccagaaaaattcgatggagacatcaaacaagagccaggaatgtatcgggaaggacccacataccaacggcgaggatcacttcagctctggcagtttttggtagctcttctggatgacccttcaaattctcattttattgcctggactggtcgaggcatggaatttaaactgattgagcctgaagaggtggcccgacgttggggcattcagaaaaacaggccagctatgaactatgataaacttagccgttcactccgctattactatgagaaaggaattatgcaaaaggtggctggagagagatatgtctacaagtttgtgtgtgatccagaagcccttttctccatggcctttccagataatcagcgtccactgctgaagacagacatggaacgtcacatcaacgaggaggacacagtgcctctttctcactttgatgagagcatggcctacatgccggaagggggctgctgcaacccccacccctacaacgaaggctacgtgtattaacacaagtgacagtcaagcagggcgtttttgcgcttttccttttttctgcaagatacagagaattgctgaatctttgttttatttctgttgtttgtattttatttttaaataataatacacaaaaaggggcttttcctgttgcattattctatggtctgccatggactgtgcactttatttgagggtgggtgggagtaatctaaacatttattctgtgtaacaggaagctaatgggtgaatgggcagagggatttggggattactttttacttaggcttgggatggggtcctacaagttttgagtatgatgaaactatatcatgtctgtttgatttcataacaacataagataatgtttattttatcggggtatctatggtacagttaatttcacgttgtgtaaatatccacttggagactatttgccttgggcattttcccctgtcatttatgagtctctgcaggtgtacaaaaaaaccccaatctactgtaaatggcagtttaattgttagaaatgactgtttttgcaccacttgtaaaaaggtatttagcgattgcatttgctgtttgttgttttattttgctttatatatgacttgcagaggataaccataaaatgggtaattctctctgaagttgaataatcaccatgactgtaaatgaggggcacaattttggactctggcgccaaactgagtcataggccagtagcattacgtgtatctggtgccaccttgctgtttagatacaaatcataccgtcttttaaatattttgaagcccatttcagttaaataatgacatgtcatggtcctttggaatcttcatttaaatgttaaatctggaatcaaaatgaagcaaaaaatatctgtctccttttcactttcttcagtacataaatacattatttaatcaataagaattaactgtactaaatcatgtattatgctgttctagttacagcaaacactctttaagaaaaatatccaatacactaaataggtactatagtaatttttagacatggtacccattgatatgcatttaaaccttttactgctgtgttatgttgataacatatataaatattagataatgctaatgcttctgctgctgtcttttctgtaatattctctttcatgctgaatttactatgaccatttataagcagtgcagttaactacagatagcatttcaggacaaaatagatgactcaaaccatttattgcttaaaaaatagcttacgccatgctatgctataagcagcttttatgcacattgacaaatgaagagtaagcttcagcttgctaaaggaaactgtggaaccttttgtaacttttggtgatatggaaaattatttacaaaccgtcaaagaatatgaggaagttgctgtatgacatagtgctggcactgatattatccatcatctctttttggacacttctgtaaatgtgattggattgtttgaaagaagatttaaagtttcaaagttttttgttctgtttttgctttgcatttggagaaaatattgaaagcagggtatgttgtttcattcaccttgaaaaaaccatgagtaaatggggatatagaatctctgaatagctcgctaaaagattcaagcaagggacatgaattttgttccatctatcaataatatccagaagaacaacttttttaaagagtctatagcaaaaagcaaaaaaaaaaaaaaattctaaacacaaagtcaaaataaacctattgtaaaagcatttcgtgatgagcatgaaaaagattgtttaaagatgatccccccagctacccattttccaaaactacacagatcacagctcatttctctaagtggagcagttatcaagaaacccaaacaccaaaattgctactcttcacatttaatcctacaaaaagtactccaatttcaaaatatgtatgtaacctgcgatttcaatgattgttgttcatatacatcatgtattattttggcccattttgggcctaaaaaagaaaactatgccttaaaaatcagaaccttttctccccactatgcttatgtggccatctacagcacttagaataaaaacagatgttaaaatattcagtgaaagttttattggaaaaaggaattgagatatataattgagatttggtgaaattgaaggagaaaatttaagtgagtctttaaaatatattctgaatgaaaactgtattgaggattcatttttgttccttttttttctttttctcttttctcctttttcttctttttaatagtctagttttagtcagtcagtgaggaagaattgggccatgctaacgttatcacaagagaacaatggcagaaatggtattagttatataatatttaaggacaaactatatgttttgctgttttaacgtagtgactcactgaactaaatacataattgaccaacattaagtgtatttccaatacagaagggttgaaaatattacattataaactcttttgaaaaatgtatctaaaattttttaagttctgttttgattccactttttggttgagtttttatgtttttgttttcaggtagattaataaatctggcagctgatttctgcaagattcttgtgttttgaatttctcattgaattggctactcaaacatagaaatcatttgttaatgatgtaatgtcttctctcagcttttatcttcactgctgtttgctgtctcttgatgatgacatgttaatacccaatagattaattgcaacaaacacttatactcaaataactaagtaaaaataatttttcttgttatgtccatgaaaagtgcttcagaataaaaatccacaagactgacagtgcagaacatttttctcaaatcatgggcggatcttggaggtctagtttcccgtagatgctgtaaccaattaccacaacttcagtaatttacacaaatttatcttatagttctggaggcagaagttcaaaagaagccttaagagactaaaaccaagatgtccttaggtctggttccttctggaggctccaggggagattcttccagctttcacttctagagtctgctgacattccttggctcctggctacatcacttcaatctctgcttccatggtcacatactcttctactatagtcaaatttccttcctgcctcttataaggatgcttgtgattacatttaggggatgctcagataatccaggacaatctctccatctcaagatccttaacttaatgacgtgtgccaagtccctttggctagataattattcataggtcccagggattaggacatggatgtaaggggtgagggcagggctgttattcagaacaccgcacggaggaggaagactgtgtagcaaagactctaattgatttactcaggaacagtggagttctgctgagggatctaggatttgaaagtactagagtttgcttttatttaccactgagatattttccccttattctgcataaataattttgaaaactttctatattaaatttcaactattccactaaaatgtctggtaatcacatcaagcctttagattattcaaatccttccccagcccccaggaaaacactaagtcatgaaacagaaaaacagaaggtatgataataatagtaataacagttaaatcagtggtctaatccagattttattttttaatacatttcttttggtgttaatatgggttactatgtgatcttatcatttgctagtgattattacttattaggtaagaacaatgtgtaaaatatgtctattactcaaaagaacaattgcaaaatgagtcaacttatctttatataaccaggaaagaaatatattgccagaagctacagaattttgccagatgatagggatttctaaaatgagccactttgtctatcatgcagccttttcagagcttgtaatgagaaaacattacagaggagaaggtcatttggatgtttgttacttggaatcctagaaaacaaaaactaaaatttaaaaataagaagtgagtaagctattttccatttgcgatttggtatggagaagagaggaaatagaattattaaaaaaatacaaattgggtaaaagtgatggtggaaaaaatataaagaaggcaaatgtacatattaagcaattctactaagaattggaaaaatcaagtttcaaaaagatggtaatagttgggcatgatactagaaaatttcacccagtttattcagagctcaactagtacttttaggacttctttttttatatacatgagactcactttgacatacttaaaaaaaaaacagtttatggaaagtacagtttaagaggagaatttgattagactaagtggatatctttatagaaatattaatgatttcagaattttcagttacaagtgtatataccgtggctattgtttatggattcatatgtaaggtagggtcttttttgcatatagactccagtattagttactttcattctaaaattatatttatgcttctatggggaagaaaatttttaattcacttggttgtattaaaattatacttacggtttgagaaaacatgctatgaaaatcatgattatagcaaattaaatatgctcaaaatttaaatctaaaataaaagcccagaaactgaaaaaaaaaaaaaaaaaa

SEQ ID NO: 4880 - DNA, 6237 bp, Homo sapiens
ttggttgcaccctcagatagtacccatgagcttcactgttcagcctcggggcccaggcgcttcctggaatctctccttggccggggttaaaatgcagttcccgctcaaaatgcttataggttgatagaagtccagatcctgaggaaatctccagctaaatgctcaaaatataaaatactgagctgagatttgcgaagagcagcagcatggatggattttatgaccagcaagtgccttacatggtcaccaatagtcagcgtgggagaaattgtaacgagaaaccaacaaatgtcaggaaaagaaaattcattaacagagatctggctcatgattcagaagaactctttcaagatctaagtcaattacaggaaacatggcttgcagaagtggcttttcatggcctgccactgaaaatcaagaaagaaccccacagtccatgttcagaaatcagctctgcctgcagtcaagaacagccctttaaattcagctatggagaaaagtgcctgtacaatgtcagtgcctatgatcagaagccacaagtgggaatgaggccctccaacccccccacaccatccagcacgccagtgtccccactgcatcatgcatctccaaactcaactcatacaccgaaacctgaccgggccttcccagctcacctccctccatcgcagtccataccagatagcagctaccccatggaccacagatttcgccgccagctttctgaaccctgtaactcctttcctcctttgccgacgatgccaagggaaggacgtcctatgtaccaacgccagatgtctgagccaaacatccccttcccaccacaaggctttaagcaggagtaccacgacccagtgtatgaacacaacaccatggttggcagtgcggccagccaaagctttccccctcctctgatgattaaacaggaacccagagattttgcatatgactcagaagtgcctagctgccactccatttatatgaggcaagaaggcttcctggctcatcccagcagaacagaaggctgtatgtttgaaaagggccccaggcagttttatgatgacacctgtgttgtcccagaaaaattcgatggagacatcaaacaagagccaggaatgtatcgggaaggacccacataccaacggcgaggatcacttcagctctggcagtttttggtagctcttctggatgacccttcaaattctcattttattgcctggactggtcgaggcatggaatttaaactgattgagcctgaagaggtggcccgacgttggggcattcagaaaaacaggccagctatgaactatgataaacttagccgttcactccgctattactatgagaaaggaattatgcaaaaggtggctggagagagatatgtctacaagtttgtgtgtgatccagaagcccttttctccatggcctttccagataatcagcgtccactgctgaagacagacatggaacgtcacatcaacgaggaggacacagtgcctctttctcactttgatgagagcatggcctacatgccggaagggggctgctgcaacccccacccctacaacgaaggctacgtgtattaacacaagtgacagtcaagcagggcgtttttgcgcttttccttttttctgcaagatacagagaattgctgaatctttgttttatttctgttgtttgtattttatttttaaataataatacacaaaaaggggcttttcctgttgcattattctatggtctgccatggactgtgcactttatttgagggtgggtgggagtaatctaaacatttattctgtgtaacaggaagctaatgggtgaatgggcagagggatttggggattactttttacttaggcttgggatggggtcctacaagttttgagtatgatgaaactatatcatgtctgtttgatttcataacaacataagataatgtttattttatcggggtatctatggtacagttaatttcacgttgtgtaaatatccacttggagactatttgccttgggcattttcccctgtcatttatgagtctctgcaggtgtacaaaaaaaccccaatctactgtaaatggcagtttaattgttagaaatgactgtttttgcaccacttgtaaaaaggtatttagcgattgcatttgctgtttgttgttttattttgctttatatatgacttgcagaggataaccataaaatgggtaattctctctgaagttgaataatcaccatgactgtaaatgaggggcacaattttggactctggcgccaaactgagtcataggccagtagcattacgtgtatctggtgccaccttgctgtttagatacaaatcataccgtcttttaaatattttgaagcccatttcagttaaataatgacatgtcatggtcctttggaatcttcatttaaatgttaaatctggaatcaaaatgaagcaaaaaatatctgtctccttttcactttcttcagtacataaatacattatttaatcaataagaattaactgtactaaatcatgtattatgctgttctagttacagcaaacactctttaagaaaaatatccaatacactaaataggtactatagtaatttttagacatggtacccattgatatgcatttaaaccttttactgctgtgttatgttgataacatatataaatattagataatgctaatgcttctgctgctgtcttttctgtaatattctctttcatgctgaatttactatgaccatttataagcagtgcagttaactacagatagcatttcaggacaaaatagatgactcaaaccatttattgcttaaaaaatagcttacgccatgctatgctataagcagcttttatgcacattgacaaatgaagagtaagcttcagcttgctaaaggaaactgtggaaccttttgtaacttttggtgatatggaaaattatttacaaaccgtcaaagaatatgaggaagttgctgtatgacatagtgctggcactgatattatccatcatctctttttggacacttctgtaaatgtgattggattgtttgaaagaagatttaaagtttcaaagttttttgttctgtttttgctttgcatttggagaaaatattgaaagcagggtatgttgtttcattcaccttgaaaaaaccatgagtaaatggggatatagaatctctgaatagctcgctaaaagattcaagcaagggacatgaattttgttccatctatcaataatatccagaagaacaacttttttaaagagtctatagcaaaaagcaaaaaaaaaaaaaaattctaaacacaaagtcaaaataaacctattgtaaaagcatttcgtgatgagcatgaaaaagattgtttaaagatgatccccccagctacccattttccaaaactacacagatcacagctcatttctctaagtggagcagttatcaagaaacccaaacaccaaaattgctactcttcacatttaatcctacaaaaagtactccaatttcaaaatatgtatgtaacctgcgatttcaatgattgttgttcatatacatcatgtattattttggcccattttgggcctaaaaaagaaaactatgccttaaaaatcagaaccttttctccccactatgcttatgtggccatctacagcacttagaataaaaacagatgttaaaatattcagtgaaagttttattggaaaaaggaattgagatatataattgagatttggtgaaattgaaggagaaaatttaagtgagtctttaaaatatattctgaatgaaaactgtattgaggattcatttttgttccttttttttctttttctcttttctcctttttcttctttttaatagtctagttttagtcagtcagtgaggaagaattgggccatgctaacgttatcacaagagaacaatggcagaaatggtattagttatataatatttaaggacaaactatatgttttgctgttttaacgtagtgactcactgaactaaatacataattgaccaacattaagtgtatttccaatacagaagggttgaaaatattacattataaactcttttgaaaaatgtatctaaaattttttaagttctgttttgattccactttttggttgagtttttatgtttttgttttcaggtagattaataaatctggcagctgatttctgcaagattcttgtgttttgaatttctcattgaattggctactcaaacatagaaatcatttgttaatgatgtaatgtcttctctcagcttttatcttcactgctgtttgctgtctcttgatgatgacatgttaatacccaatagattaattgcaacaaacacttatactcaaataactaagtaaaaataatttttcttgttatgtccatgaaaagtgcttcagaataaaaatccacaagactgacagtgcagaacatttttctcaaatcatgggcggatcttggaggtctagtttcccgtagatgctgtaaccaattaccacaacttcagtaatttacacaaatttatcttatagttctggaggcagaagttcaaaagaagccttaagagactaaaaccaagatgtccttaggtctggttccttctggaggctccaggggagattcttccagctttcacttctagagtctgctgacattccttggctcctggctacatcacttcaatctctgcttccatggtcacatactcttctactatagtcaaatttccttcctgcctcttataaggatgcttgtgattacatttaggggatgctcagataatccaggacaatctctccatctcaagatccttaacttaatgacgtgtgccaagtccctttggctagataattattcataggtcccagggattaggacatggatgtaaggggtgagggcagggctgttattcagaacaccgcacggaggaggaagactgtgtagcaaagactctaattgatttactcaggaacagtggagttctgctgagggatctaggatttgaaagtactagagtttgcttttatttaccactgagatattttccccttattctgcataaataattttgaaaactttctatattaaatttcaactattccactaaaatgtctggtaatcacatcaagcctttagattattcaaatccttccccagcccccaggaaaacactaagtcatgaaacagaaaaacagaaggtatgataataatagtaataacagttaaatcagtggtctaatccagattttattttttaatacatttcttttggtgttaatatgggttactatgtgatcttatcatttgctagtgattattacttattaggtaagaacaatgtgtaaaatatgtctattactcaaaagaacaattgcaaaatgagtcaacttatctttatataaccaggaaagaaatatattgccagaagctacagaattttgccagatgatagggatttctaaaatgagccactttgtctatcatgcagccttttcagagcttgtaatgagaaaacattacagaggagaaggtcatttggatgtttgttacttggaatcctagaaaacaaaaactaaaatttaaaaataagaagtgagtaagctattttccatttgcgatttggtatggagaagagaggaaatagaattattaaaaaaatacaaattgggtaaaagtgatggtggaaaaaatataaagaaggcaaatgtacatattaagcaattctactaagaattggaaaaatcaagtttcaaaaagatggtaatagttgggcatgatactagaaaatttcacccagtttattcagagctcaactagtacttttaggacttctttttttatatacatgagactcactttgacatacttaaaaaaaaaacagtttatggaaagtacagtttaagaggagaatttgattagactaagtggatatctttatagaaatattaatgatttcagaattttcagttacaagtgtatataccgtggctattgtttatggattcatatgtaaggtagggtcttttttgcatatagactccagtattagttactttcattctaaaattatatttatgcttctatggggaagaaaatttttaattcacttggttgtattaaaattatacttacggtttgagaaaacatgctatgaaaatcatgattatagcaaattaaatatgctcaaaatttaaatctaaaataaaagcccagaaactgaaaaaaaaaaaaaaaaaa

SEQ ID NO: 4881 - DNA, 6303 bp, Homo sapiens
gtcatgcatacattagagcctctgatgagtttgtctttggggactctggggctgtactacccagtgtcatcacaaattaccaggagaaattgcttccagctcacaatcacatctgcttttggcaagaactaatgcaccaagacttcaagttctaagcctctgttcagattttaattgcaattgatcaggtttatattattgtacctccagagacctcctagagccagaacccggctggcttgctgtttcctttagagcagcgcatatcattatttggtgttctggtggaggacttttctgatggcagaaattagtttctctgggttcatcaggacgggatgcttcaagatttaagtgcaagtgtcttctttccaccttgttcacaacacagaacgttagctcaggtacctgacaatgatgagcagtttgtaccagactatcaggctgaaagtttggcttttcatggcctgccactgaaaatcaagaaagaaccccacagtccatgttcagaaatcagctctgcctgcagtcaagaacagccctttaaattcagctatggagaaaagtgcctgtacaatgtcagtgcctatgatcagaagccacaagtgggaatgaggccctccaacccccccacaccatccagcacgccagtgtccccactgcatcatgcatctccaaactcaactcatacaccgaaacctgaccgggccttcccagctcacctccctccatcgcagtccataccagatagcagctaccccatggaccacagatttcgccgccagctttctgaaccctgtaactcctttcctcctttgccgacgatgccaagggaaggacgtcctatgtaccaacgccagatgtctgagccaaacatccccttcccaccacaaggctttaagcaggagtaccacgacccagtgtatgaacacaacaccatggttggcagtgcggccagccaaagctttccccctcctctgatgattaaacaggaacccagagattttgcatatgactcagaagtgcctagctgccactccatttatatgaggcaagaaggcttcctggctcatcccagcagaacagaaggctgtatgtttgaaaagggccccaggcagttttatgatgacacctgtgttgtcccagaaaaattcgatggagacatcaaacaagagccaggaatgtatcgggaaggacccacataccaacggcgaggatcacttcagctctggcagtttttggtagctcttctggatgacccttcaaattctcattttattgcctggactggtcgaggcatggaatttaaactgattgagcctgaagaggtggcccgacgttggggcattcagaaaaacaggccagctatgaactatgataaacttagccgttcactccgctattactatgagaaaggaattatgcaaaaggtggctggagagagatatgtctacaagtttgtgtgtgatccagaagcccttttctccatggcctttccagataatcagcgtccactgctgaagacagacatggaacgtcacatcaacgaggaggacacagtgcctctttctcactttgatgagagcatggcctacatgccggaagggggctgctgcaacccccacccctacaacgaaggctacgtgtattaacacaagtgacagtcaagcagggcgtttttgcgcttttccttttttctgcaagatacagagaattgctgaatctttgttttatttctgttgtttgtattttatttttaaataataatacacaaaaaggggcttttcctgttgcattattctatggtctgccatggactgtgcactttatttgagggtgggtgggagtaatctaaacatttattctgtgtaacaggaagctaatgggtgaatgggcagagggatttggggattactttttacttaggcttgggatggggtcctacaagttttgagtatgatgaaactatatcatgtctgtttgatttcataacaacataagataatgtttattttatcggggtatctatggtacagttaatttcacgttgtgtaaatatccacttggagactatttgccttgggcattttcccctgtcatttatgagtctctgcaggtgtacaaaaaaaccccaatctactgtaaatggcagtttaattgttagaaatgactgtttttgcaccacttgtaaaaaggtatttagcgattgcatttgctgtttgttgttttattttgctttatatatgacttgcagaggataaccataaaatgggtaattctctctgaagttgaataatcaccatgactgtaaatgaggggcacaattttggactctggcgccaaactgagtcataggccagtagcattacgtgtatctggtgccaccttgctgtttagatacaaatcataccgtcttttaaatattttgaagcccatttcagttaaataatgacatgtcatggtcctttggaatcttcatttaaatgttaaatctggaatcaaaatgaagcaaaaaatatctgtctccttttcactttcttcagtacataaatacattatttaatcaataagaattaactgtactaaatcatgtattatgctgttctagttacagcaaacactctttaagaaaaatatccaatacactaaataggtactatagtaatttttagacatggtacccattgatatgcatttaaaccttttactgctgtgttatgttgataacatatataaatattagataatgctaatgcttctgctgctgtcttttctgtaatattctctttcatgctgaatttactatgaccatttataagcagtgcagttaactacagatagcatttcaggacaaaatagatgactcaaaccatttattgcttaaaaaatagcttacgccatgctatgctataagcagcttttatgcacattgacaaatgaagagtaagcttcagcttgctaaaggaaactgtggaaccttttgtaacttttggtgatatggaaaattatttacaaaccgtcaaagaatatgaggaagttgctgtatgacatagtgctggcactgatattatccatcatctctttttggacacttctgtaaatgtgattggattgtttgaaagaagatttaaagtttcaaagttttttgttctgtttttgctttgcatttggagaaaatattgaaagcagggtatgttgtttcattcaccttgaaaaaaccatgagtaaatggggatatagaatctctgaatagctcgctaaaagattcaagcaagggacatgaattttgttccatctatcaataatatccagaagaacaacttttttaaagagtctatagcaaaaagcaaaaaaaaaaaaaaattctaaacacaaagtcaaaataaacctattgtaaaagcatttcgtgatgagcatgaaaaagattgtttaaagatgatccccccagctacccattttccaaaactacacagatcacagctcatttctctaagtggagcagttatcaagaaacccaaacaccaaaattgctactcttcacatttaatcctacaaaaagtactccaatttcaaaatatgtatgtaacctgcgatttcaatgattgttgttcatatacatcatgtattattttggcccattttgggcctaaaaaagaaaactatgccttaaaaatcagaaccttttctccccactatgcttatgtggccatctacagcacttagaataaaaacagatgttaaaatattcagtgaaagttttattggaaaaaggaattgagatatataattgagatttggtgaaattgaaggagaaaatttaagtgagtctttaaaatatattctgaatgaaaactgtattgaggattcatttttgttccttttttttctttttctcttttctcctttttcttctttttaatagtctagttttagtcagtcagtgaggaagaattgggccatgctaacgttatcacaagagaacaatggcagaaatggtattagttatataatatttaaggacaaactatatgttttgctgttttaacgtagtgactcactgaactaaatacataattgaccaacattaagtgtatttccaatacagaagggttgaaaatattacattataaactcttttgaaaaatgtatctaaaattttttaagttctgttttgattccactttttggttgagtttttatgtttttgttttcaggtagattaataaatctggcagctgatttctgcaagattcttgtgttttgaatttctcattgaattggctactcaaacatagaaatcatttgttaatgatgtaatgtcttctctcagcttttatcttcactgctgtttgctgtctcttgatgatgacatgttaatacccaatagattaattgcaacaaacacttatactcaaataactaagtaaaaataatttttcttgttatgtccatgaaaagtgcttcagaataaaaatccacaagactgacagtgcagaacatttttctcaaatcatgggcggatcttggaggtctagtttcccgtagatgctgtaaccaattaccacaacttcagtaatttacacaaatttatcttatagttctggaggcagaagttcaaaagaagccttaagagactaaaaccaagatgtccttaggtctggttccttctggaggctccaggggagattcttccagctttcacttctagagtctgctgacattccttggctcctggctacatcacttcaatctctgcttccatggtcacatactcttctactatagtcaaatttccttcctgcctcttataaggatgcttgtgattacatttaggggatgctcagataatccaggacaatctctccatctcaagatccttaacttaatgacgtgtgccaagtccctttggctagataattattcataggtcccagggattaggacatggatgtaaggggtgagggcagggctgttattcagaacaccgcacggaggaggaagactgtgtagcaaagactctaattgatttactcaggaacagtggagttctgctgagggatctaggatttgaaagtactagagtttgcttttatttaccactgagatattttccccttattctgcataaataattttgaaaactttctatattaaatttcaactattccactaaaatgtctggtaatcacatcaagcctttagattattcaaatccttccccagcccccaggaaaacactaagtcatgaaacagaaaaacagaaggtatgataataatagtaataacagttaaatcagtggtctaatccagattttattttttaatacatttcttttggtgttaatatgggttactatgtgatcttatcatttgctagtgattattacttattaggtaagaacaatgtgtaaaatatgtctattactcaaaagaacaattgcaaaatgagtcaacttatctttatataaccaggaaagaaatatattgccagaagctacagaattttgccagatgatagggatttctaaaatgagccactttgtctatcatgcagccttttcagagcttgtaatgagaaaacattacagaggagaaggtcatttggatgtttgttacttggaatcctagaaaacaaaaactaaaatttaaaaataagaagtgagtaagctattttccatttgcgatttggtatggagaagagaggaaatagaattattaaaaaaatacaaattgggtaaaagtgatggtggaaaaaatataaagaaggcaaatgtacatattaagcaattctactaagaattggaaaaatcaagtttcaaaaagatggtaatagttgggcatgatactagaaaatttcacccagtttattcagagctcaactagtacttttaggacttctttttttatatacatgagactcactttgacatacttaaaaaaaaaacagtttatggaaagtacagtttaagaggagaatttgattagactaagtggatatctttatagaaatattaatgatttcagaattttcagttacaagtgtatataccgtggctattgtttatggattcatatgtaaggtagggtcttttttgcatatagactccagtattagttactttcattctaaaattatatttatgcttctatggggaagaaaatttttaattcacttggttgtattaaaattatacttacggtttgagaaaacatgctatgaaaatcatgattatagcaaattaaatatgctcaaaatttaaatctaaaataaaagcccagaaactgaaaaaaaaaaaaaaaaaa

SEQ ID NO: 4882 - DNA, 6249 bp, Homo sapiens
gtcatgcatacattagagcctctgatgagtttgtctttggggactctggggctgtactacccagtgtcatcacaaattaccaggagaaattgcttccagctcacaatcacatctgcttttggcaagaactaatgcaccaagacttcaagttctaagcctctgttcagattttaattgcaattgatcaggtttatattattgtacctccagagacctcctagagccagaacccggctggcttgctgtttcctttagagcagcgcatatcattatttggtgttctggtggaggacttttctgatggcagaaattagtttctctgggttcatcaggacgggatgcttcaagatttaagtgcaagtgtcttctttccaccttgttcacaacacagaacgttagtggcttttcatggcctgccactgaaaatcaagaaagaaccccacagtccatgttcagaaatcagctctgcctgcagtcaagaacagccctttaaattcagctatggagaaaagtgcctgtacaatgtcagtgcctatgatcagaagccacaagtgggaatgaggccctccaacccccccacaccatccagcacgccagtgtccccactgcatcatgcatctccaaactcaactcatacaccgaaacctgaccgggccttcccagctcacctccctccatcgcagtccataccagatagcagctaccccatggaccacagatttcgccgccagctttctgaaccctgtaactcctttcctcctttgccgacgatgccaagggaaggacgtcctatgtaccaacgccagatgtctgagccaaacatccccttcccaccacaaggctttaagcaggagtaccacgacccagtgtatgaacacaacaccatggttggcagtgcggccagccaaagctttccccctcctctgatgattaaacaggaacccagagattttgcatatgactcagaagtgcctagctgccactccatttatatgaggcaagaaggcttcctggctcatcccagcagaacagaaggctgtatgtttgaaaagggccccaggcagttttatgatgacacctgtgttgtcccagaaaaattcgatggagacatcaaacaagagccaggaatgtatcgggaaggacccacataccaacggcgaggatcacttcagctctggcagtttttggtagctcttctggatgacccttcaaattctcattttattgcctggactggtcgaggcatggaatttaaactgattgagcctgaagaggtggcccgacgttggggcattcagaaaaacaggccagctatgaactatgataaacttagccgttcactccgctattactatgagaaaggaattatgcaaaaggtggctggagagagatatgtctacaagtttgtgtgtgatccagaagcccttttctccatggcctttccagataatcagcgtccactgctgaagacagacatggaacgtcacatcaacgaggaggacacagtgcctctttctcactttgatgagagcatggcctacatgccggaagggggctgctgcaacccccacccctacaacgaaggctacgtgtattaacacaagtgacagtcaagcagggcgtttttgcgcttttccttttttctgcaagatacagagaattgctgaatctttgttttatttctgttgtttgtattttatttttaaataataatacacaaaaaggggcttttcctgttgcattattctatggtctgccatggactgtgcactttatttgagggtgggtgggagtaatctaaacatttattctgtgtaacaggaagctaatgggtgaatgggcagagggatttggggattactttttacttaggcttgggatggggtcctacaagttttgagtatgatgaaactatatcatgtctgtttgatttcataacaacataagataatgtttattttatcggggtatctatggtacagttaatttcacgttgtgtaaatatccacttggagactatttgccttgggcattttcccctgtcatttatgagtctctgcaggtgtacaaaaaaaccccaatctactgtaaatggcagtttaattgttagaaatgactgtttttgcaccacttgtaaaaaggtatttagcgattgcatttgctgtttgttgttttattttgctttatatatgacttgcagaggataaccataaaatgggtaattctctctgaagttgaataatcaccatgactgtaaatgaggggcacaattttggactctggcgccaaactgagtcataggccagtagcattacgtgtatctggtgccaccttgctgtttagatacaaatcataccgtcttttaaatattttgaagcccatttcagttaaataatgacatgtcatggtcctttggaatcttcatttaaatgttaaatctggaatcaaaatgaagcaaaaaatatctgtctccttttcactttcttcagtacataaatacattatttaatcaataagaattaactgtactaaatcatgtattatgctgttctagttacagcaaacactctttaagaaaaatatccaatacactaaataggtactatagtaatttttagacatggtacccattgatatgcatttaaaccttttactgctgtgttatgttgataacatatataaatattagataatgctaatgcttctgctgctgtcttttctgtaatattctctttcatgctgaatttactatgaccatttataagcagtgcagttaactacagatagcatttcaggacaaaatagatgactcaaaccatttattgcttaaaaaatagcttacgccatgctatgctataagcagcttttatgcacattgacaaatgaagagtaagcttcagcttgctaaaggaaactgtggaaccttttgtaacttttggtgatatggaaaattatttacaaaccgtcaaagaatatgaggaagttgctgtatgacatagtgctggcactgatattatccatcatctctttttggacacttctgtaaatgtgattggattgtttgaaagaagatttaaagtttcaaagttttttgttctgtttttgctttgcatttggagaaaatattgaaagcagggtatgttgtttcattcaccttgaaaaaaccatgagtaaatggggatatagaatctctgaatagctcgctaaaagattcaagcaagggacatgaattttgttccatctatcaataatatccagaagaacaacttttttaaagagtctatagcaaaaagcaaaaaaaaaaaaaaattctaaacacaaagtcaaaataaacctattgtaaaagcatttcgtgatgagcatgaaaaagattgtttaaagatgatccccccagctacccattttccaaaactacacagatcacagctcatttctctaagtggagcagttatcaagaaacccaaacaccaaaattgctactcttcacatttaatcctacaaaaagtactccaatttcaaaatatgtatgtaacctgcgatttcaatgattgttgttcatatacatcatgtattattttggcccattttgggcctaaaaaagaaaactatgccttaaaaatcagaaccttttctccccactatgcttatgtggccatctacagcacttagaataaaaacagatgttaaaatattcagtgaaagttttattggaaaaaggaattgagatatataattgagatttggtgaaattgaaggagaaaatttaagtgagtctttaaaatatattctgaatgaaaactgtattgaggattcatttttgttccttttttttctttttctcttttctcctttttcttctttttaatagtctagttttagtcagtcagtgaggaagaattgggccatgctaacgttatcacaagagaacaatggcagaaatggtattagttatataatatttaaggacaaactatatgttttgctgttttaacgtagtgactcactgaactaaatacataattgaccaacattaagtgtatttccaatacagaagggttgaaaatattacattataaactcttttgaaaaatgtatctaaaattttttaagttctgttttgattccactttttggttgagtttttatgtttttgttttcaggtagattaataaatctggcagctgatttctgcaagattcttgtgttttgaatttctcattgaattggctactcaaacatagaaatcatttgttaatgatgtaatgtcttctctcagcttttatcttcactgctgtttgctgtctcttgatgatgacatgttaatacccaatagattaattgcaacaaacacttatactcaaataactaagtaaaaataatttttcttgttatgtccatgaaaagtgcttcagaataaaaatccacaagactgacagtgcagaacatttttctcaaatcatgggcggatcttggaggtctagtttcccgtagatgctgtaaccaattaccacaacttcagtaatttacacaaatttatcttatagttctggaggcagaagttcaaaagaagccttaagagactaaaaccaagatgtccttaggtctggttccttctggaggctccaggggagattcttccagctttcacttctagagtctgctgacattccttggctcctggctacatcacttcaatctctgcttccatggtcacatactcttctactatagtcaaatttccttcctgcctcttataaggatgcttgtgattacatttaggggatgctcagataatccaggacaatctctccatctcaagatccttaacttaatgacgtgtgccaagtccctttggctagataattattcataggtcccagggattaggacatggatgtaaggggtgagggcagggctgttattcagaacaccgcacggaggaggaagactgtgtagcaaagactctaattgatttactcaggaacagtggagttctgctgagggatctaggatttgaaagtactagagtttgcttttatttaccactgagatattttccccttattctgcataaataattttgaaaactttctatattaaatttcaactattccactaaaatgtctggtaatcacatcaagcctttagattattcaaatccttccccagcccccaggaaaacactaagtcatgaaacagaaaaacagaaggtatgataataatagtaataacagttaaatcagtggtctaatccagattttattttttaatacatttcttttggtgttaatatgggttactatgtgatcttatcatttgctagtgattattacttattaggtaagaacaatgtgtaaaatatgtctattactcaaaagaacaattgcaaaatgagtcaacttatctttatataaccaggaaagaaatatattgccagaagctacagaattttgccagatgatagggatttctaaaatgagccactttgtctatcatgcagccttttcagagcttgtaatgagaaaacattacagaggagaaggtcatttggatgtttgttacttggaatcctagaaaacaaaaactaaaatttaaaaataagaagtgagtaagctattttccatttgcgatttggtatggagaagagaggaaatagaattattaaaaaaatacaaattgggtaaaagtgatggtggaaaaaatataaagaaggcaaatgtacatattaagcaattctactaagaattggaaaaatcaagtttcaaaaagatggtaatagttgggcatgatactagaaaatttcacccagtttattcagagctcaactagtacttttaggacttctttttttatatacatgagactcactttgacatacttaaaaaaaaaacagtttatggaaagtacagtttaagaggagaatttgattagactaagtggatatctttatagaaatattaatgatttcagaattttcagttacaagtgtatataccgtggctattgtttatggattcatatgtaaggtagggtcttttttgcatatagactccagtattagttactttcattctaaaattatatttatgcttctatggggaagaaaatttttaattcacttggttgtattaaaattatacttacggtttgagaaaacatgctatgaaaatcatgattatagcaaattaaatatgctcaaaatttaaatctaaaataaaagcccagaaactgaaaaaaaaaaaaaaaaaa

SEQ ID NO: 4883 - DNA, 6114 bp, Homo sapiens
gtcatgcatacattagagcctctgatgagtttgtctttggggactctggggctgtactacccagtgtcatcacaaattaccaggagaaattgcttccagctcacaatcacatctgcttttggcaagaactaatgcaccaagacttcaagttctaagcctctgttcagattttaattgcaattgatcaggtttatattattgtacctccagagacctcctagagccagaacccggctggcttgctgtttcctttagagcagcgcatatcattatttggtgttctggtggaggacttttctgatggcagaaattagtttctctgggttcatcaggacgggatgcttcaagatttaagtgcaagtgtcttctttccaccttgttcacaacacagaacgttagctcaggtacctgacaatgatgagcagtttgtaccagactatcaggctgaaagtttggcttttcatggcctgccactgaaaatcaagaaagaaccccacagtccatgttcagaaatcagctctgcctgcagtcaagaacagccctttaaattcagctatggagaaaagtgcctgtacaatgtcagatttcgccgccagctttctgaaccctgtaactcctttcctcctttgccgacgatgccaagggaaggacgtcctatgtaccaacgccagatgtctgagccaaacatccccttcccaccacaaggctttaagcaggagtaccacgacccagtgtatgaacacaacaccatggttggcagtgcggccagccaaagctttccccctcctctgatgattaaacaggaacccagagattttgcatatgactcagaagtgcctagctgccactccatttatatgaggcaagaaggcttcctggctcatcccagcagaacagaaggctgtatgtttgaaaagggccccaggcagttttatgatgacacctgtgttgtcccagaaaaattcgatggagacatcaaacaagagccaggaatgtatcgggaaggacccacataccaacggcgaggatcacttcagctctggcagtttttggtagctcttctggatgacccttcaaattctcattttattgcctggactggtcgaggcatggaatttaaactgattgagcctgaagaggtggcccgacgttggggcattcagaaaaacaggccagctatgaactatgataaacttagccgttcactccgctattactatgagaaaggaattatgcaaaaggtggctggagagagatatgtctacaagtttgtgtgtgatccagaagcccttttctccatggcctttccagataatcagcgtccactgctgaagacagacatggaacgtcacatcaacgaggaggacacagtgcctctttctcactttgatgagagcatggcctacatgccggaagggggctgctgcaacccccacccctacaacgaaggctacgtgtattaacacaagtgacagtcaagcagggcgtttttgcgcttttccttttttctgcaagatacagagaattgctgaatctttgttttatttctgttgtttgtattttatttttaaataataatacacaaaaaggggcttttcctgttgcattattctatggtctgccatggactgtgcactttatttgagggtgggtgggagtaatctaaacatttattctgtgtaacaggaagctaatgggtgaatgggcagagggatttggggattactttttacttaggcttgggatggggtcctacaagttttgagtatgatgaaactatatcatgtctgtttgatttcataacaacataagataatgtttattttatcggggtatctatggtacagttaatttcacgttgtgtaaatatccacttggagactatttgccttgggcattttcccctgtcatttatgagtctctgcaggtgtacaaaaaaaccccaatctactgtaaatggcagtttaattgttagaaatgactgtttttgcaccacttgtaaaaaggtatttagcgattgcatttgctgtttgttgttttattttgctttatatatgacttgcagaggataaccataaaatgggtaattctctctgaagttgaataatcaccatgactgtaaatgaggggcacaattttggactctggcgccaaactgagtcataggccagtagcattacgtgtatctggtgccaccttgctgtttagatacaaatcataccgtcttttaaatattttgaagcccatttcagttaaataatgacatgtcatggtcctttggaatcttcatttaaatgttaaatctggaatcaaaatgaagcaaaaaatatctgtctccttttcactttcttcagtacataaatacattatttaatcaataagaattaactgtactaaatcatgtattatgctgttctagttacagcaaacactctttaagaaaaatatccaatacactaaataggtactatagtaatttttagacatggtacccattgatatgcatttaaaccttttactgctgtgttatgttgataacatatataaatattagataatgctaatgcttctgctgctgtcttttctgtaatattctctttcatgctgaatttactatgaccatttataagcagtgcagttaactacagatagcatttcaggacaaaatagatgactcaaaccatttattgcttaaaaaatagcttacgccatgctatgctataagcagcttttatgcacattgacaaatgaagagtaagcttcagcttgctaaaggaaactgtggaaccttttgtaacttttggtgatatggaaaattatttacaaaccgtcaaagaatatgaggaagttgctgtatgacatagtgctggcactgatattatccatcatctctttttggacacttctgtaaatgtgattggattgtttgaaagaagatttaaagtttcaaagttttttgttctgtttttgctttgcatttggagaaaatattgaaagcagggtatgttgtttcattcaccttgaaaaaaccatgagtaaatggggatatagaatctctgaatagctcgctaaaagattcaagcaagggacatgaattttgttccatctatcaataatatccagaagaacaacttttttaaagagtctatagcaaaaagcaaaaaaaaaaaaaaattctaaacacaaagtcaaaataaacctattgtaaaagcatttcgtgatgagcatgaaaaagattgtttaaagatgatccccccagctacccattttccaaaactacacagatcacagctcatttctctaagtggagcagttatcaagaaacccaaacaccaaaattgctactcttcacatttaatcctacaaaaagtactccaatttcaaaatatgtatgtaacctgcgatttcaatgattgttgttcatatacatcatgtattattttggcccattttgggcctaaaaaagaaaactatgccttaaaaatcagaaccttttctccccactatgcttatgtggccatctacagcacttagaataaaaacagatgttaaaatattcagtgaaagttttattggaaaaaggaattgagatatataattgagatttggtgaaattgaaggagaaaatttaagtgagtctttaaaatatattctgaatgaaaactgtattgaggattcatttttgttccttttttttctttttctcttttctcctttttcttctttttaatagtctagttttagtcagtcagtgaggaagaattgggccatgctaacgttatcacaagagaacaatggcagaaatggtattagttatataatatttaaggacaaactatatgttttgctgttttaacgtagtgactcactgaactaaatacataattgaccaacattaagtgtatttccaatacagaagggttgaaaatattacattataaactcttttgaaaaatgtatctaaaattttttaagttctgttttgattccactttttggttgagtttttatgtttttgttttcaggtagattaataaatctggcagctgatttctgcaagattcttgtgttttgaatttctcattgaattggctactcaaacatagaaatcatttgttaatgatgtaatgtcttctctcagcttttatcttcactgctgtttgctgtctcttgatgatgacatgttaatacccaatagattaattgcaacaaacacttatactcaaataactaagtaaaaataatttttcttgttatgtccatgaaaagtgcttcagaataaaaatccacaagactgacagtgcagaacatttttctcaaatcatgggcggatcttggaggtctagtttcccgtagatgctgtaaccaattaccacaacttcagtaatttacacaaatttatcttatagttctggaggcagaagttcaaaagaagccttaagagactaaaaccaagatgtccttaggtctggttccttctggaggctccaggggagattcttccagctttcacttctagagtctgctgacattccttggctcctggctacatcacttcaatctctgcttccatggtcacatactcttctactatagtcaaatttccttcctgcctcttataaggatgcttgtgattacatttaggggatgctcagataatccaggacaatctctccatctcaagatccttaacttaatgacgtgtgccaagtccctttggctagataattattcataggtcccagggattaggacatggatgtaaggggtgagggcagggctgttattcagaacaccgcacggaggaggaagactgtgtagcaaagactctaattgatttactcaggaacagtggagttctgctgagggatctaggatttgaaagtactagagtttgcttttatttaccactgagatattttccccttattctgcataaataattttgaaaactttctatattaaatttcaactattccactaaaatgtctggtaatcacatcaagcctttagattattcaaatccttccccagcccccaggaaaacactaagtcatgaaacagaaaaacagaaggtatgataataatagtaataacagttaaatcagtggtctaatccagattttattttttaatacatttcttttggtgttaatatgggttactatgtgatcttatcatttgctagtgattattacttattaggtaagaacaatgtgtaaaatatgtctattactcaaaagaacaattgcaaaatgagtcaacttatctttatataaccaggaaagaaatatattgccagaagctacagaattttgccagatgatagggatttctaaaatgagccactttgtctatcatgcagccttttcagagcttgtaatgagaaaacattacagaggagaaggtcatttggatgtttgttacttggaatcctagaaaacaaaaactaaaatttaaaaataagaagtgagtaagctattttccatttgcgatttggtatggagaagagaggaaatagaattattaaaaaaatacaaattgggtaaaagtgatggtggaaaaaatataaagaaggcaaatgtacatattaagcaattctactaagaattggaaaaatcaagtttcaaaaagatggtaatagttgggcatgatactagaaaatttcacccagtttattcagagctcaactagtacttttaggacttctttttttatatacatgagactcactttgacatacttaaaaaaaaaacagtttatggaaagtacagtttaagaggagaatttgattagactaagtggatatctttatagaaatattaatgatttcagaattttcagttacaagtgtatataccgtggctattgtttatggattcatatgtaaggtagggtcttttttgcatatagactccagtattagttactttcattctaaaattatatttatgcttctatggggaagaaaatttttaattcacttggttgtattaaaattatacttacggtttgagaaaacatgctatgaaaatcatgattatagcaaattaaatatgctcaaaatttaaatctaaaataaaagcccagaaactgaaaaaaaaaaaaaaaaaa

SEQ ID NO: 4884 - DNA, 3751 bp, Homo sapiens; identical to SEQ ID NO: 2508

SEQ ID NO: 4885 - DNA, 4730 bp, Homo sapiens; identical to SEQ ID NO: 2357

SEQ ID NO: 4886 - DNA, 4709 bp, Homo sapiens
tgttttctgcattctctcccagcggatctgattcctgttctgaagaattgaagttgagcatcgttagttaaattcagctgctgcctgactgtataccacagcaaaggctttggaaacatttttcagttaaaacaataatgactttcttggagtgtaatcccagtggaggctgttctacgtatagcctgaaagaatacttaactaccatacgcaattctgcagagaccttgtaaaaatcacactttacaccaaacaactgagtgattctgaattggttgggggaatcttagttgtagatatcaattcaccttcttgaagattcaaccactgctactcagagctgctgctgaaataccatgtctaagaactcagagttcatcaatctgtcatttttattagatcatgagaaggaaatgatcctgggcgtcctaaagagagatgaatatttgaaaaaagtggaggacaagagaataaggaagctgaaaaatgaactcttagaagcaaaacgtagaagtgggaaaactcaacaagaggccagcagagtttgtgttcactgtcacagaaacctgggcctaatctttgaccggggagacccttgtcaggcttgctcactgagggtatgcagggagtgtcgagttgcaggccccaatggcagctggaagtgcactgtctgtgacaaaatcgcgcagctaaggattataactggtgagtggttttttgaagaaaaggcaaaacgtttcaagcaagtcaatgttctcggcactgatgttgtccgacagtccattttaagaagaagtccaggagctgaagaagtacagagccaagagcaaacccgccaggatgcagaaaagtcagacacttcacctgttgctgggaagaaggccagccatgatgggcccaagagaaagggatttcttcttagcaagttcagatcggcaaccagaggagaaatcataactcccaaaactgacactgggcggagctatagcttggacttagacggtcaacattttcggagtttaaaatcacctcctggttcagacaggggaagcactggctcatcagatctcaatgaccaggaacctggtcctaggaccccgaagagcagtcggagcaatggtgtgaccccaggcactcagagttcaccagccccaagcacacgaactgtgacctcagtcatcagtagagagtatggttttgaaaattccatggatttggctgctattgaaggtacctctcaggagctcacaaagagtcaccgcagaaacacttctggcacaccttccatagcagtgtctggaacctctctctcctcagatcagagtcgatctgagttagatttgagtgagtcatttacagaagactcagaggatactgtaagcataagaagcaagtctgtccctggggctttagacaaggactccttggaagagactgaagaaagcattgatgccttagtgtcctcgcagttatctacaaacactcaccgtctggcaagtggcctatcaactagttctcaagcaggttctgacaggaagtggacctacctaaatgtgcctgatgctgactcagacactaccagccttaacagcatgatgagcgtttacagtgaaacgggagactatggcaacgtgaaagtcagtggtgaaatccttctccatatcagctactgctacaaaactggtgggctgtacatttttgtcaagaattgcagaaatctggccataggagatgaaaagaaacagaggacagatgcttatgtcaagtcatatcttcttcctgacaagtcccggaacaacaagcgtaagaccaaaatcagaacaggcaccaatccagaattcaatgaaacactaaagtacactatcagccatacccagctggaaacaagaactctgcagctctcagtctggcactatgatcgatttggacgtaatagcttcctcggggaagtagagattccttttgactcatggaactttgaaaatccaactgatgagtggtttgtgcttcaacccaaggtggagtttgctcctgatattggccttcaatacaaaggagagctgacagttgttttacgttacattcccccagaagagaacctgatgcttccaccagaacaactccaaggaaataagacttttaaaaagggaaagaagaaggagtcacctgtaatctctggaggaatactagaagtgttcatcaaagaggcaaagaatttgacagcagtgaagtcaggaggcacttctgatagctttgtgaagggctacctgctccctgatgatagcaaagccaccaagcacaaaactctggtaataaaaaagagtgttaaccctcagtggaatcatacattcatgttcagtggcatccatccccaggatataaagaatgtttgcctagaacttactatctgggacaaggaggccttttccagcaacatctttctgggaggagttcgtttgaattctggaagtggtgtgagccatgggaagaacgtggattggatggactctcagggggaagagcagcgcctttggcagaagatggccaacaaccctggaactccctttgagggtgtactcatgcttcgttccagcatgggaaaatgtaggctctaaagggaccagttctccaagaatgaggccaccaggacctatctggctgtcttttcctaccattagcaaactgagacctgggattctgcttccctgccatttctcacctgacagtgttgggacatgaggggagagatgtcagtagtatgaacatttagggtcttgctgagtgcctaaaaaacatatatttccatccaatcaaggccttcttgattggatgatagaaagtgtactacttgtcctgtcaacaagcaaattgtgcaaaggcttatagggtttatgccataaaagaaatggcacaagcctccatttgctaattataagttactttagatttcctcaaatcctttgaagagaaagaggaccactgagaaggtagatcacttgaaaagtcagaagaaaggatactggccaacttttactcaccctaggaatccacatgatctcaagaaggcatggtggagatggttgcttgagcaaggggattgtcctgttattgcagcaaacttgtggattaaccaagtagtatttcaagatggattgacagggctttctatgattactatagaatttatcatctaaatcagtttactttttagaacaaagagagctaaataactacatcagaacgattgatgttgattagaattgacctgggaaaattgggatgtagggtcaccctactgatgacctaagagagctctgttttaaacatttattttataaaatgttctaagccattaactaaaaggaaatgagatataatggtcaattgatataccttttcacattgtgttcactgacgagactagtttaatgaaaaaggaggtactctacctgctattttacttctgttcctcttctgccctgttatgggagagaatcaaagactccatctgctctcttcccccttgttttctccttcactgagtttttcttatctccttttgcagtggttaactattgtcacaataatgctgaatgaaaaaacacaccaaatgtcagtggcttaaaatgaccatcctttttctcacagttatgaagattggctatggcacctctgcttcctgctataggcctgaggttctagggcttcttatgcctcatcctctttaagccaaagggatagccagagcatcttgatggcagaagtgcaataagatgagccccactgctcgggtacattttcagcccctggttgtgtcatgtctactgatatctcattggtcaaaggaagtcagagggccaagatgaagaggcagggaaatatgcactgcccacagtgaagccatgacaagagtgaggatgcaggaaggcatgaagaattggggccaacagttcaatctaccataccttctctcacctggaattccagatgcttgagctacgaaacttagatgcaaagaaagttaaagctagaaggaacctcaggcccagttgctcattttgcagattccaaatgtgaatttcagagagctgagataacttgcccaaggccatatagaggctgtgactaaatctggacttaaatccagactatcaatcttaggccagtgttcttttttcaatatagtccttggcataatgctatgcttattaggtagataaaagggcttatgtcaagaaatttggagcagagtctgattacttgagcatgaacatacccgaccaaggtatgttctggagtcatattctagcctctgagctcattttttcatgcgagttcatataaaatcctcgaaagtttagaaactaggttttagtagtaacggagctagaatcatcttcgggcttattcctgctagttgttccatatttctagatttcatcttgaattttgaaaactgatttaagaatatatttagtattattattagtaagggaatacgcaatccagtttcaattttattcagaagtaggtcacctaattctagaaaatggttattagtctagtgtcgcttagcaaggtacttaaaagaaaatctgcacatatccttgtgctgcccttcttaaaaacagaaaacaaaaagtgtaagatcatcattgcttcccacataggaaaaataaaatgtcttcagacttgatgtgactcaaaaa

SEQ ID NO: 4887 - DNA, 4821 bp, Homo sapiens; identical to SEQ ID NO: 550

SEQ ID NO: 4888 - DNA, 2158 bp, Homo sapiens; identical to SEQ ID NO: 1433

SEQ ID NO: 4889 - DNA, 12416 bp, Homo sapiens; identical to SEQ ID NO: 1520

SEQ ID NO: 4890 - DNA, 4193 bp, Homo sapiens
cttcttctcgctgagtctcctcctcggctctgacggtacagtgatataatgatgatgggtgtcacaacccgcatttgaacttgcaggcgagctgccccgagcctttctggggaagaactccaggcgtgcggacgcaacagccgagaacattaggtgttgtggacaggagctgggaccaagatcttcggccagccccgcatcctcccgcatcttccagcaccgtcccgcaccctccgcatccttccccgggccaccacgcttcctatgtgacccgcctgggcaacgccgaacccagtcgcgcagcgctgcagtgaattttccccccaaactgcaataagccgccttccaaggccaagatgttcataaatataaagagcatcttatggatgtgttcaaccttaatagtaacccatgcgctacataaagtcaaagtgggaaaaagcccaccggtgaggggctccctctctggaaaagtcagcctaccttgtcatttttcaacgatgcctactttgccacccagttacaacaccagtgaatttctccgcatcaaatggtctaagattgaagtggacaaaaatggaaaagatttgaaagagactactgtccttgtggcccaaaatggaaatatcaagattggtcaggactacaaagggagagtgtctgtgcccacacatcccgaggctgtgggcgatgcctccctcactgtggtcaagctgctggcaagtgatgcgggtctttaccgctgtgacgtcatgtacgggattgaagacacacaagacacggtgtcactgactgtggatggggttgtgtttcactacagggcggcaaccagcaggtacacactgaattttgaggctgctcagaaggcttgtttggacgttggggcagtcatagcaactccagagcagctctttgctgcctatgaagatggatttgagcagtgtgacgcaggctggctggctgatcagactgtcagatatcccatccgggctcccagagtaggctgttatggagataagatgggaaaggcaggagtcaggacttatggattccgttctccccaggaaacttacgatgtgtattgttatgtggatcatctggatggtgatgtgttccacctcactgtccccagtaaattcaccttcgaggaggctgcaaaagagtgtgaaaaccaggatgccaggctggcaacagtgggggaactccaggcggcatggaggaacggctttgaccagtgcgattacgggtggctgtcggatgccagcgtgcgccaccctgtgactgtggccagggcccagtgtggaggtggtctacttggggtgagaaccctgtatcgttttgagaaccagacaggcttccctccccctgatagcagatttgatgcctactgctttaaacgacctgatcgctgcaaaatgaacccgtgccttaacggaggcacctgttatcctactgaaacttcctacgtatgcacctgtgtgccaggatacagcggagaccagtgtgaacttgattttgatgaatgtcactctaatccctgtcgtaatggagccacttgtgttgatggttttaacacattcaggtgcctctgccttccaagttatgttggtgcactttgtgagcaagataccgagacatgtgactatggctggcacaaattccaagggcagtgctacaaatactttgcccatcgacgcacatgggatgcagctgaacgggaatgccgtctgcagggtgcccatctcacaagcatcctgtctcacgaagaacaaatgtttgttaatcgtgtgggccatgattatcagtggataggcctcaatgacaagatgtttgagcatgacttccgttggactgatggcagcacactgcaatacgagaattggagacccaaccagccagacagcttcttttctgctggagaagactgtgttgtaatcatttggcatgagaatggccagtggaatgatgttccctgcaattaccatctcacctatacgtgcaagaaaggaacagtcgcttgcggccagccccctgttgtagaaaatgccaagacctttggaaagatgaaacctcgttatgaaatcaactccctgattagataccactgcaaagatggtttcattcaacgtcaccttccaactatccggtgcttaggaaatggaagatgggctatacctaaaattacctgcatgaacccatctgcataccaaaggacttattctatgaaatactttaaaaattcctcatcagcaaaggacaattcaataaatacatccaaacatgatcatcgttggagccggaggtggcaggagtcgaggcgctgatccctaaaatggcgaacatgtgttttcatcatttcagccaaagtcctaacttcctgtgcctttcctatcacctcgagaagtaattatcagttggtttggatttttggaccaccgttcagtcattttgggttgccgtgctcccaaaacattttaaatgaaagtattggcattcaaaaagacagcagacaaaatgaaagaaaatgagagcagaaagtaagcatttccagcctatctaatttctttagttttctatttgcctccagtgcagtccatttcctaatgtataccagcctactgtactatttaaaatgctcaatttcagcaccgatggccatgtaaataagatgatttaatgttgattttaatcctgtatataaaataaaaagtcacaatgagtttgggcatatttaatgatgattatggagccttagaggtctttaatcattggttcggctgcttttatgtagtttaggctggaaatggtttcacttgctctttgactgtcagcaagactgaagatggcttttcctggacagctagaaaacacaaaatcttgtaggtcattgcacctatctcagccataggtgcagtttgcttctacatgatgctaaaggctgcgaatgggatcctgatggaactaaggactccaatgtcgaactcttctttgctgcattcctttttcttcacttacaagaaaggcctgaatggaggacttttctgtaaccaggaacattttttaggggtcaaagtgctaataattaactcaaccaggtctactttttaatggctttcataacactaactcataaggttaccgatcaatgcatttcatacggatatagacctagggctctggagggtgggggattgttaaaacacatgcaaaaaaaaaaaaaaaaaaaaaaaaagaaattttgtatatataaccattttaatcttttataaagttttgaatgttcatgtatgaatgctgcagctgtgaagcatacataaataaatgaagtaagccatactgatttaatttattggatgttattttccctaagacctgaaaatgaacatagtatgctagttatttttcagtgttagccttttactttcctcacacaatttggaatcatataatataggtactttgtccctgattaaataatgtgacggatagaatgcatcaagtgtttattatgaaaagagtggaaaagtatatagcttttagcaaaaggtgtttgcccattctaagaaatgagcgaatatatagaaatagtgtgggcatttcttcctgttaggtggagtgtatgtgttgacatttctccccatctcttcccactctgttttctccccattatttgaataaagtgactgctgaagatgactttgaatccttatccacttaatttaatgtttaaagaaaaacctgtaatggaaagtaagactccttccctaatttcagtttagagcaacttgaagaagagtagacaaaaaataaaatgcacatagaaaaagagaaaaagggcacaaagggattggcccaatattgattctttttttataaaacctcctttggcttagaaggaatgactctagctacaataatacacagtatgtttaagcaggttcccttggttgttgcattaaatgtaatccacctttaggtattttagagcacagaacaacactgtgttgatctagtaggtttctatttttcctttctctttacaatgcacataatactttcctgtatttatatcataacgtgtatagtgtaaaatgtgaatgactttttttgtgaatgaaaatctaaaatctttgtaactttttatatctgcttttgtttcaccaaagaaacctaaaatccttcttttactacac

SEQ ID NO: 4891 - DNA, 9455 bp, Homo sapiens
cttcttctcgctgagtctcctcctcggctctgacggtacagtgatataatgatgatgggtgtcacaacccgcatttgaacttgcaggcgagctgccccgagcctttctggggaagaactccaggcgtgcggacgcaacagccgagaacattaggtgttgtggacaggagctgggaccaagatcttcggccagccccgcatcctcccgcatcttccagcaccgtcccgcaccctccgcatccttccccgggccaccacgcttcctatgtgacccgcctgggcaacgccgaacccagtcgcgcagcgctgcagtgaattttccccccaaactgcaataagccgccttccaaggccaagatgttcataaatataaagagcatcttatggatgtgttcaaccttaatagtaacccatgcgctacataaagtcaaagtgggaaaaagcccaccggtgaggggctccctctctggaaaagtcagcctaccttgtcatttttcaacgatgcctactttgccacccagttacaacaccagtgaatttctccgcatcaaatggtctaagattgaagtggacaaaaatggaaaagatttgaaagagactactgtccttgtggcccaaaatggaaatatcaagattggtcaggactacaaagggagagtgtctgtgcccacacatcccgaggctgtgggcgatgcctccctcactgtggtcaagctgctggcaagtgatgcgggtctttaccgctgtgacgtcatgtacgggattgaagacacacaagacacggtgtcactgactgtggatggggttgtgtttcactacagggcggcaaccagcaggtacacactgaattttgaggctgctcagaaggcttgtttggacgttggggcagtcatagcaactccagagcagctctttgctgcctatgaagatggatttgagcagtgtgacgcaggctggctggctgatcagactgtcagatatcccatccgggctcccagagtaggctgttatggagataagatgggaaaggcaggagtcaggacttatggattccgttctccccaggaaacttacgatgtgtattgttatgtggatcatctggatggtgatgtgttccacctcactgtccccagtaaattcaccttcgaggaggctgcaaaagagtgtgaaaaccaggatgccaggctggcaacagtgggggaactccaggcggcatggaggaacggctttgaccagtgcgattacgggtggctgtcggatgccagcgtgcgccaccctgtgactgtggccagggcccagtgtggaggtggtctacttggggtgagaaccctgtatcgttttgagaaccagacaggcttccctccccctgatagcagatttgatgcctactgctttaaacgtcgaatgagtgatttgagtgtaattggtcatccaatagattcagaatctaaagaagatgaaccttgtagtgaagaaacagatccagtgcatgatctaatggctgaaattttacctgaattccctgacataattgaaatagacctataccacagtgaagaaaatgaagaagaagaagaagagtgtgcaaatgctactgatgtgacaaccaccccatctgtgcagtacataaatgggaagcatctcgttaccactgtgcccaaggacccagaagctgcagaagctaggcgtggccagtttgaaagtgttgcaccttctcagaatttctcggacagctctgaaagtgatactcatccatttgtaatagccaaaacggaattgtctactgctgtgcaacctaatgaatctacagaaacaactgagtctcttgaagttacatggaagcctgagacttaccctgaaacatcagaacatttttcaggtggtgagcctgatgttttccccacagtcccattccatgaggaatttgaaagtggaacagccaaaaaaggggcagaatcagtcacagagagagatactgaagttggtcatcaggcacatgaacatactgaacctgtatctctgtttcctgaagagtcttcaggagagattgccattgaccaagaatctcagaaaatagcctttgcaagggctacagaagtaacatttggtgaagaggtagaaaaaagtacttctgtcacatacactcccactatagttccaagttctgcatcagcatatgtttcagaggaagaagcagttaccctaataggaaatccttggccagatgacctgttgtctaccaaagaaagctgggtagaagcaactcctagacaagttgtagagctctcagggagttcttcgattccaattacagaaggctctggagaagcagaagaagatgaagatacaatgttcaccatggtaactgatttatcacagagaaatactactgatacactcattactttagacactagcaggataatcacagaaagcttttttgaggttcctgcaaccaccatttatccagtttctgaacaaccttctgcaaaagtggtgcctaccaagtttgtaagtgaaacagacacttctgagtggatttccagtaccactgttgaggaaaagaaaaggaaggaggaggagggaactacaggtacggcttctacatttgaggtatattcatctacacagagatcggatcaattaattttaccctttgaattagaaagtccaaatgtagctacatctagtgattcaggtaccaggaaaagttttatgtccttgacaacaccaacacagtctgaaagggaaatgacagattctactcctgtctttacagaaacaaatacattagaaaatttgggggcacagaccactgagcacagcagtatccatcaacctggggttcaggaagggctgaccactctcccacgtagtcctgcctctgtctttatggagcagggctctggagaagctgctgccgacccagaaaccaccactgtttcttcattttcattaaacgtagagtatgcaattcaagccgaaaaggaagtagctggcactttgtctccgcatgtggaaactacattctccactgagccaacaggactggttttgagtacagtaatggacagagtagttgctgaaaatataacccaaacatccagggaaatagtgatttcagagcgattaggagaaccaaattatggggcagaaataaggggcttttccacaggttttcctttggaggaagatttcagtggtgactttagagaatactcaacagtgtctcatcccatagcaaaagaagaaacggtaatgatggaaggctctggagatgcagcatttagggacacccagacttcaccatctacagtacctacttcagttcacatcagtcacatatctgactcagaaggacccagtagcaccatggtcagcacttcagccttcccctgggaagagtttacatcctcagctgagggctcaggtgagcaactggtcacagtcagcagctctgttgttccagtgcttcccagtgctgtgcaaaagttttctggtacagcttcctccattatcgacgaaggattgggagaagtgggtactgtcaatgaaattgatagaagatccaccattttaccaacagcagaagtggaaggtacgaaagctccagtagagaaggaggaagtaaaggtcagtggcacagtttcaacaaactttccccaaactatagagccagccaaattatggtctaggcaagaagtcaaccctgtaagacaagaaattgaaagtgaaacaacatcagaggaacaaattcaagaagaaaagtcatttgaatcccctcaaaactctcctgcaacagaacaaacaatctttgattcacagacatttactgaaactgaactcaaaaccacagattattctgtactaacaacaaagaaaacttacagtgatgataaagaaatgaaggaggaagacacttctttagttaacatgtctactccagatccagatgcaaatggcttggaatcttacacaactctccctgaagctactgaaaagtcacattttttcttagctactgcattagtaactgaatctataccagctgaacatgtagtcacagattcaccaatcaaaaaggaagaaagtacaaaacattttccgaaaggcatgagaccaacaattcaagagtcagatactgagctcttattctctggactgggatcaggagaagaagttttacctactctaccaacagagtcagtgaattttactgaagtggaacaaatcaataacacattatatccccacacttctcaagtggaaagtacctcaagtgacaaaattgaagactttaacagaatggaaaatgtggcaaaagaagttggaccactcgtatctcaaacagacatctttgaaggtagtgggtcagtaaccagcacaacattaatagaaattttaagtgacactggagcagaaggacccacggtggcacctctccctttctccacggacatcggacatcctcaaaatcagactgtcaggtgggcagaagaaatccagactagtagaccacaaaccataactgaacaagactctaacaagaattcttcaacagcagaaattaacgaaacaacaacctcatctactgattttctggctagagcttatggttttgaaatggccaaagaatttgttacatcagcaccaaaaccatctgacttgtattatgaaccttctggagaaggatctggagaagtggatattgttgattcatttcacacttctgcaactactcaggcaaccagacaagaaagcagcaccacatttgtttctgatgggtccctggaaaaacatcctgaggtgccaagcgctaaagctgttactgctgatggattcccaacagtttcagtgatgctgcctcttcattcagagcagaacaaaagctcccctgatccaactagcacactgtcaaatacagtgtcatatgagaggtccacagacggtagtttccaagaccgtttcagggaattcgaggattccaccttaaaacctaacagaaaaaaacccactgaaaatattatcatagacctggacaaagaggacaaggatttaatattgacaattacagagagtaccatccttgaaattctacctgagctgacatcggataaaaatactatcatagatattgatcatactaaacctgtgtatgaagacattcttggaatgcaaacagatatagatacagaggtaccatcagaaccacatgacagtaatgatgaaagtaatgatgacagcactcaagttcaagagatctatgaggcagctgtcaacctttctttaactgaggaaacatttgagggctctgctgatgttctggctagctacactcaggcaacacatgatgaatcaatgacttatgaagatagaagccaactagatcacatgggctttcacttcacaactgggatccctgctcctagcacagaaacagaattagacgttttacttcccacggcaacatccctgccaattcctcgtaagtctgccacagttattccagagattgaaggaataaaagctgaagcaaaagccctggatgacatgtttgaatcaagcactttgtctgatggtcaagctattgcagaccaaagtgaaataataccaacattgggccaatttgaaaggactcaggaggagtatgaagacaaaaaacatgctggtccttcttttcagccagaattctcttcaggagctgaggaggcattagtagaccatactccctatctaagtattgctactacccaccttatggatcagagtgtaacagaggtgcctgatgtgatggaaggatccaatcccccatattacactgatacaacattagcagtttcaacatttgcgaagttgtcttctcagacaccatcatctcccctcactatctactcaggcagtgaagcctctggacacacagagatcccccagcccagtgctctgccaggaatagacgtcggctcatctgtaatgtccccacaggattcttttaaggaaattcatgtaaatattgaagcgactttcaaaccatcaagtgaggaataccttcacataactgagcctccctctttatctcctgacacaaaattagaaccttcagaagatgatggtaaacctgagttattagaagaaatggaagcttctcccacagaacttattgctgtggaaggaactgagattctccaagatttccaaaacaaaaccgatggtcaagtttctggagaagcaatcaagatgtttcccaccattaaaacacctgaggctggaactgttattacaactgccgatgaaattgaattagaaggtgctacacagtggccacactctacttctgcttctgccacctatggggtcgaggcaggtgtggtgccttggctaagtccacagacttctgagaggcccacgctttcttcttctccagaaataaaccctgaaactcaagcagctttaatcagagggcaggattccacgatagcagcatcagaacagcaagtggcagcgagaattcttgattccaatgatcaggcaacagtaaaccctgtggaatttaatactgaggttgcaacaccaccattttcccttctggagacttctaatgaaacagatttcctgattggcattaatgaagagtcagtggaaggcacggcaatctatttaccaggacctgatcgctgcaaaatgaacccgtgccttaacggaggcacctgttatcctactgaaacttcctacgtatgcacctgtgtgccaggatacagcggagaccagtgtgaacttgattttgatgaatgtcactctaatccctgtcgtaatggagccacttgtgttgatggttttaacacattcaggtgcctctgccttccaagttatgttggtgcactttgtgagcaagataccgagacatgtgactatggctggcacaaattccaagggcagtgctacaaatactttgcccatcgacgcacatgggatgcagctgaacgggaatgccgtctgcagggtgcccatctcacaagcatcctgtctcacgaagaacaaatgtttgttaatcgtgtgggccatgattatcagtggataggcctcaatgacaagatgtttgagcatgacttccgttggactgatggcagcacactgcaatacgagaattggagacccaaccagccagacagcttcttttctgctggagaagactgtgttgtaatcatttggcatgagaatggccagtggaatgatgttccctgcaattaccatctcacctatacgtgcaagaaaggaacagtcgcttgcggccagccccctgttgtagaaaatgccaagacctttggaaagatgaaacctcgttatgaaatcaactccctgattagataccactgcaaagatggtttcattcaacgtcaccttccaactatccggtgcttaggaaatggaagatgggctatacctaaaattacctgcatgaacccatctgcataccaaaggacttattctatgaaatactttaaaaattcctcatcagcaaaggacaattcaataaatacatccaaacatgatcatcgttggagccggaggtggcaggagtcgaggcgctgatccctaaaatggcgaacatgtgttttcatcatttcagccaaagtcctaacttcctgtgcctttcctatcacctcgagaagtaattatcagttggtttggatttttggaccaccgttcagtcattttgggttgccgtgctcccaaaacattttaaatgaaagtattggcattcaaaaagacagcagacaaaatgaaagaaaatgagagcagaaagtaagcatttccagcctatctaatttctttagttttctatttgcctccagtgcagtccatttcctaatgtataccagcctactgtactatttaaaatgctcaatttcagcaccgatggccatgtaaataagatgatttaatgttgattttaatcctgtatataaaataaaaagtcacaatgagtttgggcatatttaatgatgattatggagccttagaggtctttaatcattggttcggctgcttttatgtagtttaggctggaaatggtttcacttgctctttgactgtcagcaagactgaagatggcttttcctggacagctagaaaacacaaaatcttgtaggtcattgcacctatctcagccataggtgcagtttgcttctacatgatgctaaaggctgcgaatgggatcctgatggaactaaggactccaatgtcgaactcttctttgctgcattcctttttcttcacttacaagaaaggcctgaatggaggacttttctgtaaccaggaacattttttaggggtcaaagtgctaataattaactcaaccaggtctactttttaatggctttcataacactaactcataaggttaccgatcaatgcatttcatacggatatagacctagggctctggagggtgggggattgttaaaacacatgcaaaaaaaaaaaaaaaaaaaaaaaaagaaattttgtatatataaccattttaatcttttataaagttttgaatgttcatgtatgaatgctgcagctgtgaagcatacataaataaatgaagtaagccatactgatttaatttattggatgttattttccctaagacctgaaaatgaacatagtatgctagttatttttcagtgttagccttttactttcctcacacaatttggaatcatataatataggtactttgtccctgattaaataatgtgacggatagaatgcatcaagtgtttattatgaaaagagtggaaaagtatatagcttttagcaaaaggtgtttgcccattctaagaaatgagcgaatatatagaaatagtgtgggcatttcttcctgttaggtggagtgtatgtgttgacatttctccccatctcttcccactctgttttctccccattatttgaataaagtgactgctgaagatgactttgaatccttatccacttaatttaatgtttaaagaaaaacctgtaatggaaagtaagactccttccctaatttcagtttagagcaacttgaagaagagtagacaaaaaataaaatgcacatagaaaaagagaaaaagggcacaaagggattggcccaatattgattctttttttataaaacctcctttggcttagaaggaatgactctagctacaataatacacagtatgtttaagcaggttcccttggttgttgcattaaatgtaatccacctttaggtattttagagcacagaacaacactgtgttgatctagtaggtttctatttttcctttctctttacaatgcacataatactttcctgtatttatatcataacgtgtatagtgtaaaatgtgaatgactttttttgtgaatgaaaatctaaaatctttgtaactttttatatctgcttttgtttcaccaaagaaacctaaaatccttcttttactacac

SEQ ID NO: 4892 - DNA, 7154 bp, Homo sapiens
cttcttctcgctgagtctcctcctcggctctgacggtacagtgatataatgatgatgggtgtcacaacccgcatttgaacttgcaggcgagctgccccgagcctttctggggaagaactccaggcgtgcggacgcaacagccgagaacattaggtgttgtggacaggagctgggaccaagatcttcggccagccccgcatcctcccgcatcttccagcaccgtcccgcaccctccgcatccttccccgggccaccacgcttcctatgtgacccgcctgggcaacgccgaacccagtcgcgcagcgctgcagtgaattttccccccaaactgcaataagccgccttccaaggccaagatgttcataaatataaagagcatcttatggatgtgttcaaccttaatagtaacccatgcgctacataaagtcaaagtgggaaaaagcccaccggtgaggggctccctctctggaaaagtcagcctaccttgtcatttttcaacgatgcctactttgccacccagttacaacaccagtgaatttctccgcatcaaatggtctaagattgaagtggacaaaaatggaaaagatttgaaagagactactgtccttgtggcccaaaatggaaatatcaagattggtcaggactacaaagggagagtgtctgtgcccacacatcccgaggctgtgggcgatgcctccctcactgtggtcaagctgctggcaagtgatgcgggtctttaccgctgtgacgtcatgtacgggattgaagacacacaagacacggtgtcactgactgtggatggggttgtgtttcactacagggcggcaaccagcaggtacacactgaattttgaggctgctcagaaggcttgtttggacgttggggcagtcatagcaactccagagcagctctttgctgcctatgaagatggatttgagcagtgtgacgcaggctggctggctgatcagactgtcagatatcccatccgggctcccagagtaggctgttatggagataagatgggaaaggcaggagtcaggacttatggattccgttctccccaggaaacttacgatgtgtattgttatgtggatcatctggatggtgatgtgttccacctcactgtccccagtaaattcaccttcgaggaggctgcaaaagagtgtgaaaaccaggatgccaggctggcaacagtgggggaactccaggcggcatggaggaacggctttgaccagtgcgattacgggtggctgtcggatgccagcgtgcgccaccctgtgactgtggccagggcccagtgtggaggtggtctacttggggtgagaaccctgtatcgttttgagaaccagacaggcttccctccccctgatagcagatttgatgcctactgctttaaacctaaagaggctacaaccatcgatttgagtatcctcgcagaaactgcatcacccagtttatccaaagaaccacaaatggtttctgatagaactacaccaatcatccctttagttgatgaattacctgtcattccaacagagttccctcccgtgggaaatattgtcagttttgaacagaaagccacagtccaacctcaggctatcacagatagtttagccaccaaattacccacacctactggcagtaccaagaagccctgggatatggatgactactcaccttctgcttcaggacctcttggaaagctagacatatcagaaattaaggaagaagtgctccagagtacaactggcgtctctcattatgctacggattcatgggatggtgtcgtggaagataaacaaacacaagaatcggttacacagattgaacaaatagaagtgggtcctttggtaacatctatggaaatcttaaagcacattccttccaaggaattccctgtaactgaaacaccattggtaactgcaagaatgatcctggaatccaaaactgaaaagaaaatggtaagcactgtttctgaattggtaaccacaggtcactatggattcaccttgggagaagaggatgatgaagacagaacacttacagttggatctgatgagagcaccttgatctttgaccaaattcctgaagtcattacggtgtcaaagacttcagaagacaccatccacactcatttagaagacttggagtcagtctcagcatccacaactgtttcccctttaattatgcctgataataatggatcatccatggatgactgggaagagagacaaactagtggtaggataacggaagagtttcttggcaaatatctgtctactacaccttttccatcacagcatcgtacagaaatagaattgtttccttattctggtgataaaatattagtagagggaatttccacagttatttatccttctctacaaacagaaatgacacatagaagagaaagaacagaaacactaataccagagatgagaacagatacttatacagatgaaatacaagaagagatcactaaaagtccatttatgggaaaaacagaagaagaagtcttctctgggatgaaactctctacatctctctcagagccaattcatgttacagagtcttctgtggaaatgaccaagtcttttgatttcccaacattgataacaaagttaagtgcagagccaacagaagtaagagatatggaggaagactttacagcaactccaggtactacaaaatatgatgaaaatattacaacagtgcttttggcccatggtactttaagtgttgaagcagccactgtatcaaaatggtcatgggatgaagataatacaacatccaagcctttagagtctacagaaccttcagcctcttcaaaattgccccctgccttactcacaactgtggggatgaatggaaaggataaagacatcccaagtttcactgaagatggagcagatgaatttactcttattccagatagtactcaaaagcagttagaggaggttactgatgaagacatagcagcccatggaaaattcacaattagatttcagccaactacatcaactggtattgcagaaaagtcaactttgagagattctacaactgaagaaaaagttccacctatcacaagcactgaaggccaagtttatgcaaccatggaaggaagtgctttgggtgaagtagaagatgtggacctctctaagccagtatctactgttccccaatttgcacacacttcagaggtggaaggattagcatttgttagttatagtagcacccaagagcctactacttatgtagactcttcccataccattcctctttctgtaattcccaagacagactggggagtgttagtaccttctgttccatcagaagatgaagttctaggtgaaccctctcaagacatacttgtcattgatcagactcgccttgaagcgactatttctccagaaactatgagaacaacaaaaatcacagagggaacaactcaggaagaattcccttggaaagaacagactgcagagaaaccagttcctgctctcagttctacagcttggactcccaaggaggcagtaacaccactggatgaacaagagggcgatggatcagcatatacagtctctgaagatgaattgttgacaggttctgagagggtcccagttttagaaacaactccagttggaaaaattgatcacagtgtgtcttatccaccaggtgctgtaactgagcacaaagtgaaaacagatgaagtggtaacactaacaccacgcattgggccaaaagtatctttaagtccagggcctgaacaaaaatatgaaacagaaggtagtagtacaacaggatttacatcatctttgagtccttttagtacccacattacccagcttatggaagaaaccactactgagaaaacatccctagaggatattgatttaggctcaggattatttgaaaagcccaaagccacagaactcatagaattttcaacaatcaaagtcacagttccaagtgatattaccactgccttcagttcagtagacagacttcacacaacttcagcattcaagccatcttccgcgatcactaagaaaccacctctcatcgacagggaacctggtgaagaaacaaccagtgacatggtaatcattggagaatcaacatctcatgttcctcccactacccttgaagatattgtagccaaggaaacagaaaccgatattgatagagagtatttcacgacttcaagtcctcctgctacacagccaacaagaccacccactgtggaagacaaagaggcctttggacctcaggcgctttctacgccacagcccccagcaagcacaaaatttcaccctgacattaatgtttatattattgaggtcagagaaaataagacaggacctgatcgctgcaaaatgaacccgtgccttaacggaggcacctgttatcctactgaaacttcctacgtatgcacctgtgtgccaggatacagcggagaccagtgtgaacttgattttgatgaatgtcactctaatccctgtcgtaatggagccacttgtgttgatggttttaacacattcaggtgcctctgccttccaagttatgttggtgcactttgtgagcaagataccgagacatgtgactatggctggcacaaattccaagggcagtgctacaaatactttgcccatcgacgcacatgggatgcagctgaacgggaatgccgtctgcagggtgcccatctcacaagcatcctgtctcacgaagaacaaatgtttgttaatcgtgtgggccatgattatcagtggataggcctcaatgacaagatgtttgagcatgacttccgttggactgatggcagcacactgcaatacgagaattggagacccaaccagccagacagcttcttttctgctggagaagactgtgttgtaatcatttggcatgagaatggccagtggaatgatgttccctgcaattaccatctcacctatacgtgcaagaaaggaacagtcgcttgcggccagccccctgttgtagaaaatgccaagacctttggaaagatgaaacctcgttatgaaatcaactccctgattagataccactgcaaagatggtttcattcaacgtcaccttccaactatccggtgcttaggaaatggaagatgggctatacctaaaattacctgcatgaacccatctgcataccaaaggacttattctatgaaatactttaaaaattcctcatcagcaaaggacaattcaataaatacatccaaacatgatcatcgttggagccggaggtggcaggagtcgaggcgctgatccctaaaatggcgaacatgtgttttcatcatttcagccaaagtcctaacttcctgtgcctttcctatcacctcgagaagtaattatcagttggtttggatttttggaccaccgttcagtcattttgggttgccgtgctcccaaaacattttaaatgaaagtattggcattcaaaaagacagcagacaaaatgaaagaaaatgagagcagaaagtaagcatttccagcctatctaatttctttagttttctatttgcctccagtgcagtccatttcctaatgtataccagcctactgtactatttaaaatgctcaatttcagcaccgatggccatgtaaataagatgatttaatgttgattttaatcctgtatataaaataaaaagtcacaatgagtttgggcatatttaatgatgattatggagccttagaggtctttaatcattggttcggctgcttttatgtagtttaggctggaaatggtttcacttgctctttgactgtcagcaagactgaagatggcttttcctggacagctagaaaacacaaaatcttgtaggtcattgcacctatctcagccataggtgcagtttgcttctacatgatgctaaaggctgcgaatgggatcctgatggaactaaggactccaatgtcgaactcttctttgctgcattcctttttcttcacttacaagaaaggcctgaatggaggacttttctgtaaccaggaacattttttaggggtcaaagtgctaataattaactcaaccaggtctactttttaatggctttcataacactaactcataaggttaccgatcaatgcatttcatacggatatagacctagggctctggagggtgggggattgttaaaacacatgcaaaaaaaaaaaaaaaaaaaaaaaaagaaattttgtatatataaccattttaatcttttataaagttttgaatgttcatgtatgaatgctgcagctgtgaagcatacataaataaatgaagtaagccatactgatttaatttattggatgttattttccctaagacctgaaaatgaacatagtatgctagttatttttcagtgttagccttttactttcctcacacaatttggaatcatataatataggtactttgtccctgattaaataatgtgacggatagaatgcatcaagtgtttattatgaaaagagtggaaaagtatatagcttttagcaaaaggtgtttgcccattctaagaaatgagcgaatatatagaaatagtgtgggcatttcttcctgttaggtggagtgtatgtgttgacatttctccccatctcttcccactctgttttctccccattatttgaataaagtgactgctgaagatgactttgaatccttatccacttaatttaatgtttaaagaaaaacctgtaatggaaagtaagactccttccctaatttcagtttagagcaacttgaagaagagtagacaaaaaataaaatgcacatagaaaaagagaaaaagggcacaaagggattggcccaatattgattctttttttataaaacctcctttggcttagaaggaatgactctagctacaataatacacagtatgtttaagcaggttcccttggttgttgcattaaatgtaatccacctttaggtattttagagcacagaacaacactgtgttgatctagtaggtttctatttttcctttctctttacaatgcacataatactttcctgtatttatatcataacgtgtatagtgtaaaatgtgaatgactttttttgtgaatgaaaatctaaaatctttgtaactttttatatctgcttttgtttcaccaaagaaacctaaaatccttcttttactacac

SEQ ID NO: 4893 - DNA, 967 bp, Homo sapiens; identical to SEQ ID NO: 1532

SEQ ID NO: 4894 - DNA, 16321 bp, Homo sapiens
atgctggtgatctggattctgacgctggctctccggctctgcgcgtccgttactacagtgacaccaggctcaacagtaaacaccagtattggaggtaatacaacttctgcatccacacccagttcaagcgacccttttaccacctttagtgactatggggtgtcagtcacatttatcacgggctcaactgcaacaaaacacttccttgacagctccacaaactcaggccacagtgaggaatcaacagtatcccacagcggcccaggtgcaactggaacaacactcttcccttcccactctgcaacctcagtttttgttggagaacctaaaacctcacccatcacttcagcctcaatggaaacaacagcgttacctggcagtaccacaacagcaggcctgagtgagaaatctaccaccttctacagtagccccagatcaccagacagaacactctcacctgcccgcacgacaagctcaggcgtcagtgaaaaatcaaccacctcccacagccgaccaggcccaacgcacacaatagcgttccctgacagtaccaccatgccaggcgtcagtcaggaatctacagcttcccacagcatccccggctccacagacacaacactgtcccctggcactaccacaccatcatcccttggtccagaatctactaccttccacagcagcccaggctacactaaaacaacacgcttacctgacaacaccacaacctcaggcctccttgaagcatctacgcccgtccacagcagcactggatcgccacacacaacactgtccccttccagctctacaacccatgagggagaacctaccaccttccagagctggccaagctcaaaggacacttcgcctgcaccttctggtaccacatcagcctttgttaaactatctacaacttatcacagcagcccgagctcaactccaacaacccacttttctgccagctccacaaccttgggccatagtgaggaatcgacaccagtccacagcagcccagttgcaactgcaacaacacccccacctgcccgctccgcgacctcaggccatgttgaagaatctacagcctaccacaggagcccgggctcaactcaaacaatgcacttccctgaaagctccacaacttcaggccatagtgaagaatcagcaactttccacggcagcacaacacacacaaaatcttcaactcctagcaccacagctgccctagcacatacaagctaccacagcagcctgggctcaactgaaacaacacacttccgtgatagctccacaatctcaggccgtagtgaggaatcaaaagcatcccacagcagcccagatgcaatggcaacaacagtcttacctgccggctctacaccctcagttcttgttggagactcgacgccctcacccatcagttcaggctcaatggaaaccacagcgttacccggcagtaccacaaaaccaggcctcagtgagaaatctaccactttctacagtagccccagatcaccagacacaacacacttacctgccagcatgacaagctcaggcgtcagtgaagaatccaccacctcccacagccgaccaggctcaacacacacaacagcattccctggcagtaccaccatgccaggcctcagtcaggaatctacagcttcccacagcagcccaggccccacagacacaacattgtcccctggcagtaccacagcatcatcccttggtccagaatatactaccttccacagccgcccaggctccactgaaacaacactcttacctgacaacaccacagcctcaggactccttgaagcatctatgcccgtccacagcagcaccagatcgccacacacaacactgtcccctgccggctctacaacccgtcagggagaatctaccacattccatagctggccaagctcaaaggacactaggcctgcacctcctactaccacatcagcctttgttgagccatctacaacctcccacggcagcccgagctcaattccaacaacccacatttctgcccgctccacaacctcaggcctcgttgaagaatctacgacctaccacagcagcccgggctcaactcaaacaatgcacttccctgaaagcgacacaacttcaggccgtggtgaagaatcaacaacttcccacagcagcacaacacacacaatatcttcagctcctagcaccacatctgcccttgttgaagaacctaccagctaccacagcagcccgggctcaactgcaacaacacacttccctgacagctccacaacctcaggccgtagtgaggaatcaacagcatcgcacagcagccaagacgcaacgggaacaatagtcctacctgcccgctccacaacctcagttcttcttggagaatctacgacctcacccatcagttcaggctcaatggaaacgacagcgttacccggcagtaccacaacgccaggcctcagtgagagatctaccactttccatagtagccccagatcaccagccacaacactctcacctgccagcacgacaagctcaggcgtcagtgaagaatccaccacctcccgcagccgaccaggctcaacgcacacaacagcattccctgacagcaccaccacgccaggcctcagtcggcattctacaacttcccacagcagcccaggctcaacggatacaacactgttacctgccagcaccaccacctcaggccccagtcaggaatcaacaacttcccacagcagctcaggttcaactgacacagcactgtcccctggcagtaccacagccttatcctttggtcaagaatctacaaccttccacagcaacccaggctccactcacacaacactcttccctgacagcaccacaagctcaggcatcgttgaagcatctacacgcgtccacagcagcactggctcaccacgcacaacactgtcccctgccagctccacaagccctggacttcagggagaatctactgccttccagacccacccagcctcaactcacacaacgccttcacctcctagcaccgcaacagcccctgttgaagaatctacaacctaccaccgcagcccaggctcgactccaacaacacacttccctgccagctccacaacttcgggccacagtgagaaatcaacaatattccacagcagcccagatgcaagtggaacaacaccctcatctgcccactccacaacctcaggtcgtggagaatctacaacctcacgcatcagtccaggctcaactgaaataacaacgttacctggcagtaccacaacaccaggcctcagtgaggcatctaccaccttctacagcagccccagatcaccaaccacaacactctcacctgccagcatgacaagcctgggcgtcggtgaagaatccaccacctcccgtagccaaccaggttctactcactcaacagtgtcacctgccagcaccaccacgccaggcctcagtgaggaatctaccaccgtctacagcagcagccgaggctcaactgaaaccacagtgttccctcacagcaccacaacctcagttcatggtgaagagcctacaaccttccacagccggccagcctcaactcacacaacactgttcactgaggacagcaccacctcgggcctcactgaagaatctacagccttccccggcagcccagcctccacccaaacagggttacctgccacactcacaaccgcagacctcggtgaggaatcaactacctttcccagcagctcaggctcaactggaacaaaactctcacctgcccgctccaccacctctggcctcgttggagaatccacaccctcacgcctcagtccaagctcaaccgaaacaacaactttacctggcagtcccacaacaccaagcctcagtgagaaatcaaccaccttctacactagccccagatcaccagatgcaacactctcacctgcaaccacaacaagctcaggcgtcagcgaagaatccagcacatcccacagtcaaccaggctcaacgcacacaacagcattccctgacagcaccaccacctcagacctcagtcaggaacctacaacttcccacagcagccaaggctcaacagaggcaacactgtcccctggcagtaccacagcctcatcccttggtcaacaatctacaaccttccacagcagcccaggcgacactgaaaccacactcttacctgacgacaccataacctcaggcctcgtggaggcatctacacccacccacagcagcactggctcgctacacacaacactgacccctgccagctccacaagcgctggccttcaggaagaatctaccactttccagagctggccaagctcaagtgacacaacaccttcacctcccggcaccacagcagcccctgttgaagtatccacaacctaccacagccgcccgagctcaactccaacaacacacttttctgccagttccacaaccttgggccgtagtgaggaatcaacaacagtccacagcagcccaggtgcaactggaacagcactcttccctacccgctctgcaacctcagttcttgttggagaacctacaacgtcacccatcagttcaggctcaacggaaacaacagcgttacctggcagtaccacaacagcaggcctgagtgagaaatctaccaccttctacagtagccccagatcaccggacacaacactctcacctgccagcacgacaagctcaggcgtcagtgaagaatccaccacctcccacagccgaccaggctcaacgcacacaacagcattccctggcagtaccaccatgccaggcgtcagtcaggaatctacagcttcccacagcagcccaggctccacagacacaacattgtcccctggcagtaccacagcatcatcccttggtccagaatctactactttccacagcagcccaggctccactgaaacaacactcttacctgacaacaccacagcctcaggcctccttgaagcatctacgcccgtccacagcagcactggatcgccacacacaacactgtcccctgccggctctacaacacgtcagggagaatctaccaccttccagagctggccaagctcaaaggacactatgcctgcacctcctactaccacatcagcctttgttgagctatctacaacctcccacggcagcccgagctcaactccaacaacccacttttctgccagctccacaaccttgggccgtagtgaggaatcgacaacagtccacagcagcccagttgcaactgcaacaacaccctcgcctgcccgctccacaacctcaggcctcgttgaagaatctacggcgtaccacagcagcccgggctcaactcaaacaatgcacttccctgaaagctccacagcttcaggtcgtagtgaagaatcaagaacttcccacagcagcacaacacacacaatatcttcacctcctagcaccacatctgcccttgttgaagaacctaccagctaccacagcagcccgggctcaactgcaacaacacacttccctgacagctccacaacctcaggccgtagtgaggaatcaacagcatcccacagcagccaagacgcaacgggaacaatagtcctacctgcccgctccacaacctcagttcttcttggagaatctacgacctcacccatcagttcaggctcaatggaaacgacagcgttacccggcagtaccacaacgccaggcctcagtgagaaatctaccactttccacagtagccccagatcaccagccacaacactctcacctgccagcacgacaagctcaggcgtcagtgaagaatccaccacctcccacagccgaccaggctcaacgcacacaacagcattccctgacagcaccaccacgccaggcctcagtcggcattctacaacttcccacagcagcccaggctcaacggatacaacactgttacctgccagcaccaccacctcaggccccagtcaggaatcaacaacttcccacagcagcccaggttcaactgacacagcactgtcccctggcagtaccacagccttatcctttggtcaagaatctacaaccttccacagcagcccaggctccactcacacaacgctcttccctgacagcaccacaagctcaggcatcgttgaagcatctacacgcgtccacagcagcactggctcaccacgcacaacactgtcccctgccagctccacaagccctggacttcagggagaatctaccgccttccagacccacccagcctcaactcacacgacgccttcacctcctagcaccgcaacagcccctgttgaagaatctacaacctaccaccgcagcccaggctcgactccaacaacacacttccctgccagctccacaacttcgggccacagtgagaaatcaacaatattccacagcagcccagatgcaagtggaacaacaccctcatctgcccactccacaacctcaggtcgtggagaatctacaacctcacgcatcagtccaggctcaactgaaataacaacgttacctggcagtaccacaacaccaggcctcagtgaggcatctaccaccttctacagcagccccagatcaccaaccacaacactctcacctgccagtatgacaagcctaggcgtcggtgaagaatccaccacctcccgtagccaaccaggttctactcactcaacagtgtcacctgccagcaccaccacgccaggcctcagtgaggaatctaccaccgtctacagcagcagcccaggctcaactgaaaccacagtgttccctcgcacccccacaacctcagttcgtggtgaagagcctacaaccttccacagccggccagcctcaactcacacaacactgttcactgaggacagcaccacctcgggcctcactgaagaatctacagccttccccggcagcccagcctccacccaaacagggttacctgccacactcacaaccgcagacctcggtgaggaatcaactacctttcccagcagctcaggctcaactggaacaacactctcacctgcccgctccaccacctctggcctcgttggagaatccacaccctcacgcctcagtccaagctcaaccgaaacaacaactttacccggcagtcccacaacaccaagcctcagtgagaaatcaaccaccttctacactagccccagatcaccagatgcaacactctcacctgcaaccacaacaagctcaggcgtcagtgaagaatccagcacatcccacagtcaaccaggctcaacgcacacaacagcattccctgacagcaccaccacgccaggcctcagtcggcattctacaacttcccacagcagcccaggctcaacggatacaacactgttacctgccagcaccaccacctcaggccccagtcaggaatcaacaacttcccacagcagcccaggttcaactgacacagcactgtcccctggcagtaccacagccttatcctttggtcaagaatctacaaccttccacagcagcccaggctccactcacacaacactcttccctgacagcaccacaagctcaggcatcgttgaagcatctacacgcgtccacagcagcactggctcaccacgcacaacactgtcccctgccagctccacaagccctggacttcagggagaatctaccaccttccagacccacccagcctcaactcacacgacgccttcacctcctagcaccgcaacagcccctgttgaagaatctacaacctaccaccgcagcccaggctcgactccaacaacacacttccctgccagctccacaacttcgggccacagtgagaaatcaacaatattccacagcagcccagatgcaagtggaacaacaccctcatctgcccactccacaacctcaggtcgtggagaatctacaacctcacgcatcagtccaggctcaactgaaataacaacgttacctggcagtaccacaacaccaggcctcagtgaggcatctaccaccttctacagcagccccagatcaccaaccacaacactctcacctgccagtatgacaagcctaggcgtcggtgaagaatccaccacctcccgtagccaaccaggttctactcactcaacagtgtcacctgccagcaccaccacgccaggcctcagtgaggaatctaccaccgtctacagcagcagcccaggctcaactgaaaccacagtgttccctcgcagcaccacaacctcagttcgtggtgaagagcctacaaccttccacagccggccagcctcaactcacacaacactgttcactgaggacagcaccacctcgggcctcactgaagaatctacagccttccccggcagcccagcctccacccaaacagggttacctgccacactcacaaccgcagacctcggtgaggaatcaactacctttcccagcagctcaggctcaactggaacaacactctcacctgcccgctccaccacctctggcctcgttggagaatccacaccctcacgcctcagtccaagctcaaccgaaacaacaactttacccggcagtcccacaacaccaagcctcagtgagaaatcaaccaccttctacactagccccagatcaccagatgcaacactctcacctgcaaccacaacaagctcaggcgtcagtgaagaatccagcacatcccacagtcaaccaggctcaacgcacacaacagcgttccctgacagcaccaccacctcaggcctcagtcaggaacctacagcttcccacagcagccaaggctcaacagaggcaacactgtcccctggcagtaccacagcctcatcccttggtcaacaatctacaaccttccacagcagcccaggcgacactgaaaccacactcttacctgacgacaccataacctcaggcctcgtggaggcatctacacccacccacagcagcactggctcgctacacacaacactgacccctgccagctccacaagcgctggccttcaggaagaatctaccactttccagagctggccaagctcaagtgacacaacaccttcacctcccggcaccacagcagcccctgttgaagtatccacaacctaccacagccgcccgagctcaactccaacaacacacttttctgccagttccacaaccttgggccgtagtgaggaatcaacaacagtccacagcagcccaggtgcaactggaacagcactcttccctacccgctctgcaacctcagttcttgttggagaacctacaacgtcacccatcagttcaggctcaacggaaacaacagcgttacctggcagtaccacaacagcaggcctgagtgagaaatctaccaccttctacagtagccccagatcaccggacacaacactctcacctgccagcacgacaagctcaggcgtcagtgaagaatccaccacctcccacagccgaccaggctcaacgcacacaacagcattccctggcagtaccaccatgccaggcgtcagtcaggaatctacagcttcccacagcagcccaggctccacagacacaacactgtcccctggcagtaccacagcatcatcccttggtccagaatctactaccttccacagcggcccaggctccactgaaacaacactcttacctgacaacaccacagcctcaggcctccttgaagcatctacgcccgtccacagcagcactggatcgccacacacaacactgtcccctgccggctctacaacccgtcagggagaatctaccaccttccagagctggcctaactcgaaggacactacccctgcacctcctactaccacatcagcctttgttgagctatctacaacctcccacggcagcccgagctcaactccaacaacccacttttctgccagctccacaaccttgggccgtagtgaggaatcgacaacagtccacagcagcccagttgcaactgcaacaacaccctcgcctgcccgctccacaacctcaggcctcgttgaagaatctacgacctaccacagcagcccgggctcaactcaaacaatgcacttccctgaaagcgacacaacttcaggccgtggtgaagaatcaacaacttcccacagcagcacaacacacacaatatcttcagctcctagcaccacatctgcccttgttgaagaacctaccagctaccacagcagcccgggctcaactgcaacaacacacttccctgacagctccacaacctcaggccgtagtgaggaatcaacagcatcccacagcagccaagacgcaacgggaacaatagtcctacctgcccgctccacaacctcagttcttcttggagaatctacgacctcacccatcagttcaggctcaatggaaacgacagcgttacccggcagtaccacaacgccaggcctcagtgagaaatctaccactttccacagtagccccagatcaccagccacaacactctcacctgccagcacgacaagctcaggcgtcagtgaagaatccaccacctcccacagccgaccaggctcaacgcacacaacagcattccctgacagcaccaccacgccaggcctcagtcggcattctacaacttcccacagcagcccaggctcaacggatacaacactgttacctgccagcaccaccacctcaggctccagtcaggaatcaacaacttcccacagcagctcaggttcaactgacacagcactgtcccctggcagtaccacagccttatcctttggtcaagaatctacaaccttccacagcagcccaggctccactcacacaacactcttccctgacagcaccacaagctcaggcatcgttgaagcatctacacgcgtccacagcagcactggctcaccacgcacaacactgtcccctgccagctccacaagccctggacttcagggagaatctaccgccttccagacccacccagcctcaactcacacgacgccttcacctcctagcaccgcaacagcccctgttgaagaatctacaacctaccaccgcagcccaggctcgactccaacaacacacttccctgccagctccacaacttcgggccacagtgagaaatcaacaatattccacagcagcccagatgcaagtggaacaacaccctcatctgcccactccacaacctcaggtcgtggagaatctacaacctcacgcatcagtccaggctcaactgaaataacaacgttacctggcagtaccacaacaccaggcctcagtgaggcatctaccaccttctacagcagccccagatcaccaaccacaacactctcacctgccagtatgacaagcctaggcgtcggtgaagaatccaccacctcccgtagccaaccaggttctactcactcaacagtgtcacctgccagcaccaccacgccaggcctcagtgaggaatctaccaccgtctacagcagcagcccaggctcaactgaaaccacagtgttccctcgcagcaccacaacctcagttcgtcgtgaagagcctacaaccttccacagccggccagcctcaactcacacaacactgttcactgaggacagcaccacctcgggcctcactgaagaatctacagccttccccggcagcccagcctccacccaaacagggttacctgccacactcacaaccgcagacctcggtgaggaatcaactacctttcccagcagctcaggctcaactggaacaaaactctcacctgcccgctccaccacctctggcctcgttggagaatccacaccctcacgcctcagtccaagctcaaccgaaacaacaactttacccggcagtcccacaacaccaagcctcagtgagaaatcaaccaccttctacactagccccagatcaccagatgcaacactctcacctgcaaccacaacaagctcaggcgtcagcgaagaatccagcacatcccacagtcaaccaggctcaacgcacacaacagcgttccctgacagcaccaccacctcaggcctcagtcaggaacctacaacttcccacagcagccaaggctcaacagaggcaacactgtcccctggcagtaccacagcctcatcccttggtcaacaatctacaaccttccacagcagcccaggcgacactgaaaccacactcttacctgacgacaccataacctcaggcctcgtggaggcatctacacccacccacagcagcactggctcgctacacacaacactgacccctgccagctccacaagcactggccttcaggaagaatctaccactttccagagctggccaagctcaagtgacacaacaccttcacctcccagcaccacagcagtccctgttgaagtatccacaacctaccacagccgcccgagctcaactccaacaacacacttttctgccagttccacaaccttgggccgtagtgaggaatcaacaacagtccacagcagcccaggtgcaactggaacagcactcttccctacccgctctgcaacctcagttcttgttggagaacctacaacgtcacccatcagttcaggctcaacggaaacaacagcgttacctggcagtaccacaacagcaggcctgagtgagaaatctaccaccttctacagtagccccagatcaccggacacaacactttcacctgccagcacgacaagctcaggcgtcagtgaagaatccaccacctcccacagccgaccaggctcaatgcacacaacagcattccctagcagtaccaccatgccaggcgtcagtcaggaatctacagcttcccacagcagcccaggctccacagacacaacactgtcccctggcagtaccacagcatcatcccttggtccagaatctactaccttccacagcagcccaggctccactgaaacaacactcttacctgacaacaccacagcctcaggcctccttgaagcatctacacccgtccacagcagcactggatcgccacacacaacactgtcccctgccggctctacaacccgtcagggagaatctaccaccttccagagctggccaaactcgaaggacactacccctgcacctcctactaccacatcagcctttgttgagctatctacaacctcccacggcagcccgagctcaactccaacaacccacttttctgccagctccacaacattgggccgtagtgaggaatcgacaacagtccacagcagcccagttgcaactgcaacaacaccctcgcctgcccgctccacaacctcaggcctcgttgaagaatctacgacctaccacagcagcccgggctcaactcaaacaatgcacttccctgaaagcaacacaacttcaggccgtggtgaagaatcaacaacttcccacagcagcacaacacacacaatatcttcagctcctagcaccacatctgcccttgttgaagaacctaccagctaccacagcagcccgggctcaactgcaacaacacacttccctgacagctccacaacctcaggccgtagtgaggaatcaacagcatcccacagcagccaagacgcaacgggaacaatagtcctacctgcccgctccacaacctcagttcttcttggagaatctacgacctcacccatcagttcaggctcaatggaaacgacagcgttacccggcagtaccacaacgccaggcctcagtgagaaatctaccactttccacagtagcccgagctcaactccaacaacccacttttctgccagctccacaaccttgggccgtagtgaggaatcgacaacagtccacagcagcccagttgcaactgcaacaacaccctcgcctgcccgctccacaacctcaggcctcgttgaagaatctacggcgtaccacagcagcccgggctcaactcaaacaatgcacttccctgaaagctccacagcttcaggtcgtagtgaagaatcaagaacttcccacagcagcacaacacacacaatatcttcacctcctagcaccacatctgcccttgttgaagaacctaccagctaccacagcagcccgggctcaattgcaacaacacactttcctgagagctccacaacctccggccgtagtgaggaatcaacagcatcccacagcagcccagatacaaatggaatcacacccttacctgcccattttactacctcaggccgcattgcagaatctaccaccttctatatctctccaggctcaatggaaacaacattagccagcactgccacaacaccaggcctcagtgcaaaatctaccatcctttacagtagctccagatcaccagaccaaacactctcacctgccagcatgacaagctccagcatcagtggagaacccaccagcttgtatagccaagcagagtcaacacacacaacagcgttccctgccagcaccaccacctcaggcctcagtcaggaatcaacaactttccacagtaagccaggctcaactgagacaacactgtcccctggcagcatcacaacttcatcttttgctcaagaatttaccacccctcatagccaaccaggctcagctctgtcaacagtgtcacctgccagcaccacagtgccaggccttagtgaggaatctaccaccttctacagcagcccaggctcaactgaaaccacagcgttttctcacagcaacacaatgtccattcatagtcaacaatctacacccttccctgacagcccaggcttcactcacacagtgttacctgccaccctcacaaccacagacattggtcaggaatcaacagccttccacagcagctcagacgcaactggaacaacacccttacctgcccgctccacagcctcagaccttgttggagaacctacaactttctacatcagcccatcccctacttacacaacactctttcctgcgagttccagcacatcaggcctcactgaggaatctaccaccttccacaccagtccaagcttcacttctacaattgtgtctactgaaagcctggaaaccttagcaccagggttgtgccaggaaggacaaatttggaatggaaaacaatgcgtctgtccccaaggctacgttggttaccagtgcttgtcccctctggaatccttccctgtagaaaccccggaaaaactcaacgccactttaggtatgacagtgaaagtgacttacagaaatttcacagaaaagatgaatgacgcatcctcccaggaataccagaacttcagtaccctcttcaagaatcggatggatgtcgttttgaagggcgacaatcttcctcagtatagaggggtgaacattcggagattgctcaacggtagcatcgtggtcaagaacgatgtcatcctggaggcagactacactttagagtatgaggaactgtttgaaaacctggcagagattgtaaaggccaagattatgaatgaaactagaacaactcttcttgatcctgattcctgcagaaaggccatactgtgctatagtgaagaggacactttcgtggattcatcggtgactccgggctttgacttccaggagcaatgcacccagaaggctgccgaaggatatacccagttctactatgtggatgtcttggatgggaagctggcctgtgtgaacaagtgcaccaaaggaacgaagtcgcaaatgaactgtaacctgggcacatgtcagctgcaacgcagtggcccccgctgcctgtgcccaaatacgaacacacactggtactggggagagacctgtgaattcaacatcgccaagagcctcgtgtatgggatcgtgggggctgtgatggcggtgctgctgctcgcattgatcatcctaatcatcttattcagcctatcccagagaaaacggcacagggaacagtatgatgtgcctcaagagtggcgaaaggaaggcacccctggcatcttccagaagacggccatctgggaagaccagaatctgagggagagcagattcggccttgagaacgcctacaacaacttccggcccaccctggagactgttgactctggcacagagctccacatccagaggccggagatggtagcatccactgtgtgagccaacgggggcctcccaccctcatctagctctgttcaggagagctgcaaacacagagcccaccacaagcctccggggcgggtcaagaggagaccgaagtcaggccctgaagccggtcctgctctgagctgacagacttggccagtcccctgcctgtgctcctgctggggaaggctgggggctgtaagcctctccatccgggagcttccagactcccagaagcctcggcacccctgtctcctcctgggtggctccccactctggaatttccctaccaataaaagcaaatctgaaagctcagaatgagaagtga

SEQ ID NO: 4895 - DNA, 927 bp, Homo sapiens; identical to SEQ ID NO: 232

SEQ ID NO: 4896 - DNA, 914 bp, Homo sapiens
ccctggccacaccctccgcctggacgcagcagccaccgccgcgtccctctctccacgaggctgccggcttaggacccccagctccgacatgtcgccctctggtcgcctgtgtcttctcaccatcgttggcctgattctccccaccagaggacagacgttgaaagataccacgtccagttcttcagcagactcaactatcatggacattcaggtcccgacacgagccccagatgcagtctacacagaactccagcccacctctccaaccccaacctggcctgctgatgaaacaccacaaccccagacccagacccagcaactggaaggaacggatgggcctctagtgacagatccagagacacacaagagcaccaaagcagctcatcccactgatgacaccacgacgctctctgagagaccatccccaagcacagacgtccagacagacccccagaccctcaagccatctggttttcatgaggatgaccccttcttctatgatgaacacaccctccggaaacgggggctgttggtcgcagctgtgctgttcatcacaggcatcatcatcctcaccagtggcaagtgcaggcagctgtcccggttatgccggaatcgttgcaggtgagtccatcagaaacaggagctgacaacctgctgggcacccgaagaccaagccccctgccagctcaccgtgcccagcctcctgcatcccctcgaagagcctggccagagagggaagacacagatgatgaagctggagccagggctgccggtccgagtctcctacctcccccaaccctgcccgcccctgaaggctacctggcgccttgggggctgtccctcaagttatctcctctgctaagacaaaaagtaaagcactgtggtctttgccccaaaaaaaaaaaaaaaaaaaa

SEQ ID NO: 4897 - DNA, 917 bp, Homo sapiens
tgggctacagtgggccgctctgcctcgctcccgcccgcctgcctcagtctccccagctctctgccacccccctcggaccagtgcctcttagatgtcgccctctggtcgcctgtgtcttctcaccatcgttggcctgattctccccaccagaggacagacgttgaaagataccacgtccagttcttcagcagactcaactatcatggacattcaggtcccgacacgagccccagatgcagtctacacagaactccagcccacctctccaaccccaacctggcctgctgatgaaacaccacaaccccagacccagacccagcaactggaaggaacggatgggcctctagtgacagatccagagacacacaagagcaccaaagcagctcatcccactgatgacaccacgacgctctctgagagaccatccccaagcacagacgtccagacagacccccagaccctcaagccatctggttttcatgaggatgaccccttcttctatgatgaacacaccctccggaaacgggggctgttggtcgcagctgtgctgttcatcacaggcatcatcatcctcaccagtggcaagtgcaggcagctgtcccggttatgccggaatcgttgcaggtgagtccatcagaaacaggagctgacaacctgctgggcacccgaagaccaagccccctgccagctcaccgtgcccagcctcctgcatcccctcgaagagcctggccagagagggaagacacagatgatgaagctggagccagggctgccggtccgagtctcctacctcccccaaccctgcccgcccctgaaggctacctggcgccttgggggctgtccctcaagttatctcctctgctaagacaaaaagtaaagcactgtggtctttgccccaaaaaaaaaaaaaaaaaaaa

SEQ ID NO: 4898 - DNA, 1608 bp, Homo sapiens
tctctccacgaggctgccggcttaggacccccagctccgacgtaagtccctctcgtgcgccacctccatccgctgcccctctgcccacgggccgggctcaggtgggtaggggtttgaccccttccgctcctctccgccccccatccacgcccacatctctctgcctcctctcctgggctacagtgggccgctctgcctcgctcccgcccgcctgcctcagtctccccagctctctgccacccccctcggaccagtgcctcttaggtctctccagcgcgccatccctgcaaggcggcccctgacaccaactcactttttcctctgagcgcgggaggcgttactcactcttcctccttcccctcctcgccgactcccgggctctgggcccctgggggagggaagaggcctcctatctactcctctgccccagtcccctccttgcgtcagtcccagtgagggataagcgcctggcggaaggcgcagggaggtgtttctctgcttcaggagtgcccgccggcccttgcagctgctggaagacccatttatctcatgcttcttgttttctttggggacctgcaggggaaggaagcagggtgacggtttggtatccccacctaagaccctcccctttcccctgaggccagccgtcagcccctggcagggggtcttggaagccagaggtttttgctcagggcagggaaagggctgcaggatccccgggggctgccggaggtcggtctcactgacatcatggctgaccccagcatcgcctggtcccacagatgtcgccctctggtcgcctgtgtcttctcaccatcgttggcctgattctccccaccagaggacagacgttgaaagataccacgtccagttcttcagcagactcaactatcatggacattcaggtcccgacacgagccccagatgcagtctacacagaactccagcccacctctccaaccccaacctggcctgctgatgaaacaccacaaccccagacccagacccagcaactggaaggaacggatgggcctctagtgacagatccagagacacacaagagcaccaaagcagctcatcccactgatgacaccacgacgctctctgagagaccatccccaagcacagacgtccagacagacccccagaccctcaagccatctggttttcatgaggatgaccccttcttctatgatgaacacaccctccggaaacgggggctgttggtcgcagctgtgctgttcatcacaggcatcatcatcctcaccagtggcaagtgcaggcagctgtcccggttatgccggaatcgttgcaggtgagtccatcagaaacaggagctgacaacctgctgggcacccgaagaccaagccccctgccagctcaccgtgcccagcctcctgcatcccctcgaagagcctggccagagagggaagacacagatgatgaagctggagccagggctgccggtccgagtctcctacctcccccaaccctgcccgcccctgaaggctacctggcgccttgggggctgtccctcaagttatctcctctgctaagacaaaaagtaaagcactgtggtctttgccccaaaaaaaaaaaaaaaaaaaa

SEQ ID NO: 4899 - DNA, 2329 bp, Homo sapiens; identical to SEQ ID NO: 2324

SEQ ID NO: 4900 - DNA, 2398 bp, Homo sapiens
agccccgccctgccccgcgccgccaagcggttcccgccctcgcccagcgcccaggtagctgcgaggaaacttttgcagcggctgggtagcagcacgtctcttgctcctcagggccactgccaggcttgccgagtcctgggactgctctcgctccggctgccactctcccgcgctctcctagctccctgcgaagcaggatggccgggaccgtgcgcaccgcgtgcttggtggtggcgatgctgctcagcttggacttcccgggacaggcgcagcccccgccgccgccgccggacgccacctgtcaccaagtccgctccttcttccagagactgcagcccggactcaagtgggtgccagaaactcccgtgccaggatcagatttgcaagtatgtctccctaagggcccaacatgctgctcaagaaagatggaagaaaaataccaactaacagcacgattgaacatggaacagctgcttcagtctgcaagtatggagctcaagttcttaattattcagaatgctgcggttttccaagaggcctttgaaattgttgttcgccatgccaagaactacaccaatgccatgttcaagaacaactacccaagcctgactccacaagcttttgagtttgtgggtgaatttttcacagatgtgtctctctacatcttgggttctgacatcaatgtagatgacatggtcaatgaattgtttgacagcctgtttccagtcatctatacccagctaatgaacccaggcctgcctgattcagccttggacatcaatgagtgcctccgaggagcaagacgtgacctgaaagtatttgggaatttccccaagcttattatgacccaggtttccaagtcactgcaagtcactaggatcttccttcaggctctgaatcttggaattgaagtgatcaacacaactgatcacctgaagttcagtaaggactgtggccgaatgctcaccagaatgtggtactgctcttactgccagggactgatgatggttaaaccctgtggcggttactgcaatgtggtcatgcaaggctgtatggcaggtgtggtggagattgacaagtactggagagaatacattctgtcccttgaagaacttgtgaatggcatgtacagaatctatgacatggagaacgtactgcttggtctcttttcaacaatccatgattctatccagtatgtccagaagaatgcaggaaagctgaccaccactgaaactgagaagaaaatatggcacttcaaatatcctatcttcttcctgtgtatagggctagacttacagattggcaagttatgtgcccattctcaacaacgccaatatagatctgcttattatcctgaagatctctttattgacaagaaagtattaaaagttgctcatgtagaacatgaagaaaccttatccagccgaagaagggaactaattcagaagttgaagtctttcatcagcttctatagtgctttgcctggctacatctgcagccatagccctgtggcggaaaacgacaccctttgctggaatggacaagaactcgtggagagatacagccaaaaggcagcaaggaatggaatgaaaaaccagttcaatctccatgagctgaaaatgaagggccctgagccagtggtcagtcaaattattgacaaactgaagcacattaaccagctcctgagaaccatgtctatgcccaaaggtagagttctggataaaaacctggatgaggaagggtttgaaagtggagactgcggtgatgatgaagatgagtgcattggaggctctggtgatggaatgataaaagtgaagaatcagctccgcttccttgcagaactggcctatgatctggatgtggatgatgcgcctggaaacagtcagcaggcaactccgaaggacaacgagataagcacctttcacaacctcgggaacgttcattccccgctgaagcttctcaccagcatggccatctcggtggtgtgcttcttcttcctggtgcactgactgcctggtgcccagcacatgtgctgccctacagcaccctgtggtcttcctcgataaagggaaccactttcttatttttttctatttttttttttttgttatcctgtatacctcctccagccatgaagtagaggactaaccatgtgttatgttttcgaaaatcaaatggtatcttttggaggaagatacattttagtggtagcatatagattgtccttttgcaaagaaagaaaaaaaaccatcaagttgtgccaaattattctcctatgtttggctgctagaacatggttaccatgtctttctctctcactccctccctttctatcgttctctctttgcatggatttctttgaaaaaaaataaattgctcaaataaaaaaaaaaaaaaa

SEQ ID NO: 4901 - DNA, 2281 bp, Homo sapiens
agccccgccctgccccgcgccgccaagcggttcccgccctcgcccagcgcccaggtagctgcgaggaaacttttgcagcggctgggtagcagcacgtctcttgctcctcagggccactgccaggcttgccgagtcctgggactgctctcgctccggctgccactctcccgcgctctcctagctccctgcgaagcaggatggccgggaccgtgcgcaccgcgtgcttggtggtggcgatgctgctcagcttggacttcccgggacaggcgcagcccccgccgccgccgccggacgccacctgtcaccaagtccgctccttcttccagagactgcagcccggactcaagtgggtgccagaaactcccgtgccaggatcagatttgcaagtatgtctccctaagggcccaacatgctgctcaagaaagatggaagaaaaataccaactaacagcacgattgaacatggaacagctgcttcagtctgcaaaggcctttgaaattgttgttcgccatgccaagaactacaccaatgccatgttcaagaacaactacccaagcctgactccacaagcttttgagtttgtgggtgaatttttcacagatgtgtctctctacatcttgggttctgacatcaatgtagatgacatggtcaatgaattgtttgacagcctgtttccagtcatctatacccagctaatgaacccaggcctgcctgattcagccttggacatcaatgagtgcctccgaggagcaagacgtgacctgaaagtatttgggaatttccccaagcttattatgacccaggtttccaagtcactgcaagtcactaggatcttccttcaggctctgaatcttggaattgaagtgatcaacacaactgatcacctgaagttcagtaaggactgtggccgaatgctcaccagaatgtggtactgctcttactgccagggactgatgatggttaaaccctgtggcggttactgcaatgtggtcatgcaaggctgtatggcaggtgtggtggagattgacaagtactggagagaatacattctgtcccttgaagaacttgtgaatggcatgtacagaatctatgacatggagaacgtactgcttggtctcttttcaacaatccatgattctatccagtatgtccagaagaatgcaggaaagctgaccaccactattggcaagttatgtgcccattctcaacaacgccaatatagatctgcttattatcctgaagatctctttattgacaagaaagtattaaaagttgctcatgtagaacatgaagaaaccttatccagccgaagaagggaactaattcagaagttgaagtctttcatcagcttctatagtgctttgcctggctacatctgcagccatagccctgtggcggaaaacgacaccctttgctggaatggacaagaactcgtggagagatacagccaaaaggcagcaaggaatggaatgaaaaaccagttcaatctccatgagctgaaaatgaagggccctgagccagtggtcagtcaaattattgacaaactgaagcacattaaccagctcctgagaaccatgtctatgcccaaaggtagagttctggataaaaacctggatgaggaagggtttgaaagtggagactgcggtgatgatgaagatgagtgcattggaggctctggtgatggaatgataaaagtgaagaatcagctccgcttccttgcagaactggcctatgatctggatgtggatgatgcgcctggaaacagtcagcaggcaactccgaaggacaacgagataagcacctttcacaacctcgggaacgttcattccccgctgaagcttctcaccagcatggccatctcggtggtgtgcttcttcttcctggtgcactgactgcctggtgcccagcacatgtgctgccctacagcaccctgtggtcttcctcgataaagggaaccactttcttatttttttctatttttttttttttgttatcctgtatacctcctccagccatgaagtagaggactaaccatgtgttatgttttcgaaaatcaaatggtatcttttggaggaagatacattttagtggtagcatatagattgtccttttgcaaagaaagaaaaaaaaccatcaagttgtgccaaattattctcctatgtttggctgctagaacatggttaccatgtctttctctctcactccctccctttctatcgttctctctttgcatggatttctttgaaaaaaaataaattgctcaaataaaaaaaaaaaaaaa

SEQ ID NO: 4902 - DNA, 2167 bp, Homo sapiens
agccccgccctgccccgcgccgccaagcggttcccgccctcgcccagcgcccaggtagctgcgaggaaacttttgcagcggctgggtagcagcacgtctcttgctcctcagggccactgccaggcttgccgagtcctgggactgctctcgctccggctgccactctcccgcgctctcctagctccctgcgaagcaggatggccgggaccgtgcgcaccgcgtgcttggtggtggcgatgctgctcagcttggacttcccgggacaggcgcagcccccgccgccgccgccggacgccacctgtcaccaagtccgctccttcttccagagactgcagcccggactcaagtgggtgccagaaactcccgtgccagaggcctttgaaattgttgttcgccatgccaagaactacaccaatgccatgttcaagaacaactacccaagcctgactccacaagcttttgagtttgtgggtgaatttttcacagatgtgtctctctacatcttgggttctgacatcaatgtagatgacatggtcaatgaattgtttgacagcctgtttccagtcatctatacccagctaatgaacccaggcctgcctgattcagccttggacatcaatgagtgcctccgaggagcaagacgtgacctgaaagtatttgggaatttccccaagcttattatgacccaggtttccaagtcactgcaagtcactaggatcttccttcaggctctgaatcttggaattgaagtgatcaacacaactgatcacctgaagttcagtaaggactgtggccgaatgctcaccagaatgtggtactgctcttactgccagggactgatgatggttaaaccctgtggcggttactgcaatgtggtcatgcaaggctgtatggcaggtgtggtggagattgacaagtactggagagaatacattctgtcccttgaagaacttgtgaatggcatgtacagaatctatgacatggagaacgtactgcttggtctcttttcaacaatccatgattctatccagtatgtccagaagaatgcaggaaagctgaccaccactattggcaagttatgtgcccattctcaacaacgccaatatagatctgcttattatcctgaagatctctttattgacaagaaagtattaaaagttgctcatgtagaacatgaagaaaccttatccagccgaagaagggaactaattcagaagttgaagtctttcatcagcttctatagtgctttgcctggctacatctgcagccatagccctgtggcggaaaacgacaccctttgctggaatggacaagaactcgtggagagatacagccaaaaggcagcaaggaatggaatgaaaaaccagttcaatctccatgagctgaaaatgaagggccctgagccagtggtcagtcaaattattgacaaactgaagcacattaaccagctcctgagaaccatgtctatgcccaaaggtagagttctggataaaaacctggatgaggaagggtttgaaagtggagactgcggtgatgatgaagatgagtgcattggaggctctggtgatggaatgataaaagtgaagaatcagctccgcttccttgcagaactggcctatgatctggatgtggatgatgcgcctggaaacagtcagcaggcaactccgaaggacaacgagataagcacctttcacaacctcgggaacgttcattccccgctgaagcttctcaccagcatggccatctcggtggtgtgcttcttcttcctggtgcactgactgcctggtgcccagcacatgtgctgccctacagcaccctgtggtcttcctcgataaagggaaccactttcttatttttttctatttttttttttttgttatcctgtatacctcctccagccatgaagtagaggactaaccatgtgttatgttttcgaaaatcaaatggtatcttttggaggaagatacattttagtggtagcatatagattgtccttttgcaaagaaagaaaaaaaaccatcaagttgtgccaaattattctcctatgtttggctgctagaacatggttaccatgtctttctctctcactccctccctttctatcgttctctctttgcatggatttctttgaaaaaaaataaattgctcaaataaaaaaaaaaaaaaa

SEQ ID NO: 4903 - DNA, 1859 bp, Homo sapiens
gtatctgaagaaagatttggccaggggcagctgtgctggcttatgctcttctccttctgctgctgccatcctccagcaagatgctagggtctttggggctttgggcattacttcccacagctgtggaagcacccccaaacaggcgaacctgtgtgttctttgaggcccctggagtgcggggaagcacaaagacactgggagagctgctagatacaggcacagagctccccagagctatccgctgcctctacagccgctgctgctttgggatctggaacctgacccaagaccgggcacaggtggaaatgcaaggatgccgagacagtgatgagccaggctgtgagtccctccactgtgacccaagtccccgagcccaccccagccctggctccactctcttcacctgctcctgtggcactgacttctgcaatgccaattacagccatctgcctcctccagggagccctgggactcctggctcccagggtccccaggctgccccaggtgagtccatctggatggcactggtgctgctggggctgttcctcctcctcctgctgctgctgggcagcatcatcttggccctgctacagcgaaagaactacagagtgcgaggtgagccagtgccagagccaaggccagactcaggcagggactggagtgtggagctgcaggagctgcctgagctgtgtttctcccaggtaatccgggaaggaggtcatgcagtggtttgggccgggcagctgcaaggaaaactggttgccatcaaggccttcccaccgaggtctgtggctcagttccaagctgagagagcattgtacgaacttccaggcctacagcacgaccacattgtccgatttatcactgccagccgggggggtcctggccgcctgctctctgggcccctgctggtactggaactgcatcccaagggctccctgtgccactacttgacccagtacaccagtgactggggaagttccctgcggatggcactgtccctggcccagggcctggcatttctccatgaggagcgctggcagaatggccaatataaaccaggtattgcccaccgagatctgagcagccagaatgtgctcattcgggaagatggatcgtgtgccattggagacctgggccttgccttggtgctccctggcctcactcagccccctgcctggacccctactcaaccacaaggcccagctgccatcatggaagctggcacccagaggtacatggcaccagagctcttggacaagactctggacctacaggattggggcatggccctccgacgagctgatatttactctttggctctgctcctgtgggagatactgagccgctgcccagatttgaggcctgcagtccaccacccttccaactggcctatgaggcagaactgggcaatacccctacctctgatgagctatgggccttggcagtgcaggagaggaggcgtccctacatcccatccacctggcgctgctttgccacagaccctgatgggctgagggagctcctagaagactgttgggatgcagacccagaagcacggctgacagctgagtgtgtacagcagcgcctggctgccttggcccatcctcaagagagccacccctttccagagagctgtccacgtggctgcccacctctctgcccagaagactgtacttcaattcctgcccctaccatcctcccctgtaggcctcagcggagtgcctgccacttcagcgttcagcaaggcccttgttccaggaatcctcagcctgcctgtaccctttctcctgtgtaaatatgcagtttatgtgtcatcaatgtacatgccaacataaatatggcgattgtatagctgt

SEQ ID NO: 4904 - DNA, 1863 bp, Homo sapiens; identical to SEQ ID NO: 165

SEQ ID NO: 4905 - DNA, 1578 bp, Homo sapiens
gtatctgaagaaagatttggccaggggcagctgtgctggcttatgctcttctccttctgctgctgccatcctccagcaagatgctagggtctttggggctttgggcattacttcccacagctgtggaagcacccccaaacaggcgaacctgtgtgttctttgaggcccctggagtgcggggaagcacaaagacactgggagagctgctagatacaggcacagagctccccagagctatccgctgcctctacagccgctgctgctttgggatctggaacctgacccaagaccgggcacaggtggaaatgcaaggatgccgagacagtgatgagccaggctgtgagtccctccactgtgacccaagtccccgagcccaccccagccctggctccactctcttcacctgctcctgtggcactgacttctgcaatgccaattacagccatctgcctcctccagggagccctgggactcctggctcccagggtccccaggctgccccaggtgagtccatctggatggcactggtgctgctggggctgttcctcctcctcctgctgctgctgggcagcatcatcttggccctgctacagcgaaagaactacagagtgcgaggtgagccagtgccagagccaaggccagactcaggcagggactggagtgtggagctgcaggagctgcctgagctgtgtttctcccaggtaatccgggaaggaggtcatgcagtggtttgggccgggcagctgcaaggaaaactggttgccatcaaggccttcccaccgaggtctgtggctcagttccaagctgagagagcattgtacgaacttccaggcctacagcacgaccacattgtccgatttatcactgccagccgggggggtcctggccgcctgctctctgggcccctgctggtactggaactgcatcccaagggctccctgtgccactacttgacccagtacaccagtgactggggaagttccctgcggatggcactgtccctggcccagggcctggcatttctccatgaggagcgctggcagaatggccaatataaaccaggtattgcccaccgagatctgagcagccagaatgtgctcattcgggaagatggatcgtgtgccattggagacctgggccttgccttggtgctccctggcctcactcagccccctgcctggacccctactcaaccacaaggcccagctgccatcatggaagaccctgatgggctgagggagctcctagaagactgttgggatgcagacccagaagcacggctgacagctgagtgtgtacagcagcgcctggctgccttggcccatcctcaagagagccacccctttccagagagctgtccacgtggctgcccacctctctgcccagaagactgtacttcaattcctgcccctaccatcctcccctgtaggcctcagcggagtgcctgccacttcagcgttcagcaaggcccttgttccaggaatcctcagcctgcctgtaccctttctcctgtgtaaatatgcagtttatgtgtcatcaatgtacatgccaacataaatatggcgattgtatagctgt

SEQ ID NO: 4906 - DNA, 3369 bp, Homo sapiens; identical to SEQ ID NO: 1440

SEQ ID NO: 4907 - DNA, 1485 bp, Homo sapiens
atggatgagttccacccgttcatcgaggcactgctgcctcacgtccgcgctttctcctacacctggttcaacctgcaggcgcggaagcgcaagtacttcaagaagcatgaaaagcggatgtcgaaggacgaggagcgggcggtgaaggacgagctgctgggcgagaagcccgagatcaagcagaagtgggcatcccggctgctggccaagctgcgcaaggacatccggcccgagttccgcgaggacttcgtgctgaccatcacgggcaagaagcccccctgctgcgtgctctccaaccccgaccagaagggcaagatccggcggattgactgcctgcgccaggctgacaaggtgtggcggctggacctggtcatggtgattttgtttaaggggatccccctggaaagtactgatggggagcggctctacaagtcgcctcagtgctcgaaccccggcctgtgcgtccagccacatcacattggagtcacaatcaaagaactggatctttatctggcttactttgtccacactccggaatccggacaatcagatagttcaaaccagcaaggagatgcggacatcaaaccactgcccaacgggcacttaagtttccaggactgttttgtgacttccggggtctggaatgtgacggagctggtgagagtatcacagactcctgttgcaacagcatcagggcccaacttctccctggcggacctggagagtcccagctactacaacatcaaccaggtgaccctggggcggcggtccatcacctcccctccttccaccagcaccaccaagcgccccaagtccatcgatgacagtgagatggagagccctgttgatgacgtgttctatcccgggacaggccgttccccagcagctggcagcagccagtccagcgggtggcccaacgatgtggatgcaggcccggcttctctaaagaagtcaggaaagctggacttctgcagtgccctctcctctcagggcagctccccgcgcatggctttcacccaccacccgctgcctgtgcttgctggagtcagaccagggagcccccgggccacagcatcagccctgcacttcccctccacgtccatcatccagcagtcgagcccgtatttcacgcacccgaccatccgctaccaccaccaccacgggcaggactcactgaaggagtttgtgcagtttgtgtgctcggatggctcgggccaggccaccggacagcccaacggtagcggccagggcaaagtcccggggtcatttttgctaccgccgccgcctccagtggccagacctgtgccccttcctatgcctgattccaaatccaccagcactgccccagacggcgccgccttgactcctccatcaccttcattcgcaacgacaggcgcctcctctgccaaccggtttgtcagcatcggaccccgggacggcaactttctgaacatcccacagcagtctcagtcctggttcctctga

SEQ ID NO: 4908 - DNA, 3366 bp, Homo sapiens
gttccattcccgggggattggagtagcgttggagtcaccgacgccatcccctcccgcctctggcgtgcatggagcatgcgcttccttcctcacttcctctgcaggagggagcgagagtaaagctacgccctggcgcgcagtctccgcgtcacaggaacttcagcacccacagggcggacagcgctcccctctacctggagacttgactcccgcgcgccccaaccctgcttatcccttgaccgtcgagtgtcagagatcctgcagccgcccagtcccggcccctctcccgccccacacccaccctcctggctcttcctgtttttactcctccttttcattcataacaaaagctacagctccaggagcccagcgccgggctgtgacccaagccgagcgtggaagaatggggttcctcgggaccggcacttggattctggtgttagtgctcccgattcaagctttccccaaacctggaggaagccaagacaaatctctacataatagagaattaagtgcagaaagacctttgaatgaacagattgctgaagcagaagaagacaagattaaaaaaacatatcctccagaaaacaagccaggtcagagcaactattcttttgttgataacttgaacctgctaaaggcaataacagaaaaggaaaaaattgagaaagaaagacaatctataagaagctccccacttgataataagttgaatgtggaagatgttgattcaaccaagaatcgaaaactgatcgatgattatgactctactaagagtggattggatcataaatttcaagatgatccagatggtcttcatcaactagacgggactcctttaaccgctgaagacattgtccataaaatcgctgccaggatttatgaagaaaatgacagagccgtgtttgacaagattgtttctaaactacttaatctcggccttatcacagaaagccaagcacatacactggaagatgaagtagcagaggttttacaaaaattaatctcaaaggaagccaacaattatgaggaggatcccaataagcccacaagctggactgagaatcaggctggaaaaataccagagaaagtgactccaatggcagcaattcaagatggtcttgctaagggagaaaacgatgaaacagtatctaacacattaaccttgacaaatggcttggaaaggagaactaaaacctacagtgaagacaactttgaggaactccaatatttcccaaatttctatgcgctactgaaaagtattgattcagaaaaagaagcaaaagagaaagaaacactgattactatcatgaaaacactgattgactttgtgaagatgatggtgaaatatggaacaatatctccagaagaaggtgtttcctaccttgaaaacttggatgaaatgattgctcttcagaccaaaaacaagctagaaaaaaatgctactgacaatataagcaagcttttcccagcaccatcagagaagagtcatgaagaaacagacagtaccaaggaagaagcagctaagatggaaaaggaatatggaagcttgaaggattccacaaaagatgataactccaacccaggaggaaagacagatgaacccaaaggaaaaacagaagcctatttggaagccatcagaaaaaatattgaatggttgaagaaacatgacaaaaagggaaataaagaagattatgacctttcaaagatgagagacttcatcaataaacaagctgatgcttatgtggagaaaggcatccttgacaaggaagaagccgaggccatcaagcgcatttatagcagcctgtaaaaatggcaaaagatccaggagtctttcaactgtttcagaaaacataatatagcttaaaacacttctaattctgtgattaaaattttttgacccaagggttattagaaagtgctgaatttacagtagttaaccttttacaagtggttaaaacatagctttcttcccgtaaaaactatctgaaagtaaagttgtatgtaagctgagattttgtatacagaatccttatttcctcatagacttatattttataatcagaatatgttgctttgaaaaagcctctaatggactgaccttaaaactcatccttcttccactgtctcatccacataagcactccccgaagaattaagggggttctgttttcaaggcatgccaagtactaaagcaccttgcagagcgtgtctattacaagatgtcatttccaccagcagttcccttaggggagctgaaataaattcacattttctcaaagtctcatagctttggaggagccatctgcttttttggctgctctttttagctggctttttattaggctcagtgacataaaaaggatccaggtaaatgggtataggatttgctggatttactaacaatttccccctgttcttaacacttcctattagtgacttttcagacattgagtttacttataaagagagatatttatgtactctctaagaagacaaatgaggtcataaacactgcataaagcaaggcaaaaatgtatgccacatctcagttatctaaactagattagatccaagccaagttttctcaacagagagcaaagggccaggcagtaaggtagaaatagagataaaaatcattccttccttgtgatccaaagctggtcgagcagctttcctggaggaaaaggttaatgaacttcaggtccctgcaactcagcccccaccacaaacacagccctggaaacatacagtggcgcaaggtcctcttgaaatgttaatggttaatgttcccaaaccagagaatgctttgaaaatgtatcattcagtgtaaattaattacatacatatttttctatatatttgtttcaaactgtaaaaataacataatatgtaatttgtgtattagtgagaggtgaagccagctggacttcctgggtcgagtggggccttggagaacttttctgtcttacaagaggattgtaaaatgcacccatcagtgctctgtaaaacacaccaatcagcgctctgtagctagcaataggtttgtaaaatgcacccatcagcactctgtaaaacgcaccaatcagcactctgtaaaatgcaccaatcagcaggattctaaaagtagacaatcacagggaggattgaaaaaaagggcactctgatagggcaaaaacggaacatgggaggggacaaataagggaataaaatctggccaccccagccagcagcagcaacctgttcaggtcgcctgccgctgtggaagctttgtccttttgctcttcataataaaccttgctactgttcaaaaaaaaaaaaaaaaaaaaaaaaaaaaaaaaaaaaaaaaaaaaaaaaaaaaaaaaa

SEQ ID NO: 4909 - DNA, 3313 bp, Homo sapiens; identical to SEQ ID NO: 693

SEQ ID NO: 4910 - DNA, 3198 bp, Homo sapiens; identical to SEQ ID NO: 794

SEQ ID NO: 4911 - DNA, 3153 bp, Homo sapiens
aggagcacagctgtgtttggctgcagggccaagagcgctgtcaagaagacccacacgcccccctccagcagctgaattcctgcagctcagcagccgccgccagagcaggacgaaccgccaatcgcaaggcacctctgagaacttcaggatgcagatgtctccagccctcacctgcctagtcctgggcctggcccttgtctttggtgaagggtctgctgtgcaccatcccccatcctacgtggcgcaggcctccaaggaccgcaacgtggttttctcaccctatggggtggcctcggtgttggccatgctccagctgacaacaggaggagaaacccagcagcagattcaagcagctatgggattcaagattgatgacaagggcatggcccccgccctccggcatctgtacaaggagctcatggggccatggaacaaggatgagatcagcaccacagacgcgatcttcgtccagcgggatctgaagctggtccagggcttcatgccccacttcttcaggctgttccggagcacggtcaagcaagtggacttttcagaggtggagagagccagattcatcatcaatgactgggtgaagacacacacaaaaggtatgatcagcaacttgcttgggaaaggagccgtggaccagctgacacggctggtgctggtgaatgccctctacttcaacggccagtggaagactcccttccccgactccagcacccaccgccgcctcttccacaaatcagacggcagcactgtctctgtgcccatgatggctcagaccaacaagttcaactatactgagttcaccacgcccgatggccattactacgacatcctggaactgccctaccacggggacaccctcagcatgttcattgctgccccttatgaaaaagaggtgcctctctctgccctcaccaacattctgagtgcccagctcatcagccactggaaaggcaacatgaccaggctgccccgcctcctggttctgcccaagttctccctggagactgaagtcgacctcaggaagcccctagagaacctgggaatgaccgacatgttcagacagtttcaggctgacttcacgagtctttcagaccaagagcctctccacgtcgcgcaggcgctgcagaaagtgaagatcgaggtgaacgagagtggcacggtggcctcctcatccacagctgtcatagtctcagcccgcatggcccccgaggagatcatcatggacagacccttcctctttgtggtccggcacaaccccacaggaacagtccttttcatgggccaagtgatggaaccctgaccctggggaaagacgccttcatctgggacaaaactggagatgcatcgggaaagaagaaactccgaagaaaagaattttagtgttaatgactctttctgaaggaagagaagacatttgccttttgttaaaagatggtaaaccagatctgtctccaagaccttggcctctccttggaggacctttaggtcaaactccctagtctccacctgagaccctgggagagaagtttgaagcacaactcccttaaggtctccaaaccagacggtgacgcctgcgggaccatctggggcacctgcttccacccgtctctctgcccactcgggtctgcagacctggttcccactgaggccctttgcaggatggaactacggggcttacaggagcttttgtgtgcctggtagaaactatttctgttccagtcacattgccatcactcttgtactgcctgccaccgcggaggaggctggtgacaggccaaaggccagtggaagaaacaccctttcatctcagagtccactgtggcactggccacccctccccagtacaggggtgctgcaggtggcagagtgaatgtcccccatcatgtggcccaactctcctggcctggccatctccctccccagaaacagtgtgcatgggttattttggagtgtaggtgacttgtttactcattgaagcagatttctgcttccttttatttttataggaatagaggaagaaatgtcagatgcgtgcccagctcttcaccccccaatctcttggtggggaggggtgtacctaaatatttatcatatccttgcccttgagtgcttgttagagagaaagagaactactaaggaaaataatattatttaaactcgctcctagtgtttctttgtggtctgtgtcaccgtatctcaggaagtccagccacttgactggcacacacccctccggacatccagcgtgacggagcccacactgccaccttgtggccgcctgagaccctcgcgccccccgcgcccctctttttccccttgatggaaattgaccatacaatttcatcctccttcaggggatcaaaaggacggagtggggggacagagactcagatgaggacagagtggtttccaatgtgttcaatagatttaggagcagaaatgcaaggggctgcatgacctaccaggacagaactttccccaattacagggtgactcacagccgcattggtgactcacttcaatgtgtcatttccggctgctgtgtgtgagcagtggacacgtgaggggggggtgggtgagagagacaggcagctcggattcaactaccttagataatatttctgaaaacctaccagccagagggtagggcacaaagatggatgtaatgcactttgggaggccaaggcgggaggattgcttgagcccaggagttcaagaccagcctgggcaacataccaagacccccgtctctttaaaaatatatatattttaaatatacttaaatatatatttctaatatctttaaatatatatatatattttaaagaccaatttatgggagaattgcacacagatgtgaaatgaatgtaatctaatagaagcctaatcagcccaccatgttctccactgaaaaatcctctttctttggggtttttctttctttcttttttgattttgcactggacggtgacgtcagccatgtacaggatccacaggggtggtgtcaaatgctattgaaattgtgttgaattgtatgctttttcacttttgataaataaacatgtaaaaatgtttcaaaaaaataataaaataaataaatacgaagaatatgtcaggacagtcaaaaaaaaaaaaaaaaaa

SEQ ID NO: 4912 - DNA, 3577 bp, Homo sapiens; identical to SEQ ID NO: 1625

SEQ ID NO: 4913 - DNA, 3696 bp, Homo sapiens
agcttcacagctgggagagcgcaggaaggcgccgggaaggaaagccagcccaccagcgtctgggtgggctgcgccgcgcggctggcggaccttcccgggttggagaagtgcgcacgtccgcacctcaccctgcggctgacatctcctgcccaggagatgggcgctgaagcttgagcgcctgagtccctggagccacacctgcgaacaccctttgcttctattgagctgtgcccagccgcccagtgacagaattccagaataaatgattcccactgatccacccacttttgccaccccaggatgcaattttctggagagaagattagtggacaaagagatcttcaaaaatcaaaaatgaggttcacatttacaagccggtgcttggcactgtttcttcttctaaatcacccaaccccaattcttcctgccttttcaaatcaaacctatccaacaatagagcccaagccatttctttacgtcgtaggacgaaagaagatgatggatgcacagtacaaatgctatgaccgaatgcagcagttacccgcataccaaggagaaggtccatattgcaatcgcacctgggatggatggctgtgctgggatgacacaccggctggagtattgtcctatcagttctgcccagattattttccggattttgatccatcagaaaaggttacaaaatactgtgatgaaaaaggtgtttggtttaaacatcctgaaaacaatcgaacctggtccaactatactatgtgcaatgctttcactcctgagaaactgaagaatgcatatgttctgtactatttggctattgtgggtcattctttgtcaattttcaccctagtgatttccctggggattttcgtgtttttcagaaaattgacaactatttttcctttgaattggaaatataggaaggcattgagccttggctgccaaagggtaaccctgcacaagaacatgtttcttacttacattctgaattctatgattatcatcatccacctggttgaagtagtacccaatggagagctcgtgcgaagggacccggtgagctgcaagattttgcattttttccaccagtacatgatggcctgcaactatttctggatgctctgtgaagggatctatcttcatacactcattgtcgtggctgtgtttactgagaagcaacgcttgcggtggtattatctcttgggctgggggttcccgctggtgccaaccactatccatgctattaccagggccgtgtacttcaatgacaactgctggctgagtgtggaaacccatttgctttacataatccatggacctgtcatggcggcacttgtggtcaatttcttctttttgctcaacattgtccgggtgcttgtgaccaaaatgagggaaacccatgaggcggaatcccacatgtacctgaaggctgtgaaggccaccatgatccttgtgcccctgctgggaatccagtttgtcgtctttccctggagaccttccaacaagatgcttgggaagatatatgattacgtgatgcactctctgattcatttccagggcttctttgttgcgaccatctactgcttctgcaacaatgaggtccaaaccaccgtgaagcgccaatgggcccaattcaaaattcagtggaaccagcgttgggggaggcgcccctccaaccgctctgctcgcgctgcagccgctgctgcggaggctggcgacatcccaatttacatctgccatcaggagctgaggaatgaaccagccaacaaccaaggcgaggagagtgctgagatcatccctttgaatatcatagagcaagagtcatctgcttgaatgtgaagcaaacacagcatcgtgatcactgagccatcatttcctgggagaaagaccatgcatttaaagtattctccatcctcccaggaaccgaacatatcatttgtgaagaattattcagtgaatttgtccattgtaaatctgaagaaagttattcttggtactgttgctttgggagacagtctaggaatggagtctcccactgcaacttgtgaactccatcattcatccaggactgagatgcaaatgtcacagtaatgcaagcaaagtatcaaagaaaaacaatgaaattgacctagttcagatacagggtgctccttgtcaatactgagccatttatacctttgaaatattaaaatcactgtcaatatttttatttttaactctggattttgaattagattatttctgtatttggctatggatctgatttttaatttttttaaatttcagtcaattctgatgttactgagatgttttaccatccttacaatgtaaaccacatgaactacgtgacctctgcaagacaaagcggctttctaatagagagattagtaaatatgtgaagaaaaagacctgcatttggcaggaagatgtatgctttgaatgcaaaagaaatttagagtcaatttgctgaaaacattacatgctcagcttggttttggacaagcctgtccattgggcaggacctagctgttgtaaagaattggtcttaatgttgaatgtattttggttgctgatgtttataaactgagaggtcacaaagaatctatcactaaaaatttttacaaaactgccaaaaatataattcttagtggaagacaatactccctttaaagagagtttgccactcccctaaactccaggatttataaagcaaattactccaaggtttataaagcagattacctcttgcccttgggtgctatctagcagtaaaagataaatttgttgaatattggtaattaaaagactccacataagtccattaactgctttccacccagcttcaaagcttaaaaagagctcaggcttttccaggaagatccaggagggctaattagaaatcaacttgtggttgaccgcttgtttcttgttattaccaaaacaggaggggaaaaaattaactgctccaaatttaaccataaatcaattcatgtttaacgtttctcattaaaatccagtattatattatcatatctctctttacttcccagtataagatttttgaaaatcctgaataaaccagtatcgttactggcacctgaaattaatttgtgaatttgcaacagtaatcagagttaccattatttaatttgtatgctaaatgaggaggtacattgaaaccctccaaatctccagtctcatctatgtcatattttgccactgcctttcagaagtgatttagttgtggaaagataataaattgatttgttatggttacatatttagcgcacccagagaaaattaattatatttctacagagaaaatgaatttgggatactaaagtagtttaagtctcctttactgaatgtaagggggggatcgaaaagaaggtatttttccaatcacagtgttatgtagtattgttctatttttgtttacaaacatggaaaacagagtatttctggcagctgtggtacaaatgtgataatatattgctaaaatattttagatgttattatgctaatatagtaggggttgaagaaaacaaaatagcttattatagaattgcacatagttctgcccaaattatgtgaaatgcttatgcttgtgtatatgtataaattaatacagagtacgttaaaagcaaaaagatgtatatttgcatatttttctaaagaaatatattattcatcttttcattc

SEQ ID NO: 4914 - DNA, 3610 bp, Homo sapiens
agttataagagacaggaataccagtgagaagtatgagagagtgggtgggagataatgtttagaatctcttttgctgcccgcaatttatgaaaatggcttgaaaatatttatggtcaaagaccgaaatatttcttcaaagaagattagctttgctccattaaaagtaatgagtagaaatattaaaaaaaaaaaaagttttaagtacctgagtatcttgccagcaactgaccaccactgctaaaagtgaggagagacacagctttcatcattgggactgcagtttatttcaggacaaagagatcttcaaaaatcaaaaatgaggttcacatttacaagccggtgcttggcactgtttcttcttctaaatcacccaaccccaattcttcctgccttttcaaatcaaacctatccaacaatagagcccaagccatttctttacgtcgtaggacgaaagaagatgatggatgcacagtacaaatgctatgaccgaatgcagcagttacccgcataccaaggagaaggtccatattgcaatcgcacctgggatggatggctgtgctgggatgacacaccggctggagtattgtcctatcagttctgcccagattattttccggattttgatccatcagaaaaggttacaaaatactgtgatgaaaaaggtgtttggtttaaacatcctgaaaacaatcgaacctggtccaactatactatgtgcaatgctttcactcctgagaaactgaagaatgcatatgttctgtactatttggctattgtgggtcattctttgtcaattttcaccctagtgatttccctggggattttcgtgtttttcaggagccttggctgccaaagggtaaccctgcacaagaacatgtttcttacttacattctgaattctatgattatcatcatccacctggttgaagtagtacccaatggagagctcgtgcgaagggacccggtgagctgcaagattttgcattttttccaccagtacatgatggcctgcaactatttctggatgctctgtgaagggatctatcttcatacactcattgtcgtggctgtgtttactgagaagcaacgcttgcggtggtattatctcttgggctgggggttcccgctggtgccaaccactatccatgctattaccagggccgtgtacttcaatgacaactgctggctgagtgtggaaacccatttgctttacataatccatggacctgtcatggcggcacttgtggtcaatttcttctttttgctcaacattgtccgggtgcttgtgaccaaaatgagggaaacccatgaggcggaatcccacatgtacctgaaggctgtgaaggccaccatgatccttgtgcccctgctgggaatccagtttgtcgtctttccctggagaccttccaacaagatgcttgggaagatatatgattacgtgatgcactctctgattcatttccagggcttctttgttgcgaccatctactgcttctgcaacaatgaggtccaaaccaccgtgaagcgccaatgggcccaattcaaaattcagtggaaccagcgttgggggaggcgcccctccaaccgctctgctcgcgctgcagccgctgctgcggaggctggcgacatcccaatttacatctgccatcaggagctgaggaatgaaccagccaacaaccaaggcgaggagagtgctgagatcatccctttgaatatcatagagcaagagtcatctgcttgaatgtgaagcaaacacagcatcgtgatcactgagccatcatttcctgggagaaagaccatgcatttaaagtattctccatcctcccaggaaccgaacatatcatttgtgaagaattattcagtgaatttgtccattgtaaatctgaagaaagttattcttggtactgttgctttgggagacagtctaggaatggagtctcccactgcaacttgtgaactccatcattcatccaggactgagatgcaaatgtcacagtaatgcaagcaaagtatcaaagaaaaacaatgaaattgacctagttcagatacagggtgctccttgtcaatactgagccatttatacctttgaaatattaaaatcactgtcaatatttttatttttaactctggattttgaattagattatttctgtatttggctatggatctgatttttaatttttttaaatttcagtcaattctgatgttactgagatgttttaccatccttacaatgtaaaccacatgaactacgtgacctctgcaagacaaagcggctttctaatagagagattagtaaatatgtgaagaaaaagacctgcatttggcaggaagatgtatgctttgaatgcaaaagaaatttagagtcaatttgctgaaaacattacatgctcagcttggttttggacaagcctgtccattgggcaggacctagctgttgtaaagaattggtcttaatgttgaatgtattttggttgctgatgtttataaactgagaggtcacaaagaatctatcactaaaaatttttacaaaactgccaaaaatataattcttagtggaagacaatactccctttaaagagagtttgccactcccctaaactccaggatttataaagcaaattactccaaggtttataaagcagattacctcttgcccttgggtgctatctagcagtaaaagataaatttgttgaatattggtaattaaaagactccacataagtccattaactgctttccacccagcttcaaagcttaaaaagagctcaggcttttccaggaagatccaggagggctaattagaaatcaacttgtggttgaccgcttgtttcttgttattaccaaaacaggaggggaaaaaattaactgctccaaatttaaccataaatcaattcatgtttaacgtttctcattaaaatccagtattatattatcatatctctctttacttcccagtataagatttttgaaaatcctgaataaaccagtatcgttactggcacctgaaattaatttgtgaatttgcaacagtaatcagagttaccattatttaatttgtatgctaaatgaggaggtacattgaaaccctccaaatctccagtctcatctatgtcatattttgccactgcctttcagaagtgatttagttgtggaaagataataaattgatttgttatggttacatatttagcgcacccagagaaaattaattatatttctacagagaaaatgaatttgggatactaaagtagtttaagtctcctttactgaatgtaagggggggatcgaaaagaaggtatttttccaatcacagtgttatgtagtattgttctatttttgtttacaaacatggaaaacagagtatttctggcagctgtggtacaaatgtgataatatattgctaaaatattttagatgttattatgctaatatagtaggggttgaagaaaacaaaatagcttattatagaattgcacatagttctgcccaaattatgtgaaatgcttatgcttgtgtatatgtataaattaatacagagtacgttaaaagcaaaaagatgtatatttgcatatttttctaaagaaatatattattcatcttttcattc

SEQ ID NO: 4915 - DNA, 2773 bp, Homo sapiens
aatttgcatatcttatatggcctaatggtggcgatcatggcaagttagaagttttctgactcctttcggaggagcctccgggaccccggggagtaacaggtgtctggaggctgaagggtggaggggttcctggatttggggtttgcttgtgaaactcccctccaccctcctctctcgcacccacccaccccctcacccccttctttttccgtccttggaaaatggtgtccaagctcacgtcgctccagcaagaactcctgagcgccctgctgagctccggggtcaccaaggaggtgctggttcaggccttggaggagttgctgccatccccgaacttcggggtgaagctggagacgctgcccctgtcccctggcagcggggccgagcccgacaccaagccggtcttccatactctcaccaacggccacgccaagggccgcttgtccggcgacgagggctccgaggacggcgacgactatgacacacctcccatcctcaaggagctgcaggcgctcaacaccgaggaggcggcggagcagcgggcggaggtggaccggatgctcagtgaggacccttggagggctgctaaaatgatcaagggttacatgcagcaacacaacatcccccagagggaggtggtcgatgtcaccggcctgaaccagtcgcacctctcccagcatctcaacaagggcacccctatgaagacccagaagcgtgccgctctgtacacctggtacgtcagaaagcaacgagagatcctccgacagttcagtcaacagagccatgggcctgggcagtccgatgatgcctgctctgagcccaccaacaagaagatgcgccgcaaccggttcaaatgggggcccgcgtcccagcaaatcttgtaccaggcctacgatcggcaaaagaaccccagcaaggaagagagagaggccttagtggaggaatgcaacagggcagaatgtttgcagcgaggggtgtccccctccaaagcccacggcctgggctccaacttggtcactgaggtccgtgtctacaactggtttgcaaaccgcaggaaggaggaggcattccggcaaaagctggccatggacgcctatagctccaaccagactcacagcctgaaccctctgctctcccacggctccccccaccaccagcccagctcctctcctccaaacaagctgtcaggagtgcgctacagccagcagggaaacaatgagatcacttcctcctcaacaatcagtcaccatggcaacagcgccatggtgaccagccagtcggttttacagcaagtctccccagccagcctggacccaggccacaatctcctctcacctgatggtaaaatgatctcagtctcaggaggaggtttgcccccagtcagcaccttgacgaatatccacagcctctcccaccataatccccagcaatctcaaaacctcatcatgacacccctctctggagtcatggcaattgcacaaagcctcaacacctcccaagcacagagtgtccctgtcatcaacagtgtggccggcagcctggcagccctgcagcccgtccagttctcccagcagctgcacagccctcaccagcagcccctcatgcagcagagcccaggcagccacatggcccagcagcccttcatggcagctgtgactcagctgcagaactcacacatgtacgcacacaagcaggaacccccccagtattcccacacctcccggtttccatctgcaatggtggtcacagataccagcagcatcagtacactcaccaacatgtcttcaagtaaacagtgtcctctacaagcctggtgatgcccacacaccacttacttcgtgcgcaacaacaaggaccctgttttccacaccatcaccctctgggcagctgtcatggaaaagcccagtgacctgaccggcacctgcgagaggtccctgcttacctgacggacgtcctgctggcacctcagacaatccactctcaggaggcgcagcccgaagcccagtttcccttctatgcagtattgccacaatgcctctcccacgatgtcaaggactcctgtctgtcctggaggtgggagacaaggaaccaccgaagaggaagcaagaaagccgtactgtctatgttgtgatccttcatcgaacaaactgatgcgaaaacttgaatctgttactgaaatgaggagagaaggacatgtgctattgaactgagccaaacacactgtaaatatccacagactccctcccctgcccccatcccacatgatcttgagatttcttttaaagaagtaaatttgtccaatggctgtaaactataaactactgtaattaagtgcaatttcccctctgtgtcctctcccctctgccctgtatataatactaaagtgtctattagttttctttgtaaaggtcagagtcaaaatttcaaaagtgatctgtcccctctcccctcatggagaaacatcctaagtgggaagtgaagccccttgtcctctcccgcgggcctggacacttatggggacagcataccttggactgactaccagctaactccagtctcctgacattaagacacacctctggatccctggaggggctgaatgtagtgtgtcagagtaacatgccagcttcctgtgggccaggagctcagccgtgcactccctaagaaaccccagggcagggaaactggctgtttgatagcagaagaaaaagttgcagtctcagaaagccttccattaaaacaatttattttatcactaaaaaaaaaaaaaaaa

SEQ ID NO: 4916 - DNA, 4184 bp, Homo sapiens; identical to SEQ ID NO: 1577

SEQ ID NO: 4917 - DNA, 4007 bp, Homo sapiens
atttaagggcccgcctctcctggctcacagctgcttgctgctccagccttgccctcccagagctgccggacgctcgcgggtctcggaacgcatcccgccgcgggggcttcggccgtggcatgggcgccgcgggcctgctcggggttttcttggctctcgtcgcaccgggggtcctcgggatttcttgtggctctcctccgcctatcctaaatggccggattagttattattctacccccattgctgttggtaccgtgataaggtacagttgttcaggtaccttccgcctcattggagaaaaaagtctattatgcataactaaagacaaagtggatggaacctgggataaacctgctcctaaatgtgaatatttcaataaatattcttcttgccctgagcccatagtaccaggaggatacaaaattagaggctctacaccctacagacatggtgattctgtgacatttgcctgtaaaaccaacttctccatgaacggaaacaagtctgtttggtgtcaagcaaataatatgtgggggccgacacgactaccaacctgtgtaagtgttttccctctcgagtgtccagcacttcctatgatccacaatggacatcacacaagtgagaatgttggctccattgctccaggattgtctgtgacttacagctgtgaatctggttacttgcttgttggagaaaagatcattaactgtttgtcttcgggaaaatggagtgctgtcccccccacatgtgaagaggcacgctgtaaatctctaggacgatttcccaatgggaaggtaaaggagcctccaattctccgggttggtgtaactgcaaactttttctgtgatgaagggtatcgactgcaaggcccaccttctagtcggtgtgtaattgctggacagggagttgcttggaccaaaatgccagtatgtgaagaaattttttgcccatcacctccccctattctcaatggaagacatataggcaactcactagcaaatgtctcatatggaagcatagtcacttacacttgtgacccggacccagaggaaggagtgaacttcatccttattggagagagcactctccgttgtacagttgatagtcagaagactgggacctggagtggccctgccccacgctgtgaactttctacttctgcggttcagtgtccacatccccagatcctaagaggccgaatggtatctgggcagaaagatcgatatacctataacgacactgtgatatttgcttgcatgtttggcttcaccttgaagggcagcaagcaaatccgatgcaatgcccaaggcacatgggagccatctgcaccagtctgtgaaaaggaatgccaggcccctcctaacatcctcaatgggcaaaaggaagatagacacatggtccgctttgaccctggaacatctataaaatatagctgtaaccctggctatgtgctggtgggagaagaatccatacagtgtacctctgagggggtgtggacaccccctgtaccccaatgcaaagtggcagcgtgtgaagctacaggaaggcaactcttgacaaaaccccagcaccaatttgttagaccagatgtcaactcttcttgtggtgaagggtacaagttaagtgggagtgtttatcaggagtgtcaaggcacaattccttggtttatggagattcgtctttgtaaagaaatcacctgcccaccaccccctgttatctacaatggggcacacaccgggagttccttagaagattttccatatggaaccacggtcacttacacatgtaaccctgggccagaaagaggagtggaattcagcctcattggagagagcaccatccgttgtacaagcaatgatcaagaaagaggcacctggagtggccctgctcccctgtgtaaactttccctccttgctgtccagtgctcacatgtccatattgcaaatggatacaagatatctggcaaggaagccccatatttctacaatgacactgtgacattcaagtgttatagtggatttactttgaagggcagtagtcagattcgttgcaaagctgataacacctgggatcctgaaataccagtttgtgaaaaagaaacatgccagcatgtgagacagagtcttcaagaacttccagctggttcacgtgtggagctagttaatacgtcctgccaagatgggtaccagttgactggacatgcttatcagatgtgtcaagatgctgaaaatggaatttggttcaaaaagattccactttgtaaagttattcactgtcaccctccaccagtgattgtcaatgggaagcacacaggcatgatggcagaaaactttctatatggaaatgaagtctcttatgaatgtgaccaaggattctatctcctgggagagaaaaaattgcagtgcagaagtgattctaaaggacatggatcttggagcgggccttccccacagtgcttacgatctcctcctgtgactcgctgccctaatccagaagtcaaacatgggtacaagctcaataaaacacattctgcatattcccacaatgacatagtgtatgttgactgcaatcctggcttcatcatgaatggtagtcgcgtgattaggtgtcatactgataacacatgggtgccaggtgtgccaacttgtatcaaaaaagccttcatagggtgtccacctccgcctaagacccctaacgggaaccatactggtggaaacatagctcgattttctcctggaatgtcaatcctgtacagctgtgaccaaggctacctgctggtgggagaggcactccttctttgcacacatgagggaacctggagccaacctgcccctcattgtaaagaggtaaactgtagctcaccagcagatatggatggaatccagaaagggctggaaccaaggaaaatgtatcagtatggagctgttgtaactctggagtgtgaagatgggtatatgctggaaggcagtccccagagccagtgccaatcggatcaccaatggaaccctcccctggcggtttgcagatcccgttcacttgctcctgtcctttgtggtattgctgcaggtttgatacttcttaccttcttgattgtcattaccttatacgtgatatcaaaacacagagcacgcaattattatacagatacaagccagaaagaagcttttcatttagaagcacgagaagtatattctgttgatccatacaacccagccagctgatcagaagacaaactggtgtgtgcctcattgcttggaattcagcggaatattgattagaaagaaactgctctaatatcagcaagtctctttatatggcctcaagatcaatgaaatgatgtcataagcgatcacttcctatatgcacttattctcaagaagaacatctttatggtaaagatgggagcccagtttcactgccatatactcttcaaggactttctgaagcctcacttatgagatgcctgaagccaggccatggctataaacaattacatggctctaaaaagttttgccctttttaaggaaggcactaaaaagagctgtcctggtatctagacccatcttctttttgaaatcagcatactcaatgttactatctgcttttggttataatgtgtttttaattatctaaagtatgaagcattttctggggttatgatggctttacctttattaggaagtatggttttattttgatagtagcttcctcctctggtggtgttaatcatttcatttttacccttacttggtttgagtttctctcacattactgtatatactttgcctttccataatcactcagtgattgcaatttgcacaagtttttttaaattatgggaatcaagatttaatcctagagatttggtgtacaattcaggctttggatgtttctttagcagttttgtgataagttctagttgcttgtaaaatttcacttaataatgtgtacattagtcattcaataaattgtaattgtaaagaaaacatacaaaaaaaaaaaaaaaa

SEQ ID NO: 4918 - DNA, 6456 bp, Homo sapiens
attcagtgggtcgtggtgattaatggtttcagaaggaagtgcagcaggaagagactttgcaggaatggaagaggtgaggcagctccacgtgagattctgcaaagggattaagatttggcaccaggcttggtttctgtgcagcctcttaggcagagagccccaggagagggaagcaggctgtcagctgtggctttgcacgctctcagctgtcttgaaggttggttggctcttcccgctctctgaggtacccaattttaccttgttaaaggatggatgtggatgctggaggcttaaagaagaccagatctacaatgcagtgagaagagaagaaacagaaaatacagttggatctctactccatttcctcaccaagctcccagcctccgagacagcccatggaaggataagcgttggtccatgcttaaagcaatgtgtccgagacactgtatgtgagtatcgcgccaccctccaaaggacttcaatatcgcagtacatcaccggttctctcctagaagcaaccacgtctttgggagcaagaagtggccttctcagtacttttggaggatccactggacgaatgatgctgaaagaacgccagccaggcccctctgtggccaattccaatgccctcccttcaagttcagctgggatcagcaaggagctgatcgatctgcagcctctcatccagttcccagaggaagtcgccagcatcctgatggagcaagagcagactatttaccgcagggtcttgccagtcgactacctttgcttcttaacacgggacttgggcactcctgaatgccagagctccttgccctgcctcaaagcatccatctcagcgtcgattcttaccactcagaatggagagcacaatgcccttgaagatctggtgatgaggtttaatgaggtgagctcctgggtgacatggctgatcctcacggcaggctccatggaggagaagcgagaagtcttttcatatttggtgcatgtggccaaatgctgctggaacatgggcaactacaacgctgtcatggagttcttggctggcctcaggtcaagaaaagttttaaaaatgtggcagttcatggaccagtctgatattgagaccatgaggagcctgaaggatgctatggcccagcatgagtcctcttgtgagtacagaaaggtggtgacacgtgccctgcacatccctggctgtaaggtggttccattctgtggggtgtttctgaaggagctctgtgaagtgcttgacggcgcctccggtctcatgaagctttgcccgcggtacaattcccaagaagaaactttagagtttgtagcagattacagtggacaagataatttcttacaacgagtgggacaaaatggcttaaagaattcggagaaggagtccactgtcaacagcatctttcaggtcatccggagctgcaatcgaagtctggagacagacgaggaggacagccccagtgaaggaaacagctccaggaaaagctccttgaaggataaaagccgatggcagtttataattggagatttgttggattcagacaatgacatctttgagcaatccaaagaatacgactctcatggttcagaggactcacagaaggccttcgaccatgggacggagctcatcccttggtacgtgctgtccatccaagccgatgtgcaccagttcctgctgcagggggccacggtcatccactacgaccaggacacacacctctctgcccgctgcttcctccagcttcagcccgacaatagcaccttgacctgggtaaagcccacaactgcctccccagccagcagtaaagcaaaacttggtgtacttaataacacagctgagcctggaaaattcccactactgggtaatgctggattaagtagcctgacggaaggggtcttggatctttttgcagtgaaggctgtatacatgggccaccctggcattgatatacacactgtgtgtgttcagaacaaactgggtagcatgttcctgtcagagactggtgtgacattgctctatgggcttcagaccacagacaacagattattgcacttcgtggcaccaaagcacacagctaaaatgctcttcagcggattattggaactcactagagctgtgagaaagatgaggaaattccctgaccaaagacagcagtggctgcggaaacagtacgtcagcctttatcaggaggatggacggtatgaaggcccaactttggctcacgctgtggagttgtttggtggcagacggtggagtgctcgaaaccccagccccggaacatcagcaaagaatgctgagaagcccaatatgcagagaaacaataccctgggcataagcactaccaagaaaaagaagaaaatcctcatgaggggtgagagtggagaggtaactgacgatgagatggcaacccgaaaggccaagatgcacaaagagtgtcgaagccggagtggttctgatcctcaagacattaatgaacaagaagaatcagaggtgaatgccatcgctaaccctccaaaccccctcccttccagaagagcccactctttgaccacagctgggtcccccaacttggctgccgggacgtcatctcccatcaggccagtgtcctcccctgtgctgtcttcttcaaacaagagcccatccagtgcttggagcagtagtagctggcacgggcggatcaaaggcggcatgaagggatttcagagcttcatggtttcagatagcaacatgagttttgttgaatttgttgagctgttcaaatcattcagtgtcaggagccgcaaggacctgaaggatctgtttgatgtctatgcagtgccctgcaaccgatctggctccgagtcagccccactctacaccaacctgacaattgatgaaaacaccagcgatcttcagcctgacctagatctgttgaccagaaatgtctcggatttggggttgttcattaagagtaaacagcagctatcggacaaccagaggcagatatctgatgccattgctgctgcaagcattgtgacaaatggcactgggattgagagcacatctctgggcatttttggggtgggcatacttcagctcaacgatttcctcgtgaattgccaaggagaacactgcacttatgatgaaatcctcagcatcatccagaagttcgagcctagcatcagtatgtgtcatcagggactaatgtcatttgaagggtttgccaggtttctgatggataaagaaaattttgcctcaaaaaatgatgagtcacaggagaacattaaagaactgcagctacccctctcatactattacatcgaatcttcgcacaatacctacctcacgggccatcagctcaaaggagaatcctcggtagaactctacagccaggtccttttgcaaggctgtcgaagtgtagaattggactgctgggacggagacgatgggatgcccatcatttatcatggacatacgctgacaaccaagatccccttcaaggaagtggttgaagccattgatcgcagtgccttcatcaactctgacctgccaatcatcatatcgattgagaaccactgttcattgcctcagcaacgaaaaatggcagaaattttcaagactgtgtttggagaaaagctggtgactaaattcttatttgagactgatttctcagatgatccaatgcttccttcacctgaccaactcagaaagaaagttcttcttaaaaacaagaagctaaaagcccatcagacgccagtggatatcttaaagcaaaaggctcatcagttagcatctatgcaagtgcaggcttataatggtgggaatgccaacccccgacctgccaataatgaggaagaggaagatgaggaggacgaatatgattatgactatgaatccctttctgatgacaacattctggaagacagacctgaaaataaatcatgtaatgacaagcttcagtttgaatataatgaagaaatcccaaagaggataaagaaagcagataactctgcttgcaacaaaggaaaggtttatgatatggaactgggagaagaattttatcttgatcagaataaaaaggaaagcagacagattgcaccagagctttctgaccttgtaatctattgtcaagcagtaaaatttccaggactgtcaactctaaatgcatctggctctagcagaggaaaagaaaggaaaagcaggaagtccatttttggcaacaatccgggcagaatgagcccaggggagacagcatcatttaacaaaacatctggaaaaagttcctgtgaaggcattcgacagacctgggaggaatcttcttcccctctcaacccaaccacgtccctcagtgctatcattagaactcccaaatgttatcatatctcgtcgctgaatgaaaatgccgccaaacgtctgtgtcgcaggtattctcagaaactgacccagcacaccgcctgtcagctgctgagaacttaccctgctgccacccgcatcgactcttccaacccgaaccccctcatgttctggctccatgggatacagcttgtggcactcaactaccagactgatgatctccctttacatttaaatgctgcaatgtttgaggcaaatggtggttgtggttatgtattgaaacctccagttctgtgggacaagaactgccccatgtatcagaagttttctccactagaaagagatctggacagcatggatcctgcagtctattctttaactattgtctctggtcagaatgtgtgccccagtaatagcatgggaagcccgtgcattgaagtcgacgtcctgggcatgcctctggacagctgccatttccgcacaaagcccatccatcgaaacaccctgaaccccatgtggaacgagcagtttctgttccacgttcacttcgaagatcttgtatttcttcgttttgcagttgtggaaaacaatagttcagcggtaactgctcagagaatcattccactgaaagctttaaaacgaggatatcgacatcttcagctgcgaaaccttcacaatgaagtcttggagatttctagtttattcattaacagcagaaggatggaagaaaattcctctggcaataccatgtcagcctcttcgatgtttaatacagaagaaagaaaatgtttgcagactcacagagtcacggtgcatggggtcccagggccagagccctttaccgttttcactattaatggaggcaccaaggcaaagcagcttctgcagcaaattctgacaaatgaacaagacatcaaacctgttaccacagactattttttgatggaagaaaaatattttatatctaaagaaaagaatgaatgtaggaaacaaccattccagagagccattggtccagaagaggagatcatgcaaattttaagcagctggtttccagaagagggatacatgggcaggattgtcttaaaaacccagcaggaaaacctagaagagaaaaacattgttcaagatgacaaagaggtgatcttgagctcagaggaggagagtttctttgtccaagtgcatgatgtttctccagagcaacctcgaacagtcatcaaagcaccccgcgtcagcactgcacaggatgtcattcagcagaccttatgcaaagccaaatattcctacagcatcctgagcaaccccaatccaagcgactatgtgcttttggaagaggtggtgaaagacactaccaacaagaagactaccacaccaaagtcctctcagcgggtccttctggatcaggagtgtgtgtttcaagcccaaagcaagtggaaaggtgcaggaaaattcatccttaagctaaaggagcaggtgcaggcatctcgagaagataaaaagaaaggcatttctttcgcaagtgaactcaagaagctcaccaagtcaactaaacagccccgaggacttacatcaccttctcagctcttgacctcagaaagtatccaaaccaaggaggagaaacctgtgggtggcttgtcctccagtgacacaatggattaccgacagtgactaagggcagcatgtttaacccaggtgaagatctttaagcaagaagttaaagagtgaacatggtggaaaaaatataattattttcatcagacttaaactggaaattgatgatttctgaactgaagccttcacacatgtgagatccatgctgaggagaagcaaaatggcacagggctagttgccaccaaccaatttactgatgaatgaagcccaggggactgccattttataaatgtcagcagttggaaaaatcgtcacgaattgacttagagcaagggtcagcaagcttgtctgtaaagggccaaacagtaaatattttagggctgggggccataaaatatgttgcaaccacccaattctgccattgtagtgcaaaagcagccatagacaacacatacatgaacgaacgtggctgtattccaataaaactttatttatggacactgaaa

SEQ ID NO: 4919 - DNA, 10210 bp, Homo sapiens; identical to SEQ ID NO: 2434

SEQ ID NO: 4920 - DNA, 4168 bp, Homo sapiens; identical to SEQ ID NO: 156

SEQ ID NO: 4921 - DNA, 3841 bp, Homo sapiens
gggggcggcagctttgtgctttttagtggccgcgtcccaggatagctggaaggttaggacgctcttgcggtcccagagtggagtggaaggtctggagctttgggaggagacggggaggacagactggaggcgtgttcctccggagttttctttttcgtgcgagccctcgcgcgcgcgtacagtcatcccgctggtctgacgattgtggagaggcggtggagaggcttcatccatcccacccggtcgtcgccggggattggggtcccagcgagacctccccgggagaagcagtgcccaggaggttttctgaagccggggaagctgtgcagccgaagccgccgccgcgccggagcccgggacaccggccaccctccgcgccacccaccctcgccggctccggcttcctctggcccaggcgccgcgcggacccggcagctgtctgcgcacgccgagctccacggtgaaaaaaaagtgaaggtgtaaaagcagcacaagtgcaataagagatatttcctcaaatttgcctcaagatggaaaccctttgcctcagggcatccttttggctggcactggttggatgtgtaatcagtgataatcctgagagatacagcacaaatctaagcaatcatgtggatgatttcaccacttttcgtggcacagagctcagcttcctggttaccactcatcaacccactaatttggtcctacccagcaatggctcaatgcacaactattgcccacagcagactaaaattacttcagctttcaaatacattaacactgtgatatcttgtactattttcatcgtgggaatggtggggaatgcaactctgctcaggatcatttaccagaacaaatgtatgaggaatggccccaacgcgctgatagccagtcttgcccttggagaccttatctatgtggtcattgatctccctatcaatgtatttaagttctaccaagatgtaaaggactggtggctcttcgggttctatttctgtatgcccttggtgtgcactgcgatcttctacaccctcatgacttgtgagatgttgaacagaaggaatggcagcttgagaattgccctcagtgaacatcttaagcagcgtcgagaagtggcaaaaacagttttctgcttggttgtaatttttgctctttgctggttccctcttcatttaagccgtatattgaagaaaactgtgtataacgagatggacaagaaccgatgtgaattacttagtttcttactgctcatggattacatcggtattaacttggcaaccatgaattcatgtataaaccccatagctctgtattttgtgagcaagaaatttaaaaattgtttccagtcatgcctctgctgctgctgttaccagtccaaaagtctgatgacctcggtccccatgaacggaacaagcatccagtggaagaaccacgatcaaaacaaccacaacacagaccggagcagccataaggacagcatgaactgaccacccttagaagcactcctcggtactcccataatcctctcggagaaaaaaatcacaaggcaactgtgagtccgggaatctcttctctgatccttcttccttaattcactcccacacccaagaagaaatgctttccaaaaccgcaagggtagactggtttatccacccacaacatctacgaatcgtacttctttaattgatctaatttacatattctgcgtgttgtattcagcactaaaaaatggtgggagctgggggagaatgaagactgttaaatgaaaccagaaggatatttactacttttgcatgaaaatagagctttcaagtacatggctagcttttatggcagttctggtgaatgttcaatgggaactggtcaccatgaaactttagagattaacgacaagattttctactttttttaagtgatttttttgtccttcagccaaacacaatatgggctcaagtcacttttatttgaaatgtcatttggtgccagtattttttaactgcataatagcctaacatgattatttgaacttatttacacatagtttgaaaaaaaaaagacaaaaatagtattcaggtgagcaattagattagtattttccacgtcactgtttatttttttaaaacacaaattctaaagctacaacaaatactacaggcccttaaagcacagtctgatgacacatttggcagtttaatagatgttactcaaagaattttttaagaactgtattttattttttaaatggtgttttattacaagggaccttgaacatgttttgtatgttaaattcaaaagtaatgcttcaatcagatagttctttttcacaagttcaatctgtttttcatgtaaattttgtatgaaaaatcaatgtcaagtaccaaaatgttaatgtatgtgtcatttaactctgcctgagactttcagtgcactgtatatagaagtctaaaacacacctaagagaaaaagatcgaatttttcagatgattcagaaattttcattcaggtatttgtaatagtgacatatatatgtatatacatatcacctcctattctcttaatttttcttaaaatgttaactggcagtaagtcttttttgatcattcccttttccatataggaaacataattttgaagtggccagatgagtttatcatgtcagtgaaaaataattacccacaaatgccaccagaacttacgattcttcacttcttggggttttcagtatgaacctaactccccaccccaacatctccctcccacattgtcaccatttcaaagggcccacagtgacttttgctgggcattttcccagatgtttacagactgtgagtacagcagaaaatcttttactagtgtgtgtgtgtatatatataaacaattgtaaatttcttttagcccatttttctagactgtctctgtggaatatatttgtgtgtgtgatatatgcatgtgtgtgatggtatgtatggatttaatctaatctaataattgtgccccgcagttgtgccaaagtgcatagtctgagtaaaatctaggtgattgttcatcatgacaacctgcctcagtccattttaacctgtagcaaccttctgcattcataaatcttgtaatcatgttaccattacaaatgggatataagaggcagcgtgaaagcagatgagctgtggactagcaatatagggttttgtttggttggttggtttgataaagcagtatttggggtcatattgtttcctgtgctggagcaaaagtcattacactttgaagtattatattgttcttatcctcaattcaatgtggtgatgaaattgccaggttgtctgatatttctttcagacttcgccagacagattgctgataataaattaggtaagataatttgttgggccatattttaggacaggtaaaataacatcaggttccagttgcttgaattgcaaggctaagaagtactgcccttttgtgtgttagcagtcaaatctattattccactggcgcatcatatgcagtgatatatgcctataatataagccataggttcacaccattttgtttagacaattgtctttttttcaagatgctttgtttctttcatatgaaaaaaatgcattttataaattcagaaagtcatagatttctgaaggcgtcaacgtgcattttatttatggactggtaagtaactgtggtttactagcaggaatatttccaatttctacctttactacatcttttcaacaagtaactttgtagaaatgagccagaagccaaggccctgagttggcagtggcccataagtgtaaaataaaagtttacagaaaccttgaaaaaaaaaaaaaaaaaa

SEQ ID NO: 4922 - DNA, 3678 bp, Homo sapiens
gggggcggcagctttgtgctttttagtggccgcgtcccaggatagctggaaggttaggacgctcttgcggtcccagagtggagtggaaggtctggagctttgggaggagacggggaggacagactggaggcgtgttcctccggagttttctttttcgtgcgagccctcgcgcgcgcgtacagtcatcccgctggtctgacgattgtggagaggcggtggagaggcttcatccatcccacccggtcgtcgccggggattggggtcccagcgagacctccccgggagaagcagtgcccaggaggttttctgaagccggggaagctgtgcagccgaagccgccgccgcgccggagcccgggacaccggccaccctccgcgccacccaccctcgccggctccggcttcctctggcccaggcgccgcgcggacccggcagctgtctgcgcacgccgagctccacgctgctggctgggcgctggccttttgatcacaatgactttggcgtatttctttgcaagctgttcccctttttgcagaagtcctcggtggggatcaccgtcctcaacctctgcgctcttagtgttgacaggtacagagcagttgcctcctggagtcgtgttcagggaattgggattcctttggtaactgccattgaaattgtctccatctggatcctgtcctttatcctggccattcctgaagcgattggcttcgtcatggtaccctttgaatataggggtgaacagcataaaacctgtatgctcaatgccacatcaaaattcatggagttctaccaagatgtaaaggactggtggctcttcgggttctatttctgtatgcccttggtgtgcactgcgatcttctacaccctcatgacttgtgagatgttgaacagaaggaatggcagcttgagaattgccctcagtgaacatcttaagcagcgtcgagaagtggcaaaaacagttttctgcttggttgtaatttttgctctttgctggttccctcttcatttaagccgtatattgaagaaaactgtgtataacgagatggacaagaaccgatgtgaattacttagtttcttactgctcatggattacatcggtattaacttggcaaccatgaattcatgtataaaccccatagctctgtattttgtgagcaagaaatttaaaaattgtttccagtcatgcctctgctgctgctgttaccagtccaaaagtctgatgacctcggtccccatgaacggaacaagcatccagtggaagaaccacgatcaaaacaaccacaacacagaccggagcagccataaggacagcatgaactgaccacccttagaagcactcctcggtactcccataatcctctcggagaaaaaaatcacaaggcaactgtgagtccgggaatctcttctctgatccttcttccttaattcactcccacacccaagaagaaatgctttccaaaaccgcaagggtagactggtttatccacccacaacatctacgaatcgtacttctttaattgatctaatttacatattctgcgtgttgtattcagcactaaaaaatggtgggagctgggggagaatgaagactgttaaatgaaaccagaaggatatttactacttttgcatgaaaatagagctttcaagtacatggctagcttttatggcagttctggtgaatgttcaatgggaactggtcaccatgaaactttagagattaacgacaagattttctactttttttaagtgatttttttgtccttcagccaaacacaatatgggctcaagtcacttttatttgaaatgtcatttggtgccagtattttttaactgcataatagcctaacatgattatttgaacttatttacacatagtttgaaaaaaaaaagacaaaaatagtattcaggtgagcaattagattagtattttccacgtcactgtttatttttttaaaacacaaattctaaagctacaacaaatactacaggcccttaaagcacagtctgatgacacatttggcagtttaatagatgttactcaaagaattttttaagaactgtattttattttttaaatggtgttttattacaagggaccttgaacatgttttgtatgttaaattcaaaagtaatgcttcaatcagatagttctttttcacaagttcaatctgtttttcatgtaaattttgtatgaaaaatcaatgtcaagtaccaaaatgttaatgtatgtgtcatttaactctgcctgagactttcagtgcactgtatatagaagtctaaaacacacctaagagaaaaagatcgaatttttcagatgattcagaaattttcattcaggtatttgtaatagtgacatatatatgtatatacatatcacctcctattctcttaatttttcttaaaatgttaactggcagtaagtcttttttgatcattcccttttccatataggaaacataattttgaagtggccagatgagtttatcatgtcagtgaaaaataattacccacaaatgccaccagaacttacgattcttcacttcttggggttttcagtatgaacctaactccccaccccaacatctccctcccacattgtcaccatttcaaagggcccacagtgacttttgctgggcattttcccagatgtttacagactgtgagtacagcagaaaatcttttactagtgtgtgtgtgtatatatataaacaattgtaaatttcttttagcccatttttctagactgtctctgtggaatatatttgtgtgtgtgatatatgcatgtgtgtgatggtatgtatggatttaatctaatctaataattgtgccccgcagttgtgccaaagtgcatagtctgagtaaaatctaggtgattgttcatcatgacaacctgcctcagtccattttaacctgtagcaaccttctgcattcataaatcttgtaatcatgttaccattacaaatgggatataagaggcagcgtgaaagcagatgagctgtggactagcaatatagggttttgtttggttggttggtttgataaagcagtatttggggtcatattgtttcctgtgctggagcaaaagtcattacactttgaagtattatattgttcttatcctcaattcaatgtggtgatgaaattgccaggttgtctgatatttctttcagacttcgccagacagattgctgataataaattaggtaagataatttgttgggccatattttaggacaggtaaaataacatcaggttccagttgcttgaattgcaaggctaagaagtactgcccttttgtgtgttagcagtcaaatctattattccactggcgcatcatatgcagtgatatatgcctataatataagccataggttcacaccattttgtttagacaattgtctttttttcaagatgctttgtttctttcatatgaaaaaaatgcattttataaattcagaaagtcatagatttctgaaggcgtcaacgtgcattttatttatggactggtaagtaactgtggtttactagcaggaatatttccaatttctacctttactacatcttttcaacaagtaactttgtagaaatgagccagaagccaaggccctgagttggcagtggcccataagtgtaaaataaaagtttacagaaaccttgaaaaaaaaaaaaaaaaaa

SEQ ID NO: 4923 - DNA, 3296 bp, Homo sapiens; identical to SEQ ID NO: 2518

SEQ ID NO: 4924 - DNA, 1796 bp, Homo sapiens
ccggcaccgacaagtgcgctgcaccagtggcaccggctgggggcgagccgacctcgagcagccgccgccgccgccgtcgttgctactgccgcagcggagttcagagggcccggaggtgggagacttcccacacggtgactgagatgtcgtccactgcggctttttaccttctctctacgctaggaggatacttggtgacctcattcttgttgcttaaatacccgaccttgctgcaccagagaaagaagcagcgattcctcagtaaacacatctctcaccgcggaggtgctggagaaaatttggagaatacaatggcagcctttcagcatgcggttaaaatcggaactgatatgctagaattggactgccatatcacaaaagatgaacaagttgtagtgtcacatgatgagaatctaaagagagcaactggggtcaatgtaaacatctctgatctcaaatactgtgagctcccaccttaccttggcaaactggatgtctcatttcaaagagcatgccagtgtgaaggaaaagataaccgaattccattactgaaggaagtttttgaggcctttcctaacactcccattaacatcgatatcaaagtcaacaacaatgtgctgattaagaaggtttcagagttggtgaagcggtataatcgagaacacttaacagtgtggggtaatgccaattatgaaattgtagaaaagtgctacaaagagaattcagatattcctatactcttcagtctacaacgtgtcctgctcattcttggccttttcttcactggcctcttgccctttgtgcccattcgagaacagttttttgaaatcccaatgccttctattatactgaagctaaaagaaccacacaccatgtccagaagtcaaaagtttctcatctggctttctgatctcttactaatgaggaaagctttgtttgaaccactgcacccggccagtaaaagaaattttgaaggccattgcagctatttggtagtgtcttgttatttctaggtgtaccttagttaaagaggaaaaataaaacggaaaaaagcttggaaatcagtgatgtgtagttatttggcaagttatacataatcagcagcagccaggctcaagaaaataaaagttgattagttgatcagaaataaaatctgtagagtgaattagatttctgagttgttgttgttaatggaacattctatttgagacctttttcaggtgtgtagcaattctaccatgtccatttttttaagcattaaaaaggaacttaccagttgtaaattaagacaagatccaaatagtcatatttttgtgtttcctctaaaaaaatgtaagatttccatttttggcactgactaactgagcctacatctagattttaaataccatcttgaatcctaataattaaactgatgaaagtgcatatcattgttcctaacatttatgaacccccataaagatgttcctgatctttaaaactcattaatctgagtattaagtagaaacagaattttccaaagcattagacatcactttctcagtttatctgaggtgacttcgtgtacatctgtttctaatatatttgactaattttcatgatctcagattgtgaggtaaatgtaatctggaataataagtgtcttttacctagattacatctctcatttggagtttggcaatgaaactgctatgaagaatgactgtactctcctatctgtccctggatgacataaatatcatttgctttgttgtttaaactgaaataaagttttccaagaacaaaaaaaaaaaaaa

SEQ ID NO: 4925 - DNA, 1171 bp, Homo sapiens
ccggcaccgacaagtgcgctgcaccagtggcaccggctgggggcgagccgacctcgagcagccgccgccgccgccgtcgttgctactgccgcagcggagttcagagggcccggaggtgggagacttcccacacggtgactgagatgtcgtccactgcggctttttaccttctctctacgctaggaggatacttggtgacctcattcttgttgcttaaatacccgaccttgctgcaccagagaaagaagcagcgattcctcagtaaacacatctctcaccgcggaggtgctggagaaaatttggagaatacaatggcagcctttcagcatgcggttaaaatcggaactgatatgctagaattggactgccatatcacaaaagatgaacaagttgtagtgtcacatgatgagaatctaaagagagcaactggggtcaatgtaaacatctctgatctcaaatactgtgagctcccaccttaccttggcaaactggatgtctcatttcaaagagcatgccagtgtgaaggaaaagataaccgaattccattactgaaggaagtttttgaggcctttcctaacactcccattaacatcgatatcaaagtcaacaacaatgtgctgattaagaaggtttcagagttggtgaagcggtataatcgagaacacttaacagtgtggggtaatgccaattatgaaattgtagaaaagtgctacaaagagaattcagatattcctatactcttcagtctacaacgtgtcctgctcattcttggccttttcttcactggcctcttgccctttgtgcccattcgagaacagttttttgaaatcccaatgccttctattatactgaagctaaaagaaccacacaccatgtccagaagtcaaaagtttctcatctggctttctgatctcttactaatgaggaaagctttgtttgaccacctaactgctcgaggcattcaagtaagtttctggaatgatgcattttggaagcagcatagctcaccagtttaacacaaatataaagggcaagaacttttaactgacttagtttggcccttgactctgatgctgctgctttactgatccacaaatgaggaccttaagctcttccttacacttagcaataaagcattggcatttctggaaaaaaaaaaaaaaaaaaaaaa

SEQ ID NO: 4926 - DNA, 3870 bp, Homo sapiens; identical to SEQ ID NO: 1866

SEQ ID NO: 4927 - DNA, 3993 bp, Homo sapiens; identical to SEQ ID NO: 599

SEQ ID NO: 4928 - DNA, 116 bp, Homo sapiens
caactacagccactactacaggaccatcgaggacctgcgggacaagattcttggtgccaccattgagaacgccaggattgtcctgcagatcaacaatgctcaactggctgcagatg

SEQ ID NO: 4929 - DNA, 72 bp, Homo sapiens; identical to SEQ ID NO: 858

SEQ ID NO: 4930 - DNA, 73 bp, Homo sapiens; identical to SEQ ID NO: 1428

SEQ ID NO: 4931 - DNA, 962 bp, Homo sapiens
tcaaggttaaacgacaaggacagacatggctcagcggatgacaacacagctgctgctccttctagtgtgggtggctgtagtaggggaggctcagacaaggattgcatgggccaggactgagcttctcaatgtctgcatgaacgccaagcaccacaaggaaaagccaggccccgaggacaagttgcatgagcagtgtcgaccctggaggaagaatgcctgctgttctaccaacaccagccaggaagcccataaggatgtttcctacctatatagattcaactggaaccactgtggagagatggcacctgcctgcaaacggcatttcatccaggacacctgcctctacgagtgctcccccaacttggggccctggatccagcaggtggatcagagctggcgcaaagagcgggtactgaacgtgcccctgtgcaaagaggactgtgagcaatggtgggaagattgtcgcacctcctacacctgcaagagcaactggcacaagggctggaactggacttcagggtttaacaagtgcgcagtgggagctgcctgccaacctttccatttctacttccccacacccactgttctgtgcaatgaaatctggactcactcctacaaggtcagcaactacagccgagggagtggccgctgcatccagatgtggttcgacccagcccagggcaaccccaatgaggaggtggcgaggttctatgctgcagccatgagtggggctgggccctgggcagcctggcctttcctgcttagcctggccctaatgctgctgtggctgctcagctgacctccttttaccttctgatacctggaaatccctgccctgttcagccccacagctcccaactatttggttcctgctccatggtcgggcctctgacagccactttgaataaaccagacaccgcacatgtgtcttgagaattatttggaaaaaaaaaaaaaaaaaa

SEQ ID NO: 4932 - DNA, 982 bp, Homo sapiens
cattccttggtgccactgaccacagctctttcttcagggacagacatggctcagcggatgacaacacagctgctgctccttctagtgtgggtggctgtagtaggggaggctcagacaaggattgcatgggccaggactgagcttctcaatgtctgcatgaacgccaagcaccacaaggaaaagccaggccccgaggacaagttgcatgagcagtgtcgaccctggaggaagaatgcctgctgttctaccaacaccagccaggaagcccataaggatgtttcctacctatatagattcaactggaaccactgtggagagatggcacctgcctgcaaacggcatttcatccaggacacctgcctctacgagtgctcccccaacttggggccctggatccagcaggtggatcagagctggcgcaaagagcgggtactgaacgtgcccctgtgcaaagaggactgtgagcaatggtgggaagattgtcgcacctcctacacctgcaagagcaactggcacaagggctggaactggacttcagggtttaacaagtgcgcagtgggagctgcctgccaacctttccatttctacttccccacacccactgttctgtgcaatgaaatctggactcactcctacaaggtcagcaactacagccgagggagtggccgctgcatccagatgtggttcgacccagcccagggcaaccccaatgaggaggtggcgaggttctatgctgcagccatgagtggggctgggccctgggcagcctggcctttcctgcttagcctggccctaatgctgctgtggctgctcagctgacctccttttaccttctgatacctggaaatccctgccctgttcagccccacagctcccaactatttggttcctgctccatggtcgggcctctgacagccactttgaataaaccagacaccgcacatgtgtcttgagaattatttggaaaaaaaaaaaaaaaaaa

SEQ ID NO: 4933 - DNA, 1147 bp, Homo sapiens
tggaggcctggctggtgctcacatacaataattaactgctgagtggccttcgcccaatcccaggctccactcctgggctccattcccactccctgcctgtctcctaggccactaaaccacagctgtcccctggaataaggcaagggggagtgtagagcagagcagaagcctgagccagacggagagccacctcctctcccagggacagacatggctcagcggatgacaacacagctgctgctccttctagtgtgggtggctgtagtaggggaggctcagacaaggattgcatgggccaggactgagcttctcaatgtctgcatgaacgccaagcaccacaaggaaaagccaggccccgaggacaagttgcatgagcagtgtcgaccctggaggaagaatgcctgctgttctaccaacaccagccaggaagcccataaggatgtttcctacctatatagattcaactggaaccactgtggagagatggcacctgcctgcaaacggcatttcatccaggacacctgcctctacgagtgctcccccaacttggggccctggatccagcaggtggatcagagctggcgcaaagagcgggtactgaacgtgcccctgtgcaaagaggactgtgagcaatggtgggaagattgtcgcacctcctacacctgcaagagcaactggcacaagggctggaactggacttcagggtttaacaagtgcgcagtgggagctgcctgccaacctttccatttctacttccccacacccactgttctgtgcaatgaaatctggactcactcctacaaggtcagcaactacagccgagggagtggccgctgcatccagatgtggttcgacccagcccagggcaaccccaatgaggaggtggcgaggttctatgctgcagccatgagtggggctgggccctgggcagcctggcctttcctgcttagcctggccctaatgctgctgtggctgctcagctgacctccttttaccttctgatacctggaaatccctgccctgttcagccccacagctcccaactatttggttcctgctccatggtcgggcctctgacagccactttgaataaaccagacaccgcacatgtgtcttgagaattatttggaaaaaaaaaaaaaaaaaa

SEQ ID NO: 4934 - DNA, 1213 bp, Homo sapiens
tggaggcctggctggtgctcacatacaataattaactgctgagtggccttcgcccaatcccaggctccactcctgggctccattcccactccctgcctgtctcctaggccactaaaccacagctgtcccctggaataaggcaagggggagtgtagagcagagcagaagcctgagccagacggagagccacctcctctcccaggaactgaacccaaaggatcacctggtattccctgagagtacagatttctccggcgtggccctcaagggacagacatggctcagcggatgacaacacagctgctgctccttctagtgtgggtggctgtagtaggggaggctcagacaaggattgcatgggccaggactgagcttctcaatgtctgcatgaacgccaagcaccacaaggaaaagccaggccccgaggacaagttgcatgagcagtgtcgaccctggaggaagaatgcctgctgttctaccaacaccagccaggaagcccataaggatgtttcctacctatatagattcaactggaaccactgtggagagatggcacctgcctgcaaacggcatttcatccaggacacctgcctctacgagtgctcccccaacttggggccctggatccagcaggtggatcagagctggcgcaaagagcgggtactgaacgtgcccctgtgcaaagaggactgtgagcaatggtgggaagattgtcgcacctcctacacctgcaagagcaactggcacaagggctggaactggacttcagggtttaacaagtgcgcagtgggagctgcctgccaacctttccatttctacttccccacacccactgttctgtgcaatgaaatctggactcactcctacaaggtcagcaactacagccgagggagtggccgctgcatccagatgtggttcgacccagcccagggcaaccccaatgaggaggtggcgaggttctatgctgcagccatgagtggggctgggccctgggcagcctggcctttcctgcttagcctggccctaatgctgctgtggctgctcagctgacctccttttaccttctgatacctggaaatccctgccctgttcagccccacagctcccaactatttggttcctgctccatggtcgggcctctgacagccactttgaataaaccagacaccgcacatgtgtcttgagaattatttggaaaaaaaaaaaaaaaaaa

SEQ ID NO: 4935 - DNA, 11361 bp, Homo sapiens
gcggacgctgctctgcctgcatccggaggcggccgccagcggatttgccacccaggtcctaagactctcagtccagagagggccctgccccacacccagaaggaaggaatgctgcccagagatgaccagaggaatctagacagagcataaccttcggtggcaggacaaatcaggccagcacgcagtctgccaagtcctgctcgctccctgtcaagaaaaacagctggatccatttctaatcaacacttcccaacgcaacacttctgagtctctgaaggagaccagagcttgaaactttccagacttccaacagacatcgagtgcaaaaggatatttaggttgtctttgcacaaatctggttgatttgagagataaagggggggggaaccagtgtgactttcacctaagaagtcacatgaacatatttcacatttgaactacataatgaatgatggttattgaaatagcccaaacctctaccacagagcgagggatatagctcaaggggcaaccaggcagtcgcagaaccaaggaatggatgactacaagtatcaggacaattatgggggctatgctcccagtgatggctattaccgcggcaatgagtccaacccagaagaagatgcacagagtgatgtcaccgaaggccatgatgaggaagacgagatctatgagggcgagtaccagggtatccctcacccagatgatgtcaaggccaagcaggccaagatggcgccctccagaatggacagccttcggggccagacagacctgatggctgagaggctggaagatgaggagcagttggcccaccagtacgagaccatcatggatgagtgtggccatggccgcttccagtggatcctctttttcgtcttgggtttggccctgatggccgatggggtggaagtgttcgtggtgagttttgccctgcccagtgcagagaaggacatgtgtctgtccagttccaaaaaaggaatgctagggatgatagtctacttgggaatgatggcgggcgccttcatcctgggaggcctggctgataagctgggaaggaagcgagtcctcagcatgtctctggccgtcaatgcctccttcgcctccctctcttccttcgtgcagggatatggagccttcctcttctgccgactcatctcaggcatcggtattgggggtgctctaccgattgtttttgcctatttttctgaattcttgtctcgggagaagcgaggagaacacctcagttggctgggcatcttctggatgactgggggcctgtacgcatctgccatggcctggagcatcatcccacactatggctggggcttcagcatggggaccaattaccacttccatagctggagagtgtttgtcatcgtctgtgctctgccctgcaccgtgtccatggtggccctgaagttcatgccagagagcccaaggtttctgctagagatgggcaaacatgatgaagcctggatgattctcaagcaagtccatgacaccaacatgagagctaaggggaccccagagaaagtgttcacggtttccaacatcaaaactcccaagcaaatggatgaattcattgagatccaaagttcaacaggaacctggtaccagcgctggctggtcagattcaagaccattttcaagcaggtctgggataatgccctgtactgtgtgatggggccctacagaatgaatacactgattctggccgtggtttggtttgccatggcattcagttactatggactgacagtttggtttcctgatatgatccgctattttcaagatgaagaatacaagtctaaaatgaaggtgttttttggtgagcatgtgtacggcgccacaatcaacttcacgatggaaaatcagatccaccaacatgggaaacttgtgaatgataagttcacaagaatgtactttaaacatgtactctttgaggacacattctttgacgagtgctattttgaagacgtaacatcaacagatacctacttcaaaaattgtaccattgaatcaaccatcttttacaacacagacctctacgagcacaagttcatcaactgtcggtttatcaactccaccttcctggagcagaaggagggctgccacatggacttggagcaagataatgacttcctgatttacctcgtcagcttcctgggcagcctgtctgtcttacccgggaacatcatttctgccctgctcatggatagaattggaaggctcaagatgattggtggctccatgctaatctctgcagtctgctgcttcttcctgttttttggcaacagtgagtctgcaatgatcggctggcagtgcctgttctgtgggacaagcattgcagcctggaatgctctggatgtgatcacagtggagctgtatcccaccaaccagagagcaacagccttcggcattctcaatggattatgcaaatttggcgccatcctgggaaacaccatctttgcttcttttgttgggataaccaaagtggtccccatccttctggctgctgcttctctggttgggggtggcctgattgcccttcgactgccagagactcgagaacaggtcctgatgtgaacaacctatgggaaaaggaaaggtcgagagaatcttgtccaggacactgaaatgcatccacacttcctgcctatcacggtccggaggacaccttggatagcacgggaggagaagttgactttgtgacccctagtttaggacccacttcagctgtcaatatgtttgtaactcaggtgactgatttgggggtgccctgagccacccttagaatcacagagctgcgtgtttaacttcaagtcttcccagtccaaggcagggagaggattctccagtgagtgcacacactatgcgaggagcaagcatttctctaagtcaagtgcaaggacttaacttgcgtttgaaaaggaattagagggtcagaaacacccaggttcctccagaaagctccttggagcccaacaacttaacaaatcaacttggctggaagttagagtcattatatgaagattgggcttgaagtatatatttttgcatttaaaagtatcacctatcatattttccactcgaaaattgacatagtagcattgaggatactctgatctagaaagccaagtatttgagcaacatctatagagatctacttttctcctatgtctcctaggctttccatgataattaggtaatacatttaagaaggatatttatttctgttttgctctattcaaagaaacggaatgggatagttattctgtaaactaagtttgtatataactttatttgggtttaatttccacaactggtatctgcaaatattgccagcattttagccatattttgggagaacttggtgtttgaggtcccaggaaatgaggtctgatcaaatgaaatgcaagcacaatttcttacagccatttaactttctgttgggaggatgaattaacaaactcacattgtgcagtctgcttaatccaggcacttttctttgtgcaggtgtagtgagtagttacttctctcccttacacagatgacttgtgaaactcaagctcaccatcttcagtgctggcattttactttgccactacccaaaaacaatgtgagatgtgttcagtggcctctggtactctttgcaggcaagaatcaaacaacatggggactgagggaaggatggggaagtgtagccacagttcttccaaatgtaaatactttttgtttgttctagtggtaaaatgcaaatgcaatccatatttgttaggatggtcaggtctcatgagaaatctatgctatgtgtccagagcttttgaaacagagtccattggagtgggagttagggagtgtagtggatgccaaatatgtttttcttcagtgcttaagagaactgtttcctgaagtccagctttgaacataaacaggggtgtgggttgggggaggagcttaggacaaacctctctgatgaaggtcagcaatagactgaagtcttgactgcatggaagaggaaaaacatcagaactgtctgacaatggaggggacagtgagctacgcacaactgccagcggaggtgaacttgcacctgcccaggccggatgaacatcagcctgcaagaactagttgtttgagttgatttgcagtgctctcaatgggcaagtgccacattttccctggcagagatctccaaaaatttaaaacagaataataatggctatatcgagtgttttctcagtattggagaaatgcttaggtcctatgatagcttcgggacatctttctgtaattttcctcaattaacgggttggtaggggtaaatcttatgacacctttccaccgtcgatttgagatcagttttaatggttaaaatgtttactctccttctgtcaaccctcacctttttatttacacccctccctttttttctgtacagggagagaagacatattgactctgactggacaccctgattcctccaaatatatataccactgtgtattaatctttctctcagtgttttataggagtactaacatttattgctctgtcaataatgaaaggctcgatgtaatatagctgtaatttactttccatatgaatacagtggctaggttcataaaagagaattgtgtgagtctgggattaccacatctaaaacattattctttaatgggataatacaattcattgagcagctaccacttaaaaaacttgcaggacagttagagcctgcatttctagttaagatggatcttgtaaatttaaaattggattaacattggagtgctggggtggctgcaataatttgggggctaactccatttggtttccaagatctcacttctgcattatctttatggctctttaaaccagccacctagccaatcaagggcaattcccatctcatccatcactcaggtctttgtaaagggtgcagccaagctctgcagacttttgcaggattgtctagcctgagtaccgggctacttcttaaatgccgtcactcctgctgagataaatgcgtctttaaaaatagtctctgtggcaggtcactgggggacaatgtacagcattctggccatccacttctttttcacttcatgttctaccccaagagactcccgatgtcggctgtggagggttaaagggatgaggctttcctttgtttagcaaatctgttcacagttcttgatgatgtattttatgatgcccagcttggaaatagttgctttccatagtctcaactgtattgtgtcatctcctgatgctgatttttgatcttttgttttattaaaaataattagtgaaagaggtgtgcctatctgtgaagtttgtagtacatcatcctgaggtcatgtaacaagtaaaccccaacccagcgttccctcctacgttgtgttagttcattaaaactaaataataaaaataactgtaagaaaaccttaaggactggggttagagattattttcaggcactaaggtctcttctgtattccaaaattgattgaatcagctgggagaaacattgagaatcgcttccttcaacttttattttgcaacatggggaccttgagaggttaaacgatgtggcccagattacatgtaatgtgaggagtgggcgagaaggcctaaggtgatgctctcatgacagttctggggaagcctgcagtttggggaatgggacaatgtgacaaatactcgccattccctgagaccattcattgactattcccttgatggctttactataatgagaggaagcatcagtttaaacataaaaagattagtatttatccatccatttattcattcagcaaatccttattgagccctgaccatgggccagtctctctgccaagccctggggacacagtgatgaaaaaactggccacagtttctgcttcctgcctcattccacttgcagtgagcggatattaaattggccataaacaccgagtacgatgaccttacaatccgcaaactgcacctttcatgtgtaaaaggattgctactactttacttgtcagctgtggatttccaaatgtggtggctccctcttatttttttttctttgaggagtgtaccaattttttatctttataaaccaggtaagggaaatgatgcccttgcccattttctacagacctaatcgatttttacctaatcagttttacagaaagggttacatggaagaagagataggggccaggaatgcaagagggacattggtgagtggggtaagaatccccgtagccctgggaaaggtgtctccacttccacatctggcttttctagggggcatctgtgctaactgacctgggattatgttggatggcatatgactgcaaattcaaagaaaccaatttataataagtttatagtaagttaaaggtttgttttactctcatgtgaagggaatctggaggaaggaaagccagggctggagtggctgcctttgatcatgggagcacactccttctgcccgatcattgggagcacactccttctgcctgatcgttgggagcacactcctgcctgatcatgggcgcacgttccttctgcctgatcgttgggagcacactccttctgcctgatcatgggagcacactccttctgcctgatcattgggagcacgctccttctgcctgatcgttgggagcacactctttctgcctgatcgttgggagcacaccccttctgcctgatcattgggagcacactccttctgcctgatcatgggcacacgctccttctgcccgatcatgggcacacgctccttctgcccgatcgttgggagcacactccttctgcccaatcattgggctcacgctccttctgcccgatcgctgggctcacgctccttctgcccgatcttgggcgcacgctccttctgcccgatcgttgggcgcacgctccttctgcccgatcgttgggcgcatgctccttctgcccgatcgttgggagcacgctcattctgcccgattgttgggagcacgctccttctgcccgatcgttgggcgcacgctccttctgcccgatcgttgggcgcacgcttcttctgcctgatcgttgggcgcacgctccttctgcctgatcgttgggcgcacgctccttctgcctgatcgttgggagcacgctccttctgcctgattgttggaagcacgctccttctgccttcagactccttgatttttagtgcagtttccatcactgaggctgcctcatgggctgagatggctgttgaagcactgaacctcacatccacaattcaggcaggaagcagaaggaagggcaatgggcaaaggggctgtgccttgcagccgatccagcctccctttgctgcagaggaggcagggaaatgcggtatttactgggaacattgctgcccctcctccaaattgagggtcttggctcgaaggacaaaagccagaaaggataggtggattagtgcttcttaaacttttgcgtgcatcagaatcacccagaaagatgttaaaactcactcttcaaggccccatccccagagattcggattctggggatttggaatctggggtggggtctgaagaatctgcattttttaacaaactcccaggtgacatagatggcatcaattctcaagccatattttgagtagcactgacactcttccaataggtggtactttgacttgtcagggaagttctattgctctgataacttaaaaccaacccaaccagaagctcacaaaaactagcagcctgtgaaaaatgatcaccattttcctagagctccgagacaactagtggtagtgcaacagtaacccaaaaatgtcaatgaaaatatttccttccccagaaactgcttggtttcactcaggtcctgtccttatgggcctgtgtctggttgcagggcttgaagtatttcggaagctcagcagaggttgaaccctttcccctgggggttggtgatctttgttttggccatttccacctggtgaagattttcatagacaaatatgcttgtggcatcctgtaattcattgtgccttatgatggacctctgattctataagcttccccctagctagggatgcacgggggtgatcaagacatgactagatgtgaacctgacctgcagacagtccacctgaacgtgcctggaaatgtctcccgaaaaggatgaaaagcctcctcctttagacaaggaagacagagtggagcaaatttctctacatagatctcattcgaaaacaaatttacagaatgcagaatggctactgtgtgtcttgtgctatgctaggtctctctctctctaagtggactctgaccctgtccaaaacattgtgcttttgcatgtagctgtgtcgcatttaggcccagctctaagaaccgtttggaaataaatcacatagagcctttgattgtgaggcaggcttaaagtacattttgtttgatttgcagaggcatggtgaggaatttatatgcatggctgttgtggcagcagcgagatttccaaaaagatgaatgatgaaatgaaacagactgaagctatctcacaaatgttaaatggagaaataaaagttgttatagtcattgctaattacagaatgagcaagagatttatttagcaggaccatactatgccccctggaaggttcagtttatgagctggagcacaaggatttactgtcatttcacctgaaaacacacatttagctgtccatttacctttaatcctacaggcttaaaatactttaaaatttcagagaccattaatatgtattcctttagaaagcaaaggtctttcagaagctgtcctctaccaaagttaatgtggtcaccacatttgatgattttgctaggtagggaggtttatttaatcacagctactgtcactcaggaggatgagccatttaaaaatggtggccctgtcctccacttcttacctaccatatataatctcagtaattcagatttctctaaatcagcattagtgatcatttcaatagggtatgaacaaaaggcctataaaaatagctttccaattcgccaccaaaaatgcaaaaatgacaagtaagtgaggtaacgcatgagctaaatagcttgatttagtcactctaaaatgtgggtgtgtatatatacatacatatatatacacacacacattatgttatacaccataaatatatagaagttttacttgtcaattaaaactataaataaagtggctttccagaaaaattagatattggactctatcacaaaggaattgcataaaaatacttacaaacataactataagcaattgatgagcaaattacaaatgactgttttttattaaaacattcctccaaaagaacggcaaagcaaatcccatagacacccaaaatactaaaagtgacaaaacaatacttctttaaaaatgtattttatgatctatttattgatattctaatggttttaagaaggataattttccaaaacctaaatgctacacattttacagtggcaatatcaaccttatcatgagctaaagatttgcaatcagaacattggtagagtgcattgctgagttataacaagtgtctcaggacgaggatatttggtaggtatccttaaatatatagatgcttaccagtaggtttaatagaagatttctgaaaggtagcgcaagtttttatttcattatttttatttttatttttttgagacagagtctcactctgtcatctaggctggagtgcagtggtgcaatcttggcttgctgcaatctccacctcccaggttcaagcgattctcccacctcagcctcccgagtagctgggattacaggcatgcgccaccatgcctggctaatttttgtatttttagtagagacggggtttcgccatgttggccaggctcgtctcgaactcctggcctcaagtgatctgcccgcctcagcctcccaaagtgctgggattacaaatgtgagctactatgcctggtcccaacttcttaaaattaaattttggggaagttcatggagatatttttgacatgtaaaagtagaaaacaaaccatccatagtgtgtgcatatatacacacaaggtttggtttaatatacttgctgtgcactagtcagttttgattcaggttacataagggataaaatatagaaagacattttaaagtttgaaatatgtgctaagtagttagagatttggcagttttgccacatttcaaatgggccaaacattaaaataacttatccatgaatttcaggtttcaaggaaggaggaatatctgactatttttttttgtgtgtgagatttggtctcagctttttggtccatctgaatcctggaagtccccaactctaccagaccaaaagggtgtctctattttttgttgttacttctctgttcttgatgtaatgagttaagtagatgaaagagattaaggtgcagggaagggctcttaaaagtttaatgtttcagctttccatagtcattcatacttgtgaatcttcttcctcttctacttcaaagtagccaaaacttggaaagttcaaattaatctttgggctccaaagagcaattctgaaggattaacaggtttcattctctccagtgggaggtggcctagacaggtgccggttttggggagaggtgagagtacccagatgtgggtgactatttcctgttcttccctgaaagtcaggccagtggtctcgaatcattcccacagcaactgctacaaaagtgactatcttaatcctttggctagatgggatacctcttctaccttttcagaggtgagctgttgagtagtaatgtccgctacaacaccacgctcccggaatggtggttcctaagagcaaagtcagttaatacaatttctccaggtatccagctatctccaggtgtgcggtcctgtgaagcactctaagaactgtaaaaaatatttcataggtatagaaggcatttgtaatactgttggttcaaatgtgctgacatgtagccagtggaggaagatgtttctttggaagcctgccatctttctgtaacgcaccttcaacctgagataattaagagtcattacgtttcccagtcccatgtcacattgaccagtcctgtggtcctatggctaagcggaggacacggccacaagctgtgagtcatgaaaaggagggtgcaggtgataggcaaagggacccattagccagtttacaatgactggcaactgaccagatagagcttaccgtatgtccatgtagagttgctcatattagtctgtaaataattctatgcatagtgaatgcagcttctgaattattaaactgatgctataaatgtgaactgacaaaacccaaaaaaaaaaaaaaaaaaa

SEQ ID NO: 4936 - DNA, 10788 bp, Homo sapiens; identical to SEQ ID NO: 627

SEQ ID NO: 4937 - DNA, 2267 bp, Homo sapiens; identical to SEQ ID NO: 630

SEQ ID NO: 4938 - DNA, 3651 bp, Homo sapiens; identical to SEQ ID NO: 1712

SEQ ID NO: 4939 - DNA, 2000 bp, Homo sapiens; identical to SEQ ID NO: 1560

SEQ ID NO: 4940 - DNA, 2512 bp, Homo sapiens; identical to SEQ ID NO: 733

SEQ ID NO: 4941 - DNA, 2570 bp, Homo sapiens
acgtctggtgtgggcgggagtgagccaaagtgtgctaaaggaaaccaacagcggcctaggggtgaaaggacagccagggttagatgttctgaggaggcgggagcaaccgagagagcacgtgagcatctgtcctttctacccgttcctctttatctttagtgttcagtagcagcggggatagcccggggcccggtgtatggccacggagttacagtgtccggactccatgccctgtcacaaccagcaagtaaactctgcctcaaccccaagtcccgagcagctgcgacctggcgatctgatcctggaccacgcagggggaaacagagcctccagggccaaggtgattctcctcacggggtacgcccattctagcctgccggccgagctggactctggggcctgcggcggctccagcctcaactcagagggcaacagtggtagtggtgacagtagcagctatgacgcaccagctggcaactccttcctagaggactgcgaactctcccggcagatcggggcgcagcttaagctgctgcctatgaatgatcagatacgggagctacagaccatcatccgtgacaagacagccagtagaggtgacttcatgttttctgcggatcgtttggttttgcctgaggatttattccaaaagagcatagacaactcctgttctgcttttcatcatcagacttgttgtggaagagggattgaatcagctgccatataaagaatgcatggtgaccactccaacagggtacaagtatgaaggagtgaaatttgagaagggaaattgtggggtcagcataatgagaagcggtgaggcaatggaacaaggtttacgagactgctgtcgatccatacgaattggaaagatcctgattcagagtgatgaggagacacaaagagccaaagtatattatgccaaattccccccagacatttaccggagaaaagtccttctgatgtatccaattctcagcactggaaatactgtaattgaagctgtaaaggttcttatagaacatggagttcaacccagtgttatcatcctactcagtctgttctccactcctcatggtgccaaatcaatcattcaggagtttccagagatcacaattttaactactgaagttcatcctgttgcacctacacattttggacagaaatactttggaacagactaagttatttaagtaaaataattatcttatgtaatattacaatcatgttttgattttctatttgttttactgattcacttgagggtggcagagaaaaatgtgttaaaatgctttttagttttggaagtgggtatatttgaggttatatctcatttagttatttgtttactgttggcaccgaattcaacaatgaagtatatgcaactcttacaaaacataaattttaataatattctaatgcaaattactgaaccctcagtgcattaaaattatttcctaatttatgagcctcttagtttggaggttgcttgaagccacaaataaaactcaaatgagagtcagttctttgtcccactgtagtttgcattttgtttagtttggttttagctctactaaggtttcacatatgtggctattgccacattcctctactgttttctttctgatactggacatgctagtaacttggagaggagaataaaagaatgtctcctggaattttacattcccattaatgtcctcattcagttggcagacctaggatgtatggttaactctcaggccattatgtttttcatggctcatttcccaaactgcattgttggtaggtgccttgctaagctgtaatgcagtgaagaagatggtggggcatttttagtaattggaactgtaacattaatttacaagattgaaccggggatgtctggatgctgacaagggagagccaagtactgttaatgccatcaatcctctaggaaggaattggtggtttttctgaagtgtgggggaaagggtggtttcttgctggatttcatggccagtaagtaaatttaaatgcttcatttttaatttggatgtttctgctagagacctttgatttggaaattagttattttgcatgtttgtcaactgtatatgtatgaaaatagaaaaaaaccatgctttttgtaaaaacccctaagatttgtatatgttcatctttaggcttctgaaagggagagaaatcatattggaaatcagtgttggtgttctgaaatctgcttgtaaaactctcatctcattttacattgatattaaaacattttaacagtgttggctagctgattacttgattaattatactcccatggccccataggaagctgttgtgggcctctgttcaaaagcacagaaaagagcagaaggaaatgtcttagaaagaatcaaagctgatgaaatcagcaaagattgggggaaaggaaggaagcctggtgtagattggattatatttttcctttggggactagaatactagaagaacttcagtatatttttccctttatttttgaatactgtcatataataaattgagattaataaattactcatattacagttcttccatggcaa

SEQ ID NO: 4942 - DNA, 1588 bp, Homo sapiens; identical to SEQ ID NO: 144

SEQ ID NO: 4943 - DNA, 15584 bp, Homo sapiens; identical to SEQ ID NO: 1799

SEQ ID NO: 4944 - DNA, 1711 bp, Homo sapiens; identical to SEQ ID NO: 1587

SEQ ID NO: 4945 - DNA, 4767 bp, Homo sapiens
tcacttctctccccacgccttcccctggttcaccccccttccttcccctttctccccctcggttaagtccctccccctcgccattcaaaagggctggctcggcactggctccttgcagtcggcgaactgtcggggcgggaggagccgtgagcagtagctgcactcagctgcccgcgcggcaaagaggaaggcaagccaaacagagtgcgcagagtggcagtgccagcggcgacacaggcagcacaggcagcccgggctgcctgaatagcctcagaaacaacctcagcgactccggctgctctgcggactgcgagctgtggcggtagagcccgctacagcagtcgcagtctccgtggagcgggcggaagccttttttctccctttcgtttacctcttcattctactctaaaggcatcgttattaggaaaatcctgttgcgaataagaaggattccacagatcacataccggagaggttttgcctcagctgctctcaactttgtaatcttgtgaagaagctgacaagcttggctgattgcagagcactatgaggactgaacgacagtgggttttaattcagatatttcaagtgttgtgcgggttaatacaacaaactgtaacaagtgtacctggtatggacttgttgtccgggacgtacattttcgcggtcctgctagcatgcgtggtgttccactctggcgcccaggagaaaaactacaccatccgagaagaaatgccagaaaacgtcctgataggcgacttgttgaaagaccttaacttgtcgctgattccaaacaagtccttgacaactgctatgcagttcaagctagtgtacaagaccggagatgtgccactgattcgaattgaagaggatactggtgagatcttcactactggcgctcgcattgatcgtgagaaattatgtgctggtatcccaagggatgagcattgcttttatgaagtggaggttgccattttgccggatgaaatatttagactggttaagatacgttttctgatagaagatataaatgataatgcaccattgttcccagcaacagttatcaacatatcaattccagagaactcggctataaactctaaatatactctcccagcggctgttgatcctgacgtaggaataaacggagttcaaaactacgaactaattaagagtcaaaacatttttggcctcgatgtcattgaaacaccagaaggagacaagatgccacaactgattgttcaaaaggagttagatagggaagagaaggatacctacgtgatgaaagtaaaggttgaagatggtggctttcctcaaagatccagtactgctattttgcaagtgagtgttactgatacaaatgacaaccacccagtctttaaggagacagagattgaagtcagtataccagaaaatgctcctgtaggcacttcagtgacacagctccatgccacagatgctgacataggtgaaaatgccaagatccacttctctttcagcaatctagtctccaacattgccaggagattatttcacctcaatgccaccactggacttatcacaatcaaagaaccactggatagggaagaaacaccaaaccacaagttactggttttggcaagtgatggtggattgatgccagcaagagcaatggtgctggtaaatgttacagatgtcaatgataatgtcccatccattgacataagatacatcgtcaatcctgtcaatgacacagttgttctttcagaaaatattccactcaacaccaaaattgctctcataactgtgacggataaggatgcggaccataatggcagggtgacatgcttcacagatcatgaaatccctttcagattaaggccagtattcagtaatcagttcctcctggagactgcagcatatcttgactatgagtccacaaaagaatatgccattaaattactggctgcagatgctggcaaacctcctttgaatcagtcagcaatgctcttcatcaaagtgaaagatgaaaatgacaatgctccagttttcacccagtctttcgtaactgtttctattcctgagaataactctcctggcatccagttgacgaaagtaagtgcaatggatgcagacagtgggcctaatgctaagatcaattacctgctaggccctgatgctccacctgaattcagcctggattgtcgtacaggcatgctgactgtagtgaagaaactagatagagaaaaagaggataaatatttattcacaattctggcaaaagataacggggtaccacccttaaccagcaatgtcacagtctttgtaagcattattgatcagaatgacaatagcccagttttcactcacaatgaatacaacttctatgtcccagaaaaccttccaaggcatggtacagtaggactaatcactgtaactgatcctgattatggagacaattctgcagttacgctctccattttagatgagaatgatgacttcaccattgattcacaaactggtgtcatccgaccaaatatttcatttgatagagaaaaacaagaatcttacactttctatgtaaaggctgaggatggtggtagagtatcacgttcttcaagtgccaaagtaaccataaatgtggttgatgtcaatgacaacaaaccagttttcattgtccctccttccaactgttcttatgaattggttctaccgtccactaatccaggcacagtggtctttcaggtaattgctgttgacaatgacactggcatgaatgcagaggttcgttacagcattgtaggaggaaacacaagagatctgtttgcaatcgaccaagaaacaggcaacataacattgatggagaaatgtgatgttacagaccttggtttacacagagtgttggtcaaagctaatgacttaggacagcctgattctctcttcagtgttgtaattgtcaatctgttcgtgaatgagtcggtgaccaatgctacactgattaatgaactggtgcgcaaaagcactgaagcaccagtgaccccaaatactgagatagctgatgtatcctcaccaactagtgactatgtcaagatcctggttgcagctgttgctggcaccataactgtcgttgtagttattttcatcactgctgtagtaagatgtcgccaggcaccacaccttaaggctgctcagaaaaacaagcagaattctgaatgggctaccccaaacccagaaaacaggcagatgataatgatgaagaaaaagaaaaagaagaagaagcattcccctaagaacttgctgcttaattttgtcactattgaagaaactaaggcagatgatgttgacagtgatggaaacagagtcacactagaccttcctattgatctagaagagcaaacaatgggaaagtacaattgggtaactacacctactactttcaagcccgacagccctgatttggcccgacactacaaatctgcctctccacagcctgccttccaaattcagcctgaaactcccctgaattcgaagcaccacatcatccaagaactgcctctcgataacacctttgtggcctgtgactctatctccaagtgttcctcaagcagttcagatccctacagcgtttctgactgtggctatccagtgacgaccttcgaggtacctgtgtccgtacacaccagaccgactgattccaggacatcaactattgaaatctgcagtgagatataactttctaggaacaacaaaattccattccccttccaaaaaatttcaatgattgtgatttcaaaattaggctaagatcattaattttgtaatctagatttcccattataaaagcaagcaaaaatcatcttaaaaatgatgtcctagtgaaccttgtgctttctttagctgtaatctggcaatggaaatttaaaatttatggaagagacagtgcagcacaataacagagtactctcatgctgtttctctgtttgctctgaatcaacagccatgatgtaatataaggctgtcttggtgtatacacttatggttaatatatcagtcatgaaacatgcaattacttgccctgtctgattgttgaataattaaaacattatctccaggagtttggaagtgagctgaactagccaaactactctctgaaaggtatccagggcaagagacatttttaagaccccaaacaaacaaaaaacaaaaccaaaacactctggttcagtgttttgaaaatattcactaacataatattgctgagaaaatcatttttattacccaccactctgcttaaaagttgagtgggccgggcgcggtggctcacgcctgtaatcccagcactttgggaggccgaggcgggtggatcacgaggtcaggagattgagaccatcctggctaacacggtgaaaccccatctccactaaaaatacaaaaaattagcctggcgtggtggcgggcgcctgtagtcccagctactcgggaggctgaggcaggagaatagcgtgaacccgggaggcggagcttgcagtgagccgagatggcgccactgcactccagcctgggtgacagagcaagactctgtctcaaaaagaaaaaaatgttcaatgatagaaaataattttactaggtttttatgttgattgtactcatgctgttccactccttttaattattaaaaagttatttttggctgggtgtggtggctcacacctgtaatcccagcactttgggaggccgaggtgggtggatcacctgaggtcaggagttcaagaccagtctggccaacat

SEQ ID NO: 4946 - DNA, 9190 bp, Homo sapiens
ctggtggtccagtacctccaaagatatggaatacactcctgaaatatcctgaaaacttttttttttcagaatcctttaataagcagttatgtcaatctgaaagttgcttacttgtactttatattaatagctattcttgtttttcttatccaaagaaaaatcctctaatccccttttcacatgatagttgttaccatgtttaggcattagtcacatcaacccctctcctctcccaaacttctcttcttcaaatcaaactttattagtccctcctttataatgattccttgcctcgttttatccagatcaattttttttcactttgatgcccagagctgaagaaatggactactgtataaattattcattgccaagagaataattgcattttaaacccatattataacaaagaataatgattatattttgtgatttgtaacaaataccctttattttcccttaactattgaattaaatattttaattatttgtattctctttaactatcttggtatattaaagtattatcttttatatatttatcaatggtggacacttttataggtactctgtgtcatttttgatactgtaggtatcttatttcatttatctttattcttaatgtacgaattcataatatttgattcagaacaaatttatcactaattaacagagtgtcaattatgctaacatctcatttactgattttaatttaaaacagtttttgttaacatgcatgtttagggttggcttcttaataatttcttcttcctcttctctctctcctcttcttttggtcagtgttgtgcgggttaatacaacaaactgtaacaagtgtacctggtatggacttgttgtccgggacgtacattttcgcggtcctgctagcatgcgtggtgttccactctggcgcccaggagaaaaactacaccatccgagaagaaatgccagaaaacgtcctgataggcgacttgttgaaagaccttaacttgtcgctgattccaaacaagtccttgacaactgctatgcagttcaagctagtgtacaagaccggagatgtgccactgattcgaattgaagaggatactggtgagatcttcactactggcgctcgcattgatcgtgagaaattatgtgctggtatcccaagggatgagcattgcttttatgaagtggaggttgccattttgccggatgaaatatttagactggttaagatacgttttctgatagaagatataaatgataatgcaccattgttcccagcaacagttatcaacatatcaattccagagaactcggctataaactctaaatatactctcccagcggctgttgatcctgacgtaggaataaacggagttcaaaactacgaactaattaagagtcaaaacatttttggcctcgatgtcattgaaacaccagaaggagacaagatgccacaactgattgttcaaaaggagttagatagggaagagaaggatacctacgtgatgaaagtaaaggttgaagatggtggctttcctcaaagatccagtactgctattttgcaagtgagtgttactgatacaaatgacaaccacccagtctttaaggagacagagattgaagtcagtataccagaaaatgctcctgtaggcacttcagtgacacagctccatgccacagatgctgacataggtgaaaatgccaagatccacttctctttcagcaatctagtctccaacattgccaggagattatttcacctcaatgccaccactggacttatcacaatcaaagaaccactggatagggaagaaacaccaaaccacaagttactggttttggcaagtgatggtggattgatgccagcaagagcaatggtgctggtaaatgttacagatgtcaatgataatgtcccatccattgacataagatacatcgtcaatcctgtcaatgacacagttgttctttcagaaaatattccactcaacaccaaaattgctctcataactgtgacggataaggatgcggaccataatggcagggtgacatgcttcacagatcatgaaatccctttcagattaaggccagtattcagtaatcagttcctcctggagactgcagcatatcttgactatgagtccacaaaagaatatgccattaaattactggctgcagatgctggcaaacctcctttgaatcagtcagcaatgctcttcatcaaagtgaaagatgaaaatgacaatgctccagttttcacccagtctttcgtaactgtttctattcctgagaataactctcctggcatccagttgacgaaagtaagtgcaatggatgcagacagtgggcctaatgctaagatcaattacctgctaggccctgatgctccacctgaattcagcctggattgtcgtacaggcatgctgactgtagtgaagaaactagatagagaaaaagaggataaatatttattcacaattctggcaaaagataacggggtaccacccttaaccagcaatgtcacagtctttgtaagcattattgatcagaatgacaatagcccagttttcactcacaatgaatacaacttctatgtcccagaaaaccttccaaggcatggtacagtaggactaatcactgtaactgatcctgattatggagacaattctgcagttacgctctccattttagatgagaatgatgacttcaccattgattcacaaactggtgtcatccgaccaaatatttcatttgatagagaaaaacaagaatcttacactttctatgtaaaggctgaggatggtggtagagtatcacgttcttcaagtgccaaagtaaccataaatgtggttgatgtcaatgacaacaaaccagttttcattgtccctccttccaactgttcttatgaattggttctaccgtccactaatccaggcacagtggtctttcaggtaattgctgttgacaatgacactggcatgaatgcagaggttcgttacagcattgtaggaggaaacacaagagatctgtttgcaatcgaccaagaaacaggcaacataacattgatggagaaatgtgatgttacagaccttggtttacacagagtgttggtcaaagctaatgacttaggacagcctgattctctcttcagtgttgtaattgtcaatctgttcgtgaatgagtcggtgaccaatgctacactgattaatgaactggtgcgcaaaagcactgaagcaccagtgaccccaaatactgagatagctgatgtatcctcaccaactagtgactatgtcaagatcctggttgcagctgttgctggcaccataactgtcgttgtagttattttcatcactgctgtagtaagatgtcgccaggcaccacaccttaaggctgctcagaaaaacaagcagaattctgaatgggctaccccaaacccagaaaacaggcagatgataatgatgaagaaaaagaaaaagaagaagaagcattcccctaagaacttgctgcttaattttgtcactattgaagaaactaaggcagatgatgttgacagtgatggaaacagagtcacactagaccttcctattgatctagaagagcaaacaatgggaaagtacaattgggtaactacacctactactttcaagcccgacagccctgatttggcccgacactacaaatctgcctctccacagcctgccttccaaattcagcctgaaactcccctgaattcgaagcaccacatcatccaagaactgcctctcgataacacctttgtggcctgtgactctatctccaagtgttcctcaagcagttcagatccctacagcgtttctgactgtggctatccagtgacgaccttcgaggtacctgtgtccgtacacaccagaccgccaatgaaggaggttgtgcgatcttgcacccccatgaaagagtctacaactatggagatctggattcatccccaaccacagcggaaatctgaagggaaagtggcaggaaagtcccagcggcgtgtcacatttcacctgccagaaggctctcaggaaagcagcagtgatggtggactgggagaccatgatgcaggcagccttaccagcacatctcatggcctgccccttggctatcctcaggaggagtactttgatcgtgctacacccagcaatcgcactgaaggggatggcaactccgatcctgaatctactttcatacctggactaaagaaagctgcagaaataactgttcaaccaactgtggaagaggcctctgacaactgcactcaagaatgtctcatctatggccattctgatgcctgctggatgccggcatctctggatcattccagctcttcgcaagcacaggcctctgctctatgccacagcccaccactgtcacaggcctctactcagcaccacagcccacgagtgacacagaccattgctctctgccacagccctccagtgacacagaccatcgcattgtgccacagcccaccaccgatacaggtgtctgctctccaccacagtcctcctctagtgcaggctactgcacttcaccacagcccaccatcagcacaggcctcagccctctgctacagccctcctttagcacaggctgctgcaatcagccacagctctcctctgccacaggttattgccctccatcgtagtcaggcccaatcatcagtcagtttgcagcaaggttgggtgcaaggtgctgatgggctatgctctgttgatcagggagtgcaaggtagtgcaacatctcagttttacaccatgtctgaaagacttcatcccagtgatgattcaattaaagtcattcctttgacaaccttcactccacgccaacaggccagaccgtccagaggtgattcccccattatggaagaacatcccttgtaaagctaaaatagttacttcaaattttcagaaaagatgtatatagtcaaaatttaagatacaattccaatgagtattctgattatcagatttgtaaataactatgtaaatagaaacagataccagaataaatctacagctagacccttagtcaatagttaaccaaaaaattgcaatttgtttaattcagaatgtgtatttaaaaagaaaaggaatttaacaatttgcatccccttgtacagtaaggcttatcatgacagagcgcactatttctgatgtacagtattttttgttgtttttatcatcatgtgcaatattactgatttgtttccatgctgattgtgtggaaccagtatgtagcaaatggaaagcctagaaatatcttattttctaagtttacctttagtttacctaaacttttgttcagataacgttaaaaggtatacgtactctagcctttttttgggctttctttttgatttttgtttgttgttttcagtttttttgttgttgttagtgagtctcccttcaaaatacgcagtaggtagtgtaaatactgcttgtttgtgtctctctgctgtcatgttttctaccttattccaatactatattgttgataaaatttgtatatacattttcaataaagaatatgtataaactgtacagatctagatctacaacctatttctctactctttagtagagttcgagacacagaagtgcaataactgccctaattaagcaactatttgttaaaaagggcctctttttactttaatagtttagtgtaaagtacatcagaaataaagctgtatctgccattttaagcctgtagtccattattacttgggtctttacttctgggaatttgtatgtaacagcctagaaaattaaaaggaggtggatgcatccaaagcacgagtcacttaaaatatcgacggtaaactactattttgtagagaaactcaggaagatttaaatgttgatttgacagctcaataggctgttaccaaagggtgttcagtaaaaataacaaatacatgtaactgtagataaaaccatatactaaatctataagactaagggatttttgttattctagctcaacttactgaagaaaaccactaataacaacaagaatatcaggaaggaacttttcaagaaatgtaattataaatctacatcaaacagaattttaaggaaaaatgcagagggagaaataaggcacatgactgcttcttgcagtcaacaagaaataccaataacacacacagaacaaaaaccatcaaaatctcatatatgaaataaaatatattcttctaagcaaagaaacagtactattcatagaaaacattagttttcttctgttgtctgttatttccttcttgtatcctcttaactggccattatcttgtatgtgcacattttataaatgtacagaaacatcaccaacttaattttcttccatagcaaaactgagaaaataccttgtttcagtataacactaaaccaagagacaattgatgtttaatgggggcggttggggtgggggggggagtcaatatctcctattgattaacttagacatagattttgtaatgtataacttgatatttaatttatgattaaactgtgtgtaaattttgtaacataaactgtggtaattgcataatttcattggtgaggatttccactgaatattgagaaagtttcttttcatgtgcccagcaggttaagtagcgttttcagaatatacattattcccatccattgtaaagttccttaagtcatatttgactgggcgtgcagaataacttcttaacttttaactatcagagtttgattaataaaattaattaatgttttttctccttcgtgttgttaatgttccaagggatttggagcatactggttttccaggtgcatgtgaatcccgaaggactgatgatatttgaatgtttattaaattattatcatacaaatgtgttgatattgtggctattgttgatgttgaaaattttaaacttggggaagattaagaaaagaaccaatagtgacaaaaatcagtgcttccagtagattttagaacattctttgcctcaaaaaacctgcaaagatgatgtgagattttttcttgtgttttaattattttcacattttctctctgcaaaactttagttttctgatgatctacacacacacacacacacacacgtgcacacacacacacatttaaatgatataaaaagaagaggttgaaagattattaaataacttatcaggcatctcaatggttactatctatgttagtgaaaatcaaataggactcaaagttggatatttgggatttttcttctgacagtataatttattgagttactagggaggttcttaaatcctcatatctggaaacttgtgacgttttgacacctttcctatagatgatataggaatgaaccaatacgcttttattaccctttctaactctgattttataatcagacttagattgtgtttagaatattaaatgactgggcaccctcttcttggtttttaccagagaggctttgaatggaagcaggctgagagtagccaaagaggcaaggggtattagcccagttattctcccctatgccttccttctctttctaagcgtccactaggtctggccttggaaacctgttacttctagggcttcagatctgatgatatctttttcatcacattacaagttatttctctgactgaatagacagtggtataggttgacacagcacacaagtggctattgtgatgtatgatgtatgtagtcctacaactgcaaaacgtcttactgaaccaacaatcaaaaaatggttctgttttaaaaaggattttgtttgatttgaaattaaaacttcaagctgaatgacttatatgagaataatacgttcaatcaaagtagttattctattttgtgtccatattccattagattgtgattattaattttctagctatggtattactatatcacacttgtgagtatgtattcaaatactaagtatcttatatgctacgtgcatacacattcttttcttaaactttacctgtgttttaactaatattgtgtcagtgtattaaaaattagcttttacatatgatatctacaatgtaataaatttagagagtaattttgtgtattcttatttacttaacattttacttttaattatgtaaatttggttagaaaataataataaatggttagtgctattgtgtaatggtagcagttacaaagagcctctgccttcccaaactaatatttatcacacatggtcattaaatgggaaaaaaatagactaaacaaatcacaaattgttcagttcttaaaatgtaattatgtcacacacacaaaaaatccttttcaatcctgagaaaattaaaggcgttttactcacatggctatttcaacattagttttttttgtttgtttctttttcatggtattactgaaggtgtgtatactccctaatacacatttatgaaaatctacttgtttaggcttttatttatactcttctgatttatattttttattataattattatttcttatctttcttcttttatattttttggaaaccaaatttatagttagtttaggtaaactttttattatgaccattagaaactattttgaatgcttccaactggctcaattggccgggaaaacatgggagcaagagaagctgaaatatatttctgcaagaacctttctatattatgtgccaattaccacaccagatcaattttatgcagaggccttaaaatattctttcacagtagctttcttacactaaccgtcatgtgcttttagtaaatatgatttttaaaagcagttcaagttgacaacagcagaaacagtaacaaaaaaatctgctcagaaaaatgtatgtgcacaaataaaaaaaattaatggcaattgtttagtgattgtaagtgatactttttaaagagtaaactgtgtgaaatttatactatccctgcttaaaatattaagatttttatgaaatatgtatttatgtttgtattgtgggaagattcctcctctgtgatatcatacagcatctgaaagtgaacagtatcccaaagcagttccaaccatgctttggaagtaagaaggttgactattgtatggccaaggatggcagtatgtaatccagaagcaaacttgtattaattgttctatttcaggttctgtattgcatgttttcttattaatatatattaataaaagttatgagaaataaaaaaaaaaaaaa

SEQ ID NO: 4947 - DNA, 9160 bp, Homo sapiens
ctggtggtccagtacctccaaagatatggaatacactcctgaaatatcctgaaaacttttttttttcagaatcctttaataagcagttatgtcaatctgaaagttgcttacttgtactttatattaatagctattcttgtttttcttatccaaagaaaaatcctctaatccccttttcacatgatagttgttaccatgtttaggcattagtcacatcaacccctctcctctcccaaacttctcttcttcaaatcaaactttattagtccctcctttataatgattccttgcctcgttttatccagatcaattttttttcactttgatgcccagagctgaagaaatggactactgtataaattattcattgccaagagaataattgcattttaaacccatattataacaaagaataatgattatattttgtgatttgtaacaaataccctttattttcccttaactattgaattaaatattttaattatttgtattctctttaactatcttggtatattaaagtattatcttttatatatttatcaatggtggacacttttataggtactctgtgtcatttttgatactgtaggtatcttatttcatttatctttattcttaatgtacgaattcataatatttgattcagaacaaatttatcactaattaacagagtgtcaattatgctaacatctcatttactgattttaatttaaaacagtttttgttaacatgcatgtttagggttggcttcttaataatttcttcttcctcttctctctctcctcttcttttggtcagtgttgtgcgggttaatacaacaaactgtaacaagtgtacctggtatggacttgttgtccgggacgtacattttcgcggtcctgctagcatgcgtggtgttccactctggcgcccaggagaaaaactacaccatccgagaagaaatgccagaaaacgtcctgataggcgacttgttgaaagaccttaacttgtcgctgattccaaacaagtccttgacaactgctatgcagttcaagctagtgtacaagaccggagatgtgccactgattcgaattgaagaggatactggtgagatcttcactactggcgctcgcattgatcgtgagaaattatgtgctggtatcccaagggatgagcattgcttttatgaagtggaggttgccattttgccggatgaaatatttagactggttaagatacgttttctgatagaagatataaatgataatgcaccattgttcccagcaacagttatcaacatatcaattccagagaactcggctataaactctaaatatactctcccagcggctgttgatcctgacgtaggaataaacggagttcaaaactacgaactaattaagagtcaaaacatttttggcctcgatgtcattgaaacaccagaaggagacaagatgccacaactgattgttcaaaaggagttagatagggaagagaaggatacctacgtgatgaaagtaaaggttgaagatggtggctttcctcaaagatccagtactgctattttgcaagtgagtgttactgatacaaatgacaaccacccagtctttaaggagacagagattgaagtcagtataccagaaaatgctcctgtaggcacttcagtgacacagctccatgccacagatgctgacataggtgaaaatgccaagatccacttctctttcagcaatctagtctccaacattgccaggagattatttcacctcaatgccaccactggacttatcacaatcaaagaaccactggatagggaagaaacaccaaaccacaagttactggttttggcaagtgatggtggattgatgccagcaagagcaatggtgctggtaaatgttacagatgtcaatgataatgtcccatccattgacataagatacatcgtcaatcctgtcaatgacacagttgttctttcagaaaatattccactcaacaccaaaattgctctcataactgtgacggataaggatgcggaccataatggcagggtgacatgcttcacagatcatgaaatccctttcagattaaggccagtattcagtaatcagttcctcctggagactgcagcatatcttgactatgagtccacaaaagaatatgccattaaattactggctgcagatgctggcaaacctcctttgaatcagtcagcaatgctcttcatcaaagtgaaagatgaaaatgacaatgctccagttttcacccagtctttcgtaactgtttctattcctgagaataactctcctggcatccagttgacgaaagtaagtgcaatggatgcagacagtgggcctaatgctaagatcaattacctgctaggccctgatgctccacctgaattcagcctggattgtcgtacaggcatgctgactgtagtgaagaaactagatagagaaaaagaggataaatatttattcacaattctggcaaaagataacggggtaccacccttaaccagcaatgtcacagtctttgtaagcattattgatcagaatgacaatagcccagttttcactcacaatgaatacaacttctatgtcccagaaaaccttccaaggcatggtacagtaggactaatcactgtaactgatcctgattatggagacaattctgcagttacgctctccattttagatgagaatgatgacttcaccattgattcacaaactggtgtcatccgaccaaatatttcatttgatagagaaaaacaagaatcttacactttctatgtaaaggctgaggatggtggtagagtatcacgttcttcaagtgccaaagtaaccataaatgtggttgatgtcaatgacaacaaaccagttttcattgtccctccttccaactgttcttatgaattggttctaccgtccactaatccaggcacagtggtctttcaggtaattgctgttgacaatgacactggcatgaatgcagaggttcgttacagcattgtaggaggaaacacaagagatctgtttgcaatcgaccaagaaacaggcaacataacattgatggagaaatgtgatgttacagaccttggtttacacagagtgttggtcaaagctaatgacttaggacagcctgattctctcttcagtgttgtaattgtcaatctgttcgtgaatgagtcggtgaccaatgctacactgattaatgaactggtgcgcaaaagcactgaagcaccagtgaccccaaatactgagatagctgatgtatcctcaccaactagtgactatgtcaagatcctggttgcagctgttgctggcaccataactgtcgttgtagttattttcatcactgctgtagtaagatgtcgccaggcaccacaccttaaggctgctcagaaaaacaagcagaattctgaatgggctaccccaaacccagaaaacaggcagatgataatgatgaagaaaaagaaaaagaagaagaagcattcccctaagaacttgctgcttaattttgtcactattgaagaaactaaggcagatgatgttgacagtgatggaaacagagtcacactagaccttcctattgatctagaagagcaaacaatgggaaagtacaattgggtaactacacctactactttcaagcccgacagccctgatttggcccgacactacaaatctgcctctccacagcctgccttccaaattcagcctgaaactcccctgaattcgaagcaccacatcatccaagaactgcctctcgataacacctttgtggcctgtgactctatctccaagtgttcctcaagcagttcagatccctacagcgtttctgactgtggctatccagtgacgaccttcgaggtacctgtgtccgtacacaccagaccgccaatgaaggaggttgtgcgatcttgcacccccatgaaagagtctacaactatggagatctggattcatccccaaccacagtcccagcggcgtgtcacatttcacctgccagaaggctctcaggaaagcagcagtgatggtggactgggagaccatgatgcaggcagccttaccagcacatctcatggcctgccccttggctatcctcaggaggagtactttgatcgtgctacacccagcaatcgcactgaaggggatggcaactccgatcctgaatctactttcatacctggactaaagaaagctgcagaaataactgttcaaccaactgtggaagaggcctctgacaactgcactcaagaatgtctcatctatggccattctgatgcctgctggatgccggcatctctggatcattccagctcttcgcaagcacaggcctctgctctatgccacagcccaccactgtcacaggcctctactcagcaccacagcccacgagtgacacagaccattgctctctgccacagccctccagtgacacagaccatcgcattgtgccacagcccaccaccgatacaggtgtctgctctccaccacagtcctcctctagtgcaggctactgcacttcaccacagcccaccatcagcacaggcctcagccctctgctacagccctcctttagcacaggctgctgcaatcagccacagctctcctctgccacaggttattgccctccatcgtagtcaggcccaatcatcagtcagtttgcagcaaggttgggtgcaaggtgctgatgggctatgctctgttgatcagggagtgcaaggtagtgcaacatctcagttttacaccatgtctgaaagacttcatcccagtgatgattcaattaaagtcattcctttgacaaccttcactccacgccaacaggccagaccgtccagaggtgattcccccattatggaagaacatcccttgtaaagctaaaatagttacttcaaattttcagaaaagatgtatatagtcaaaatttaagatacaattccaatgagtattctgattatcagatttgtaaataactatgtaaatagaaacagataccagaataaatctacagctagacccttagtcaatagttaaccaaaaaattgcaatttgtttaattcagaatgtgtatttaaaaagaaaaggaatttaacaatttgcatccccttgtacagtaaggcttatcatgacagagcgcactatttctgatgtacagtattttttgttgtttttatcatcatgtgcaatattactgatttgtttccatgctgattgtgtggaaccagtatgtagcaaatggaaagcctagaaatatcttattttctaagtttacctttagtttacctaaacttttgttcagataacgttaaaaggtatacgtactctagcctttttttgggctttctttttgatttttgtttgttgttttcagtttttttgttgttgttagtgagtctcccttcaaaatacgcagtaggtagtgtaaatactgcttgtttgtgtctctctgctgtcatgttttctaccttattccaatactatattgttgataaaatttgtatatacattttcaataaagaatatgtataaactgtacagatctagatctacaacctatttctctactctttagtagagttcgagacacagaagtgcaataactgccctaattaagcaactatttgttaaaaagggcctctttttactttaatagtttagtgtaaagtacatcagaaataaagctgtatctgccattttaagcctgtagtccattattacttgggtctttacttctgggaatttgtatgtaacagcctagaaaattaaaaggaggtggatgcatccaaagcacgagtcacttaaaatatcgacggtaaactactattttgtagagaaactcaggaagatttaaatgttgatttgacagctcaataggctgttaccaaagggtgttcagtaaaaataacaaatacatgtaactgtagataaaaccatatactaaatctataagactaagggatttttgttattctagctcaacttactgaagaaaaccactaataacaacaagaatatcaggaaggaacttttcaagaaatgtaattataaatctacatcaaacagaattttaaggaaaaatgcagagggagaaataaggcacatgactgcttcttgcagtcaacaagaaataccaataacacacacagaacaaaaaccatcaaaatctcatatatgaaataaaatatattcttctaagcaaagaaacagtactattcatagaaaacattagttttcttctgttgtctgttatttccttcttgtatcctcttaactggccattatcttgtatgtgcacattttataaatgtacagaaacatcaccaacttaattttcttccatagcaaaactgagaaaataccttgtttcagtataacactaaaccaagagacaattgatgtttaatgggggcggttggggtgggggggggagtcaatatctcctattgattaacttagacatagattttgtaatgtataacttgatatttaatttatgattaaactgtgtgtaaattttgtaacataaactgtggtaattgcataatttcattggtgaggatttccactgaatattgagaaagtttcttttcatgtgcccagcaggttaagtagcgttttcagaatatacattattcccatccattgtaaagttccttaagtcatatttgactgggcgtgcagaataacttcttaacttttaactatcagagtttgattaataaaattaattaatgttttttctccttcgtgttgttaatgttccaagggatttggagcatactggttttccaggtgcatgtgaatcccgaaggactgatgatatttgaatgtttattaaattattatcatacaaatgtgttgatattgtggctattgttgatgttgaaaattttaaacttggggaagattaagaaaagaaccaatagtgacaaaaatcagtgcttccagtagattttagaacattctttgcctcaaaaaacctgcaaagatgatgtgagattttttcttgtgttttaattattttcacattttctctctgcaaaactttagttttctgatgatctacacacacacacacacacacacgtgcacacacacacacatttaaatgatataaaaagaagaggttgaaagattattaaataacttatcaggcatctcaatggttactatctatgttagtgaaaatcaaataggactcaaagttggatatttgggatttttcttctgacagtataatttattgagttactagggaggttcttaaatcctcatatctggaaacttgtgacgttttgacacctttcctatagatgatataggaatgaaccaatacgcttttattaccctttctaactctgattttataatcagacttagattgtgtttagaatattaaatgactgggcaccctcttcttggtttttaccagagaggctttgaatggaagcaggctgagagtagccaaagaggcaaggggtattagcccagttattctcccctatgccttccttctctttctaagcgtccactaggtctggccttggaaacctgttacttctagggcttcagatctgatgatatctttttcatcacattacaagttatttctctgactgaatagacagtggtataggttgacacagcacacaagtggctattgtgatgtatgatgtatgtagtcctacaactgcaaaacgtcttactgaaccaacaatcaaaaaatggttctgttttaaaaaggattttgtttgatttgaaattaaaacttcaagctgaatgacttatatgagaataatacgttcaatcaaagtagttattctattttgtgtccatattccattagattgtgattattaattttctagctatggtattactatatcacacttgtgagtatgtattcaaatactaagtatcttatatgctacgtgcatacacattcttttcttaaactttacctgtgttttaactaatattgtgtcagtgtattaaaaattagcttttacatatgatatctacaatgtaataaatttagagagtaattttgtgtattcttatttacttaacattttacttttaattatgtaaatttggttagaaaataataataaatggttagtgctattgtgtaatggtagcagttacaaagagcctctgccttcccaaactaatatttatcacacatggtcattaaatgggaaaaaaatagactaaacaaatcacaaattgttcagttcttaaaatgtaattatgtcacacacacaaaaaatccttttcaatcctgagaaaattaaaggcgttttactcacatggctatttcaacattagttttttttgtttgtttctttttcatggtattactgaaggtgtgtatactccctaatacacatttatgaaaatctacttgtttaggcttttatttatactcttctgatttatattttttattataattattatttcttatctttcttcttttatattttttggaaaccaaatttatagttagtttaggtaaactttttattatgaccattagaaactattttgaatgcttccaactggctcaattggccgggaaaacatgggagcaagagaagctgaaatatatttctgcaagaacctttctatattatgtgccaattaccacaccagatcaattttatgcagaggccttaaaatattctttcacagtagctttcttacactaaccgtcatgtgcttttagtaaatatgatttttaaaagcagttcaagttgacaacagcagaaacagtaacaaaaaaatctgctcagaaaaatgtatgtgcacaaataaaaaaaattaatggcaattgtttagtgattgtaagtgatactttttaaagagtaaactgtgtgaaatttatactatccctgcttaaaatattaagatttttatgaaatatgtatttatgtttgtattgtgggaagattcctcctctgtgatatcatacagcatctgaaagtgaacagtatcccaaagcagttccaaccatgctttggaagtaagaaggttgactattgtatggccaaggatggcagtatgtaatccagaagcaaacttgtattaattgttctatttcaggttctgtattgcatgttttcttattaatatatattaataaaagttatgagaaataaaaaaaaaaaaaa

SEQ ID NO: 4948 - DNA, 8365 bp, Homo sapiens
tgttgtgcgggttaatacaacaaactgtaacaagtgtacctggtatggacttgttgtccgggacgtacattttcgcggtcctgctagcatgcgtggtgttccactctggcgcccaggagaaaaactacaccatccgagaagaaatgccagaaaacgtcctgataggcgacttgttgaaagaccttaacttgtcgctgattccaaacaagtccttgacaactgctatgcagttcaagctagtgtacaagaccggagatgtgccactgattcgaattgaagaggatactggtgagatcttcactactggcgctcgcattgatcgtgagaaattatgtgctggtatcccaagggatgagcattgcttttatgaagtggaggttgccattttgccggatgaaatatttagactggttaagatacgttttctgatagaagatataaatgataatgcaccattgttcccagcaacagttatcaacatatcaattccagagaactcggctataaactctaaatatactctcccagcggctgttgatcctgacgtaggaataaacggagttcaaaactacgaactaattaagagtcaaaacatttttggcctcgatgtcattgaaacaccagaaggagacaagatgccacaactgattgttcaaaaggagttagatagggaagagaaggatacctacgtgatgaaagtaaaggttgaagatggtggctttcctcaaagatccagtactgctattttgcaagtgagtgttactgatacaaatgacaaccacccagtctttaaggagacagagattgaagtcagtataccagaaaatgctcctgtaggcacttcagtgacacagctccatgccacagatgctgacataggtgaaaatgccaagatccacttctctttcagcaatctagtctccaacattgccaggagattatttcacctcaatgccaccactggacttatcacaatcaaagaaccactggatagggaagaaacaccaaaccacaagttactggttttggcaagtgatggtggattgatgccagcaagagcaatggtgctggtaaatgttacagatgtcaatgataatgtcccatccattgacataagatacatcgtcaatcctgtcaatgacacagttgttctttcagaaaatattccactcaacaccaaaattgctctcataactgtgacggataaggatgcggaccataatggcagggtgacatgcttcacagatcatgaaatccctttcagattaaggccagtattcagtaatcagttcctcctggagactgcagcatatcttgactatgagtccacaaaagaatatgccattaaattactggctgcagatgctggcaaacctcctttgaatcagtcagcaatgctcttcatcaaagtgaaagatgaaaatgacaatgctccagttttcacccagtctttcgtaactgtttctattcctgagaataactctcctggcatccagttgacgaaagtaagtgcaatggatgcagacagtgggcctaatgctaagatcaattacctgctaggccctgatgctccacctgaattcagcctggattgtcgtacaggcatgctgactgtagtgaagaaactagatagagaaaaagaggataaatatttattcacaattctggcaaaagataacggggtaccacccttaaccagcaatgtcacagtctttgtaagcattattgatcagaatgacaatagcccagttttcactcacaatgaatacaacttctatgtcccagaaaaccttccaaggcatggtacagtaggactaatcactgtaactgatcctgattatggagacaattctgcagttacgctctccattttagatgagaatgatgacttcaccattgattcacaaactggtgtcatccgaccaaatatttcatttgatagagaaaaacaagaatcttacactttctatgtaaaggctgaggatggtggtagagtatcacgttcttcaagtgccaaagtaaccataaatgtggttgatgtcaatgacaacaaaccagttttcattgtccctccttccaactgttcttatgaattggttctaccgtccactaatccaggcacagtggtctttcaggtaattgctgttgacaatgacactggcatgaatgcagaggttcgttacagcattgtaggaggaaacacaagagatctgtttgcaatcgaccaagaaacaggcaacataacattgatggagaaatgtgatgttacagaccttggtttacacagagtgttggtcaaagctaatgacttaggacagcctgattctctcttcagtgttgtaattgtcaatctgttcgtgaatgagtcggtgaccaatgctacactgattaatgaactggtgcgcaaaagcactgaagcaccagtgaccccaaatactgagatagctgatgtatcctcaccaactagtgactatgtcaagatcctggttgcagctgttgctggcaccataactgtcgttgtagttattttcatcactgctgtagtaagatgtcgccaggcaccacaccttaaggctgctcagaaaaacaagcagaattctgaatgggctaccccaaacccagaaaacaggcagatgataatgatgaagaaaaagaaaaagaagaagaagcattcccctaagaacttgctgcttaattttgtcactattgaagaaactaaggcagatgatgttgacagtgatggaaacagagtcacactagaccttcctattgatctagaagagcaaacaatgggaaagtacaattgggtaactacacctactactttcaagcccgacagccctgatttggcccgacactacaaatctgcctctccacagcctgccttccaaattcagcctgaaactcccctgaattcgaagcaccacatcatccaagaactgcctctcgataacacctttgtggcctgtgactctatctccaagtgttcctcaagcagttcagatccctacagcgtttctgactgtggctatccagtgacgaccttcgaggtacctgtgtccgtacacaccagaccgccaatgaaggaggttgtgcgatcttgcacccccatgaaagagtctacaactatggagatctggattcatccccaaccacagcggaaatctgaagggaaagtggcaggaaagtcccagcggcgtgtcacatttcacctgccagaaggctctcaggaaagcagcagtgatggtggactgggagaccatgatgcaggcagccttaccagcacatctcatggcctgccccttggctatcctcaggaggagtactttgatcgtgctacacccagcaatcgcactgaaggggatggcaactccgatcctgaatctactgcagaaataactgttcaaccaactgtggaagaggcctctgacaactgcactcaagaatgtctcatctatggccattctgatgcctgctggatgccggcatctctggatcattccagctcttcgcaagcacaggcctctgctctatgccacagcccaccactgtcacaggcctctactcagcaccacagcccacgagtgacacagaccattgctctctgccacagccctccagtgacacagaccatcgcattgtgccacagcccaccaccgatacaggtgtctgctctccaccacagtcctcctctagtgcaggctactgcacttcaccacagcccaccatcagcacaggcctcagccctctgctacagccctcctttagcacaggctgctgcaatcagccacagctctcctctgccacaggttattgccctccatcgtagtcaggcccaatcatcagtcagtttgcagcaaggttgggtgcaaggtgctgatgggctatgctctgttgatcagggagtgcaaggtagtgcaacatctcagttttacaccatgtctgaaagacttcatcccagtgatgattcaattaaagtcattcctttgacaaccttcactccacgccaacaggccagaccgtccagaggtgattcccccattatggaagaacatcccttgtaaagctaaaatagttacttcaaattttcagaaaagatgtatatagtcaaaatttaagatacaattccaatgagtattctgattatcagatttgtaaataactatgtaaatagaaacagataccagaataaatctacagctagacccttagtcaatagttaaccaaaaaattgcaatttgtttaattcagaatgtgtatttaaaaagaaaaggaatttaacaatttgcatccccttgtacagtaaggcttatcatgacagagcgcactatttctgatgtacagtattttttgttgtttttatcatcatgtgcaatattactgatttgtttccatgctgattgtgtggaaccagtatgtagcaaatggaaagcctagaaatatcttattttctaagtttacctttagtttacctaaacttttgttcagataacgttaaaaggtatacgtactctagcctttttttgggctttctttttgatttttgtttgttgttttcagtttttttgttgttgttagtgagtctcccttcaaaatacgcagtaggtagtgtaaatactgcttgtttgtgtctctctgctgtcatgttttctaccttattccaatactatattgttgataaaatttgtatatacattttcaataaagaatatgtataaactgtacagatctagatctacaacctatttctctactctttagtagagttcgagacacagaagtgcaataactgccctaattaagcaactatttgttaaaaagggcctctttttactttaatagtttagtgtaaagtacatcagaaataaagctgtatctgccattttaagcctgtagtccattattacttgggtctttacttctgggaatttgtatgtaacagcctagaaaattaaaaggaggtggatgcatccaaagcacgagtcacttaaaatatcgacggtaaactactattttgtagagaaactcaggaagatttaaatgttgatttgacagctcaataggctgttaccaaagggtgttcagtaaaaataacaaatacatgtaactgtagataaaaccatatactaaatctataagactaagggatttttgttattctagctcaacttactgaagaaaaccactaataacaacaagaatatcaggaaggaacttttcaagaaatgtaattataaatctacatcaaacagaattttaaggaaaaatgcagagggagaaataaggcacatgactgcttcttgcagtcaacaagaaataccaataacacacacagaacaaaaaccatcaaaatctcatatatgaaataaaatatattcttctaagcaaagaaacagtactattcatagaaaacattagttttcttctgttgtctgttatttccttcttgtatcctcttaactggccattatcttgtatgtgcacattttataaatgtacagaaacatcaccaacttaattttcttccatagcaaaactgagaaaataccttgtttcagtataacactaaaccaagagacaattgatgtttaatgggggcggttggggtgggggggggagtcaatatctcctattgattaacttagacatagattttgtaatgtataacttgatatttaatttatgattaaactgtgtgtaaattttgtaacataaactgtggtaattgcataatttcattggtgaggatttccactgaatattgagaaagtttcttttcatgtgcccagcaggttaagtagcgttttcagaatatacattattcccatccattgtaaagttccttaagtcatatttgactgggcgtgcagaataacttcttaacttttaactatcagagtttgattaataaaattaattaatgttttttctccttcgtgttgttaatgttccaagggatttggagcatactggttttccaggtgcatgtgaatcccgaaggactgatgatatttgaatgtttattaaattattatcatacaaatgtgttgatattgtggctattgttgatgttgaaaattttaaacttggggaagattaagaaaagaaccaatagtgacaaaaatcagtgcttccagtagattttagaacattctttgcctcaaaaaacctgcaaagatgatgtgagattttttcttgtgttttaattattttcacattttctctctgcaaaactttagttttctgatgatctacacacacacacacacacacacgtgcacacacacacacatttaaatgatataaaaagaagaggttgaaagattattaaataacttatcaggcatctcaatggttactatctatgttagtgaaaatcaaataggactcaaagttggatatttgggatttttcttctgacagtataatttattgagttactagggaggttcttaaatcctcatatctggaaacttgtgacgttttgacacctttcctatagatgatataggaatgaaccaatacgcttttattaccctttctaactctgattttataatcagacttagattgtgtttagaatattaaatgactgggcaccctcttcttggtttttaccagagaggctttgaatggaagcaggctgagagtagccaaagaggcaaggggtattagcccagttattctcccctatgccttccttctctttctaagcgtccactaggtctggccttggaaacctgttacttctagggcttcagatctgatgatatctttttcatcacattacaagttatttctctgactgaatagacagtggtataggttgacacagcacacaagtggctattgtgatgtatgatgtatgtagtcctacaactgcaaaacgtcttactgaaccaacaatcaaaaaatggttctgttttaaaaaggattttgtttgatttgaaattaaaacttcaagctgaatgacttatatgagaataatacgttcaatcaaagtagttattctattttgtgtccatattccattagattgtgattattaattttctagctatggtattactatatcacacttgtgagtatgtattcaaatactaagtatcttatatgctacgtgcatacacattcttttcttaaactttacctgtgttttaactaatattgtgtcagtgtattaaaaattagcttttacatatgatatctacaatgtaataaatttagagagtaattttgtgtattcttatttacttaacattttacttttaattatgtaaatttggttagaaaataataataaatggttagtgctattgtgtaatggtagcagttacaaagagcctctgccttcccaaactaatatttatcacacatggtcattaaatgggaaaaaaatagactaaacaaatcacaaattgttcagttcttaaaatgtaattatgtcacacacacaaaaaatccttttcaatcctgagaaaattaaaggcgttttactcacatggctatttcaacattagttttttttgtttgtttctttttcatggtattactgaaggtgtgtatactccctaatacacatttatgaaaatctacttgtttaggcttttatttatactcttctgatttatattttttattataattattatttcttatctttcttcttttatattttttggaaaccaaatttatagttagtttaggtaaactttttattatgaccattagaaactattttgaatgcttccaactggctcaattggccgggaaaacatgggagcaagagaagctgaaatatatttctgcaagaacctttctatattatgtgccaattaccacaccagatcaattttatgcagaggccttaaaatattctttcacagtagctttcttacactaaccgtcatgtgcttttagtaaatatgatttttaaaagcagttcaagttgacaacagcagaaacagtaacaaaaaaatctgctcagaaaaatgtatgtgcacaaataaaaaaaattaatggcaattgtttagtgattgtaagtgatactttttaaagagtaaactgtgtgaaatttatactatccctgcttaaaatattaagatttttatgaaatatgtatttatgtttgtattgtgggaagattcctcctctgtgatatcatacagcatctgaaagtgaacagtatcccaaagcagttccaaccatgctttggaagtaagaaggttgactattgtatggccaaggatggcagtatgtaatccagaagcaaacttgtattaattgttctatttcaggttctgtattgcatgttttcttattaatatatattaataaaagttatgagaaataaaaaaaaaaaaaa

SEQ ID NO: 4949 - DNA, 8226 bp, Homo sapiens
tgttgtgcgggttaatacaacaaactgtaacaagtgtacctggtatggacttgttgtccgggacgtacattttcgcggtcctgctagcatgcgtggtgttccactctggcgcccaggagaaaaactacaccatccgagaagaaatgccagaaaacgtcctgataggcgacttgttgaaagaccttaacttgtcgctgattccaaacaagtccttgacaactgctatgcagttcaagctagtgtacaagaccggagatgtgccactgattcgaattgaagaggatactggtgagatcttcactactggcgctcgcattgatcgtgagaaattatgtgctggtatcccaagggatgagcattgcttttatgaagtggaggttgccattttgccggatgaaatatttagactggttaagatacgttttctgatagaagatataaatgataatgcaccattgttcccagcaacagttatcaacatatcaattccagagaactcggctataaactctaaatatactctcccagcggctgttgatcctgacgtaggaataaacggagttcaaaactacgaactaattaagagtcaaaacatttttggcctcgatgtcattgaaacaccagaaggagacaagatgccacaactgattgttcaaaaggagttagatagggaagagaaggatacctacgtgatgaaagtaaaggttgaagatggtggctttcctcaaagatccagtactgctattttgcaagtgagtgttactgatacaaatgacaaccacccagtctttaaggagacagagattgaagtcagtataccagaaaatgctcctgtaggcacttcagtgacacagctccatgccacagatgctgacataggtgaaaatgccaagatccacttctctttcagcaatctagtctccaacattgccaggagattatttcacctcaatgccaccactggacttatcacaatcaaagaaccactggatagggaagaaacaccaaaccacaagttactggttttggcaagtgatggtggattgatgccagcaagagcaatggtgctggtaaatgttacagatgtcaatgataatgtcccatccattgacataagatacatcgtcaatcctgtcaatgacacagttgttctttcagaaaatattccactcaacaccaaaattgctctcataactgtgacggataaggatgcggaccataatggcagggtgacatgcttcacagatcatgaaatccctttcagattaaggccagtattcagtaatcagttcctcctggagactgcagcatatcttgactatgagtccacaaaagaatatgccattaaattactggctgcagatgctggcaaacctcctttgaatcagtcagcaatgctcttcatcaaagtgaaagatgaaaatgacaatgctccagttttcacccagtctttcgtaactgtttctattcctgagaataactctcctggcatccagttgacgaaagtaagtgcaatggatgcagacagtgggcctaatgctaagatcaattacctgctaggccctgatgctccacctgaattcagcctggattgtcgtacaggcatgctgactgtagtgaagaaactagatagagaaaaagaggataaatatttattcacaattctggcaaaagataacggggtaccacccttaaccagcaatgtcacagtctttgtaagcattattgatcagaatgacaatagcccagttttcactcacaatgaatacaacttctatgtcccagaaaaccttccaaggcatggtacagtaggactaatcactgtaactgatcctgattatggagacaattctgcagttacgctctccattttagatgagaatgatgacttcaccattgattcacaaactggtgtcatccgaccaaatatttcatttgatagagaaaaacaagaatcttacactttctatgtaaaggctgaggatggtggtagagtatcacgttcttcaagtgccaaagtaaccataaatgtggttgatgtcaatgacaacaaaccagttttcattgtccctccttccaactgttcttatgaattggttctaccgtccactaatccaggcacagtggtctttcaggtaattgctgttgacaatgacactggcatgaatgcagaggttcgttacagcattgtaggaggaaacacaagagatctgtttgcaatcgaccaagaaacaggcaacataacattgatggagaaatgtgatgttacagaccttggtttacacagagtgttggtcaaagctaatgacttaggacagcctgattctctcttcagtgttgtaattgtcaatctgttcgtgaatgagtcggtgaccaatgctacactgattaatgaactggtgcgcaaaagcactgaagcaccagtgaccccaaatactgagatagctgatgtatcctcaccaactagtgactatgtcaagatcctggttgcagctgttgctggcaccataactgtcgttgtagttattttcatcactgctgtagtaagatgtcgccaggcaccacaccttaaggctgctcagaaaaacaagcagaattctgaatgggctaccccaaacccagaaaacaggcagatgataatgatgaagaaaaagaaaaagaagaagaagcattcccctaagaacttgctgcttaattttgtcactattgaagaaactaaggcagatgatgttgacagtgatggaaacagagtcacactagaccttcctattgatctagaagagcaaacaatgggaaagtacaattgggtaactacacctactactttcaagcccgacagccctgatttggcccgacactacaaatctgcctctccacagcctgccttccaaattcagcctgaaactcccctgaattcgaagcaccacatcatccaagaactgcctctcgataacacctttgtggcctgtgactctatctccaagtgttcctcaagcagttcagatccctacagcgtttctgactgtggctatccagtgacgaccttcgaggtacctgtgtccgtacacaccagaccgccaatgaaggaggttgtgcgatcttgcacccccatgaaagagtctacaactatggagatctggattcatccccaaccacagcggaaatctgaagggaaagtggcaggaaagactgtgcttacttcctcttccccttctgccatgaccctttcatacctggactaaagaaagctgcagaaataactgttcaaccaactgtggaagaggcctctgacaactgcactcaagaatgtctcatctatggccattctgatgcctgctggatgccggcatctctggatcattccagctcttcgcaagcacaggcctctgctctatgccacagcccaccactgtcacaggcctctactcagcaccacagcccacgagtgacacagaccattgctctctgccacagccctccagtgacacagaccatcgcattgtgccacagcccaccaccgatacaggtgtctgctctccaccacagtcctcctctagtgcaggctactgcacttcaccacagcccaccatcagcacaggcctcagccctctgctacagccctcctttagcacaggctgctgcaatcagccacagctctcctctgccacaggttattgccctccatcgtagtcaggcccaatcatcagtcagtttgcagcaaggttgggtgcaaggtgctgatgggctatgctctgttgatcagggagtgcaaggtagtgcaacatctcagttttacaccatgtctgaaagacttcatcccagtgatgattcaattaaagtcattcctttgacaaccttcactccacgccaacaggccagaccgtccagaggtgattcccccattatggaagaacatcccttgtaaagctaaaatagttacttcaaattttcagaaaagatgtatatagtcaaaatttaagatacaattccaatgagtattctgattatcagatttgtaaataactatgtaaatagaaacagataccagaataaatctacagctagacccttagtcaatagttaaccaaaaaattgcaatttgtttaattcagaatgtgtatttaaaaagaaaaggaatttaacaatttgcatccccttgtacagtaaggcttatcatgacagagcgcactatttctgatgtacagtattttttgttgtttttatcatcatgtgcaatattactgatttgtttccatgctgattgtgtggaaccagtatgtagcaaatggaaagcctagaaatatcttattttctaagtttacctttagtttacctaaacttttgttcagataacgttaaaaggtatacgtactctagcctttttttgggctttctttttgatttttgtttgttgttttcagtttttttgttgttgttagtgagtctcccttcaaaatacgcagtaggtagtgtaaatactgcttgtttgtgtctctctgctgtcatgttttctaccttattccaatactatattgttgataaaatttgtatatacattttcaataaagaatatgtataaactgtacagatctagatctacaacctatttctctactctttagtagagttcgagacacagaagtgcaataactgccctaattaagcaactatttgttaaaaagggcctctttttactttaatagtttagtgtaaagtacatcagaaataaagctgtatctgccattttaagcctgtagtccattattacttgggtctttacttctgggaatttgtatgtaacagcctagaaaattaaaaggaggtggatgcatccaaagcacgagtcacttaaaatatcgacggtaaactactattttgtagagaaactcaggaagatttaaatgttgatttgacagctcaataggctgttaccaaagggtgttcagtaaaaataacaaatacatgtaactgtagataaaaccatatactaaatctataagactaagggatttttgttattctagctcaacttactgaagaaaaccactaataacaacaagaatatcaggaaggaacttttcaagaaatgtaattataaatctacatcaaacagaattttaaggaaaaatgcagagggagaaataaggcacatgactgcttcttgcagtcaacaagaaataccaataacacacacagaacaaaaaccatcaaaatctcatatatgaaataaaatatattcttctaagcaaagaaacagtactattcatagaaaacattagttttcttctgttgtctgttatttccttcttgtatcctcttaactggccattatcttgtatgtgcacattttataaatgtacagaaacatcaccaacttaattttcttccatagcaaaactgagaaaataccttgtttcagtataacactaaaccaagagacaattgatgtttaatgggggcggttggggtgggggggggagtcaatatctcctattgattaacttagacatagattttgtaatgtataacttgatatttaatttatgattaaactgtgtgtaaattttgtaacataaactgtggtaattgcataatttcattggtgaggatttccactgaatattgagaaagtttcttttcatgtgcccagcaggttaagtagcgttttcagaatatacattattcccatccattgtaaagttccttaagtcatatttgactgggcgtgcagaataacttcttaacttttaactatcagagtttgattaataaaattaattaatgttttttctccttcgtgttgttaatgttccaagggatttggagcatactggttttccaggtgcatgtgaatcccgaaggactgatgatatttgaatgtttattaaattattatcatacaaatgtgttgatattgtggctattgttgatgttgaaaattttaaacttggggaagattaagaaaagaaccaatagtgacaaaaatcagtgcttccagtagattttagaacattctttgcctcaaaaaacctgcaaagatgatgtgagattttttcttgtgttttaattattttcacattttctctctgcaaaactttagttttctgatgatctacacacacacacacacacacacgtgcacacacacacacatttaaatgatataaaaagaagaggttgaaagattattaaataacttatcaggcatctcaatggttactatctatgttagtgaaaatcaaataggactcaaagttggatatttgggatttttcttctgacagtataatttattgagttactagggaggttcttaaatcctcatatctggaaacttgtgacgttttgacacctttcctatagatgatataggaatgaaccaatacgcttttattaccctttctaactctgattttataatcagacttagattgtgtttagaatattaaatgactgggcaccctcttcttggtttttaccagagaggctttgaatggaagcaggctgagagtagccaaagaggcaaggggtattagcccagttattctcccctatgccttccttctctttctaagcgtccactaggtctggccttggaaacctgttacttctagggcttcagatctgatgatatctttttcatcacattacaagttatttctctgactgaatagacagtggtataggttgacacagcacacaagtggctattgtgatgtatgatgtatgtagtcctacaactgcaaaacgtcttactgaaccaacaatcaaaaaatggttctgttttaaaaaggattttgtttgatttgaaattaaaacttcaagctgaatgacttatatgagaataatacgttcaatcaaagtagttattctattttgtgtccatattccattagattgtgattattaattttctagctatggtattactatatcacacttgtgagtatgtattcaaatactaagtatcttatatgctacgtgcatacacattcttttcttaaactttacctgtgttttaactaatattgtgtcagtgtattaaaaattagcttttacatatgatatctacaatgtaataaatttagagagtaattttgtgtattcttatttacttaacattttacttttaattatgtaaatttggttagaaaataataataaatggttagtgctattgtgtaatggtagcagttacaaagagcctctgccttcccaaactaatatttatcacacatggtcattaaatgggaaaaaaatagactaaacaaatcacaaattgttcagttcttaaaatgtaattatgtcacacacacaaaaaatccttttcaatcctgagaaaattaaaggcgttttactcacatggctatttcaacattagttttttttgtttgtttctttttcatggtattactgaaggtgtgtatactccctaatacacatttatgaaaatctacttgtttaggcttttatttatactcttctgatttatattttttattataattattatttcttatctttcttcttttatattttttggaaaccaaatttatagttagtttaggtaaactttttattatgaccattagaaactattttgaatgcttccaactggctcaattggccgggaaaacatgggagcaagagaagctgaaatatatttctgcaagaacctttctatattatgtgccaattaccacaccagatcaattttatgcagaggccttaaaatattctttcacagtagctttcttacactaaccgtcatgtgcttttagtaaatatgatttttaaaagcagttcaagttgacaacagcagaaacagtaacaaaaaaatctgctcagaaaaatgtatgtgcacaaataaaaaaaattaatggcaattgtttagtgattgtaagtgatactttttaaagagtaaactgtgtgaaatttatactatccctgcttaaaatattaagatttttatgaaatatgtatttatgtttgtattgtgggaagattcctcctctgtgatatcatacagcatctgaaagtgaacagtatcccaaagcagttccaaccatgctttggaagtaagaaggttgactattgtatggccaaggatggcagtatgtaatccagaagcaaacttgtattaattgttctatttcaggttctgtattgcatgttttcttattaatatatattaataaaagttatgagaaataaaaaaaaaaaaaa

SEQ ID NO: 4950 - DNA, 8278 bp, Homo sapiens; identical to SEQ ID NO: 1554

SEQ ID NO: 4951 - DNA, 8335 bp, Homo sapiens
tgttgtgcgggttaatacaacaaactgtaacaagtgtacctggtatggacttgttgtccgggacgtacattttcgcggtcctgctagcatgcgtggtgttccactctggcgcccaggagaaaaactacaccatccgagaagaaatgccagaaaacgtcctgataggcgacttgttgaaagaccttaacttgtcgctgattccaaacaagtccttgacaactgctatgcagttcaagctagtgtacaagaccggagatgtgccactgattcgaattgaagaggatactggtgagatcttcactactggcgctcgcattgatcgtgagaaattatgtgctggtatcccaagggatgagcattgcttttatgaagtggaggttgccattttgccggatgaaatatttagactggttaagatacgttttctgatagaagatataaatgataatgcaccattgttcccagcaacagttatcaacatatcaattccagagaactcggctataaactctaaatatactctcccagcggctgttgatcctgacgtaggaataaacggagttcaaaactacgaactaattaagagtcaaaacatttttggcctcgatgtcattgaaacaccagaaggagacaagatgccacaactgattgttcaaaaggagttagatagggaagagaaggatacctacgtgatgaaagtaaaggttgaagatggtggctttcctcaaagatccagtactgctattttgcaagtgagtgttactgatacaaatgacaaccacccagtctttaaggagacagagattgaagtcagtataccagaaaatgctcctgtaggcacttcagtgacacagctccatgccacagatgctgacataggtgaaaatgccaagatccacttctctttcagcaatctagtctccaacattgccaggagattatttcacctcaatgccaccactggacttatcacaatcaaagaaccactggatagggaagaaacaccaaaccacaagttactggttttggcaagtgatggtggattgatgccagcaagagcaatggtgctggtaaatgttacagatgtcaatgataatgtcccatccattgacataagatacatcgtcaatcctgtcaatgacacagttgttctttcagaaaatattccactcaacaccaaaattgctctcataactgtgacggataaggatgcggaccataatggcagggtgacatgcttcacagatcatgaaatccctttcagattaaggccagtattcagtaatcagttcctcctggagactgcagcatatcttgactatgagtccacaaaagaatatgccattaaattactggctgcagatgctggcaaacctcctttgaatcagtcagcaatgctcttcatcaaagtgaaagatgaaaatgacaatgctccagttttcacccagtctttcgtaactgtttctattcctgagaataactctcctggcatccagttgacgaaagtaagtgcaatggatgcagacagtgggcctaatgctaagatcaattacctgctaggccctgatgctccacctgaattcagcctggattgtcgtacaggcatgctgactgtagtgaagaaactagatagagaaaaagaggataaatatttattcacaattctggcaaaagataacggggtaccacccttaaccagcaatgtcacagtctttgtaagcattattgatcagaatgacaatagcccagttttcactcacaatgaatacaacttctatgtcccagaaaaccttccaaggcatggtacagtaggactaatcactgtaactgatcctgattatggagacaattctgcagttacgctctccattttagatgagaatgatgacttcaccattgattcacaaactggtgtcatccgaccaaatatttcatttgatagagaaaaacaagaatcttacactttctatgtaaaggctgaggatggtggtagagtatcacgttcttcaagtgccaaagtaaccataaatgtggttgatgtcaatgacaacaaaccagttttcattgtccctccttccaactgttcttatgaattggttctaccgtccactaatccaggcacagtggtctttcaggtaattgctgttgacaatgacactggcatgaatgcagaggttcgttacagcattgtaggaggaaacacaagagatctgtttgcaatcgaccaagaaacaggcaacataacattgatggagaaatgtgatgttacagaccttggtttacacagagtgttggtcaaagctaatgacttaggacagcctgattctctcttcagtgttgtaattgtcaatctgttcgtgaatgagtcggtgaccaatgctacactgattaatgaactggtgcgcaaaagcactgaagcaccagtgaccccaaatactgagatagctgatgtatcctcaccaactagtgactatgtcaagatcctggttgcagctgttgctggcaccataactgtcgttgtagttattttcatcactgctgtagtaagatgtcgccaggcaccacaccttaaggctgctcagaaaaacaagcagaattctgaatgggctaccccaaacccagaaaacaggcagatgataatgatgaagaaaaagaaaaagaagaagaagcattcccctaagaacttgctgcttaattttgtcactattgaagaaactaaggcagatgatgttgacagtgatggaaacagagtcacactagaccttcctattgatctagaagagcaaacaatgggaaagtacaattgggtaactacacctactactttcaagcccgacagccctgatttggcccgacactacaaatctgcctctccacagcctgccttccaaattcagcctgaaactcccctgaattcgaagcaccacatcatccaagaactgcctctcgataacacctttgtggcctgtgactctatctccaagtgttcctcaagcagttcagatccctacagcgtttctgactgtggctatccagtgacgaccttcgaggtacctgtgtccgtacacaccagaccgccaatgaaggaggttgtgcgatcttgcacccccatgaaagagtctacaactatggagatctggattcatccccaaccacagtcccagcggcgtgtcacatttcacctgccagaaggctctcaggaaagcagcagtgatggtggactgggagaccatgatgcaggcagccttaccagcacatctcatggcctgccccttggctatcctcaggaggagtactttgatcgtgctacacccagcaatcgcactgaaggggatggcaactccgatcctgaatctactgcagaaataactgttcaaccaactgtggaagaggcctctgacaactgcactcaagaatgtctcatctatggccattctgatgcctgctggatgccggcatctctggatcattccagctcttcgcaagcacaggcctctgctctatgccacagcccaccactgtcacaggcctctactcagcaccacagcccacgagtgacacagaccattgctctctgccacagccctccagtgacacagaccatcgcattgtgccacagcccaccaccgatacaggtgtctgctctccaccacagtcctcctctagtgcaggctactgcacttcaccacagcccaccatcagcacaggcctcagccctctgctacagccctcctttagcacaggctgctgcaatcagccacagctctcctctgccacaggttattgccctccatcgtagtcaggcccaatcatcagtcagtttgcagcaaggttgggtgcaaggtgctgatgggctatgctctgttgatcagggagtgcaaggtagtgcaacatctcagttttacaccatgtctgaaagacttcatcccagtgatgattcaattaaagtcattcctttgacaaccttcactccacgccaacaggccagaccgtccagaggtgattcccccattatggaagaacatcccttgtaaagctaaaatagttacttcaaattttcagaaaagatgtatatagtcaaaatttaagatacaattccaatgagtattctgattatcagatttgtaaataactatgtaaatagaaacagataccagaataaatctacagctagacccttagtcaatagttaaccaaaaaattgcaatttgtttaattcagaatgtgtatttaaaaagaaaaggaatttaacaatttgcatccccttgtacagtaaggcttatcatgacagagcgcactatttctgatgtacagtattttttgttgtttttatcatcatgtgcaatattactgatttgtttccatgctgattgtgtggaaccagtatgtagcaaatggaaagcctagaaatatcttattttctaagtttacctttagtttacctaaacttttgttcagataacgttaaaaggtatacgtactctagcctttttttgggctttctttttgatttttgtttgttgttttcagtttttttgttgttgttagtgagtctcccttcaaaatacgcagtaggtagtgtaaatactgcttgtttgtgtctctctgctgtcatgttttctaccttattccaatactatattgttgataaaatttgtatatacattttcaataaagaatatgtataaactgtacagatctagatctacaacctatttctctactctttagtagagttcgagacacagaagtgcaataactgccctaattaagcaactatttgttaaaaagggcctctttttactttaatagtttagtgtaaagtacatcagaaataaagctgtatctgccattttaagcctgtagtccattattacttgggtctttacttctgggaatttgtatgtaacagcctagaaaattaaaaggaggtggatgcatccaaagcacgagtcacttaaaatatcgacggtaaactactattttgtagagaaactcaggaagatttaaatgttgatttgacagctcaataggctgttaccaaagggtgttcagtaaaaataacaaatacatgtaactgtagataaaaccatatactaaatctataagactaagggatttttgttattctagctcaacttactgaagaaaaccactaataacaacaagaatatcaggaaggaacttttcaagaaatgtaattataaatctacatcaaacagaattttaaggaaaaatgcagagggagaaataaggcacatgactgcttcttgcagtcaacaagaaataccaataacacacacagaacaaaaaccatcaaaatctcatatatgaaataaaatatattcttctaagcaaagaaacagtactattcatagaaaacattagttttcttctgttgtctgttatttccttcttgtatcctcttaactggccattatcttgtatgtgcacattttataaatgtacagaaacatcaccaacttaattttcttccatagcaaaactgagaaaataccttgtttcagtataacactaaaccaagagacaattgatgtttaatgggggcggttggggtgggggggggagtcaatatctcctattgattaacttagacatagattttgtaatgtataacttgatatttaatttatgattaaactgtgtgtaaattttgtaacataaactgtggtaattgcataatttcattggtgaggatttccactgaatattgagaaagtttcttttcatgtgcccagcaggttaagtagcgttttcagaatatacattattcccatccattgtaaagttccttaagtcatatttgactgggcgtgcagaataacttcttaacttttaactatcagagtttgattaataaaattaattaatgttttttctccttcgtgttgttaatgttccaagggatttggagcatactggttttccaggtgcatgtgaatcccgaaggactgatgatatttgaatgtttattaaattattatcatacaaatgtgttgatattgtggctattgttgatgttgaaaattttaaacttggggaagattaagaaaagaaccaatagtgacaaaaatcagtgcttccagtagattttagaacattctttgcctcaaaaaacctgcaaagatgatgtgagattttttcttgtgttttaattattttcacattttctctctgcaaaactttagttttctgatgatctacacacacacacacacacacacgtgcacacacacacacatttaaatgatataaaaagaagaggttgaaagattattaaataacttatcaggcatctcaatggttactatctatgttagtgaaaatcaaataggactcaaagttggatatttgggatttttcttctgacagtataatttattgagttactagggaggttcttaaatcctcatatctggaaacttgtgacgttttgacacctttcctatagatgatataggaatgaaccaatacgcttttattaccctttctaactctgattttataatcagacttagattgtgtttagaatattaaatgactgggcaccctcttcttggtttttaccagagaggctttgaatggaagcaggctgagagtagccaaagaggcaaggggtattagcccagttattctcccctatgccttccttctctttctaagcgtccactaggtctggccttggaaacctgttacttctagggcttcagatctgatgatatctttttcatcacattacaagttatttctctgactgaatagacagtggtataggttgacacagcacacaagtggctattgtgatgtatgatgtatgtagtcctacaactgcaaaacgtcttactgaaccaacaatcaaaaaatggttctgttttaaaaaggattttgtttgatttgaaattaaaacttcaagctgaatgacttatatgagaataatacgttcaatcaaagtagttattctattttgtgtccatattccattagattgtgattattaattttctagctatggtattactatatcacacttgtgagtatgtattcaaatactaagtatcttatatgctacgtgcatacacattcttttcttaaactttacctgtgttttaactaatattgtgtcagtgtattaaaaattagcttttacatatgatatctacaatgtaataaatttagagagtaattttgtgtattcttatttacttaacattttacttttaattatgtaaatttggttagaaaataataataaatggttagtgctattgtgtaatggtagcagttacaaagagcctctgccttcccaaactaatatttatcacacatggtcattaaatgggaaaaaaatagactaaacaaatcacaaattgttcagttcttaaaatgtaattatgtcacacacacaaaaaatccttttcaatcctgagaaaattaaaggcgttttactcacatggctatttcaacattagttttttttgtttgtttctttttcatggtattactgaaggtgtgtatactccctaatacacatttatgaaaatctacttgtttaggcttttatttatactcttctgatttatattttttattataattattatttcttatctttcttcttttatattttttggaaaccaaatttatagttagtttaggtaaactttttattatgaccattagaaactattttgaatgcttccaactggctcaattggccgggaaaacatgggagcaagagaagctgaaatatatttctgcaagaacctttctatattatgtgccaattaccacaccagatcaattttatgcagaggccttaaaatattctttcacagtagctttcttacactaaccgtcatgtgcttttagtaaatatgatttttaaaagcagttcaagttgacaacagcagaaacagtaacaaaaaaatctgctcagaaaaatgtatgtgcacaaataaaaaaaattaatggcaattgtttagtgattgtaagtgatactttttaaagagtaaactgtgtgaaatttatactatccctgcttaaaatattaagatttttatgaaatatgtatttatgtttgtattgtgggaagattcctcctctgtgatatcatacagcatctgaaagtgaacagtatcccaaagcagttccaaccatgctttggaagtaagaaggttgactattgtatggccaaggatggcagtatgtaatccagaagcaaacttgtattaattgttctatttcaggttctgtattgcatgttttcttattaatatatattaataaaagttatgagaaataaaaaaaaaaaaaa

SEQ ID NO: 4952 - DNA, 4509 bp, Homo sapiens; identical to SEQ ID NO: 2486

SEQ ID NO: 4953 - DNA, 4454 bp, Homo sapiens
ggaacaggacattccagtagttttgtttctggaaaagagggcacccagcccttccccctccctcatcctcccatcccagtaaaccctgccaaattggaatcctggacttaatttaggagaaaggccctgtaaccaagatactgactgaacatggctggcggactcaggctggggtctgcagtgcagcattaatgggccgctgacatgaatatggagtagttttctctagcaaagagtaatgtgggccatggagtcaggccacctcctctgggctctgctgttcatgcagtccttgtggcctcaactgactgatggagccactcgagtctactacctgggcatccgggatgtgcagtggaactatgctcccaagggaagaaatgtcatcacgaaccagcctctggacagtgacatagtggcttccagcttcttaaagtctgacaagaaccggatagggggaacctacaagaagaccatctataaagaatacaaggatgactcatacacagatgaagtggcccagcctgcctggttgggcttcctggggccagtgttgcaggctgaagtgggggatgtcattcttattcacctgaagaattttgccactcgtccctataccatccaccctcatggtgtcttctacgagaaggactctgaaggttccctatacccagatggctcctctgggccactgaaagctgatgactctgttcccccggggggcagccatatctacaactggaccattccagaaggccatgcacccaccgatgctgacccagcgtgcctcacctggatctaccattctcatgtagatgctccacgagacattgcaactggcctaattgggcctctcatcacctgtaaaagaggagccctggatgggaactcccctcctcaacgccaggatgtagaccatgatttcttcctcctcttcagtgtggtagatgagaacctcagctggcatctcaatgagaacattgccacttactgctcagatcctgcttcagtggacaaagaagatgagacatttcaggagagcaataggatgcatgcaatcaatggctttgtttttgggaatttacctgagctgaacatgtgtgcacagaaacgtgtggcctggcacttgtttggcatgggcaatgaaattgatgtccacacagcatttttccatggacagatgctgactacccgtggacaccacactgatgtggctaacatctttccagccacctttgtgactgctgagatggtgccctgggaacctggtacctggttaattagctgccaagtgaacagtcactttcgagatggcatgcaggcactctacaaggtcaagtcttgctccatggcccctcctgtggacctgctcacaggcaaagttcgacagtacttcattgaggcccatgagattcaatgggactatggcccgatggggcatgatgggagtactgggaagaatttgagagagccaggcagtatctcagataagtttttccagaagagctccagccgaattgggggcacttactggaaagtgcgatatgaagcctttcaagatgagacattccaagagaagatgcatttggaggaagataggcatcttggaatcctggggccagtgatccgggctgaggtgggtgacaccattcaggtggtcttctacaaccgtgcctcccagccattcagcatgcagccccatggggtcttttatgagaaagactatgaaggcactgtgtacaatgatggctcatcttaccctggcttggttgccaagccctttgagaaagtaacataccgctggacagtcccccctcatgccggtcccactgctcaggatcctgcttgtctcacttggatgtacttctctgctgcagatcccataagagacacaaattctggcctggtgggcccgctgctggtgtgcagggctggtgccttgggtgcagatggcaagcagaaaggggtggataaagaattctttcttctcttcactgtgttggatgagaacaagagctggtacagcaatgccaatcaagcagctgctatgttggatttccgactgctttcagaggatattgagggcttccaagactccaatcggatgcatgccattaatgggtttctgttctctaacctgcccaggctggacatgtgcaagggtgacacagtggcctggcacctgctcggcctgggcacagagactgatgtgcatggagtcatgttccagggcaacactgtgcagcttcagggcatgaggaagggtgcagctatgctctttcctcatacctttgtcatggccatcatgcagcctgacaaccttgggacatttgagatttattgccaggcaggcagccatcgagaagcagggatgagggcaatctataatgtctcccagtgtcctggccaccaagccacccctcgccaacgctaccaagctgcaagaatctactatatcatggcagaagaagtagagtgggactattgccctgaccggagctgggaacgggaatggcacaaccagtctgagaaggacagttatggttacattttcctgagcaacaaggatgggctcctgggttccagatacaagaaagctgtattcagggaatacactgatggtacattcaggatccctcggccaaggactggaccagaagaacacttgggaatcttgggtccacttatcaaaggtgaagttggtgatatcctgactgtggtattcaagaataatgccagccgcccctactctgtgcatgctcatggagtgctagaatctactactgtctggccactggctgctgagcctggtgaggtggtcacttatcagtggaacatcccagagaggtctggccctgggcccaatgactctgcttgtgtttcctggatctattattctgcagtggatcccatcaaggacatgtatagtggcctggtggggcccttggctatctgccaaaagggcatcctggagccccatggaggacggagtgacatggatcgggaatttgcattgttgttcttgatttttgatgaaaataagtcttggtatttggaggaaaatgtggcaacccatgggtcccaggatccaggcagtattaacctacaggatgaaactttcttggagagcaataaaatgcatgcaatcaatgggaaactctatgccaaccttaggggtcttaccatgtaccaaggagaacgagtggcctggtacatgctggccatgggccaagatgtggatctacacaccatccactttcatgcagagagcttcctctatcggaatggcgagaactaccgggcagatgtggtggatctgttcccagggacttttgaggttgtggagatggtggccagcaaccctgggacatggctgatgcactgccatgtgactgaccatgtccatgctggcatggagaccctcttcactgttttttctcgaacagaacacttaagccctctcaccgtcatcaccaaagagactgaaaaagtgccccccagagacattgaagaaggcaatgtgaagatgctgggcatgcagatccccataaagaatgttgagatgctggcctctgttttggttgccattagtgtcacccttctgctcgttgttctggctcttggtggagtggtttggtaccaacatcgacagagaaagctacgacgcaataggaggtccatcctggatgacagcttcaagcttctgtctttcaaacagtaacatctggagcctggagatatcctcaggaagcacatctgtagtgcactcccagcaggccatggactagtcactaaccccacactcaaaggggcatgggtggtggagaagcagaaggagcaatcaagcttatctggatatttctttctttatttattttacatggaaataatatgatttcactttttctttagtttctttgctctacgtgggcacctggcactaagggagtaccttattatcctacatcgcaaatttcaacagctacattatatttccttctgacacttggaaggtattgaaatttctagaaatgtatccttctcacaaagtagagaccaagagaaaaactcattgattgggtttctacttctttcaaggactcaggaaatttcactttgaactgaggccaagtgagctgttaagataacccacacttaaactaaaggctaagaatataggcttgatgggaaattgaaggtaggctgagtattgggaatccaaattgaattttgattctccttggcagtgaactactttgaagaagtggtcaatgggttgttgctgccatgagcatgtacaacctctggagctagaagctcctcaggaaagccagttctccaagttcttaacctgtggcactgaaaggaatgttgagttacctcttcatgttttagacagcaaaccctatccattaaagtacttgttagaacactgaaaaaaaaaaaaaaaaaaa

SEQ ID NO: 4954 - DNA, 1375 bp, Homo sapiens
ggcgggacccaactgattgtcaaaggcggcagattgtagtttttgttttggccggaaaggcttaccatgagttgccagggctgagagagatggagaaggattcgcggcggtgacagattaaattccccagttacattatagacttggaggtgggggatcttctcatcgttagaggccccgatcatgggagataggcggttcggagccagttctgcctaactttgtgttcactgatgttagggctgctagggctgcaaaggtgggcacccctactcgcctaagagctttctcctctcttctctttttcccctttgcctctctccttacatcacctgcccactaagtagacttgtccttgtgtggacgggagccggaaagccttgagaacttattcctcgacccggacatggcacaggagaaaatgaaactaggtttcaagtcgctgccgagttccactaccgcagacggcaacattctgagaagagtcaacagtgcccctttgatcaatggacttggttttaattcacaggtgttgcaagctgacatgttaagaattaggacaaacagaacaacatttaggaatcgacgctctctgttgttgccacctcctccctttcatggttccatcagccgccttcatcaaatcaaacaggaagaagccatggatttaataaatagagaaacaatgtctgaatggaagctacaaagtgagatacagataagtcactcttgggaagaaggcttgaaactgaatgacaatggcttacagaaatcatcctctctaaagtgcattgatttaactccagtatcctcaatggcttcttccatcaagaagactgggaagtctacttccagctacttttgatggaaacgacagcaatgctggatcttctggtaattcgtcagctgaaatcggcactgtcacaaactctcctgtgtcaccttctgatactggttctcatttgttctagtagacaaactttcaactaaatgattcacccatcccaagactttctcaccagtggagaaacacacacatcaagcaaaccaagtcagagcaatgagaattgtactgtataatttaaactatctcctatttatcttttttcctcaatttcctaaaattctatttatctacagaacttgcgtgtataattcttgtgtacatccttaaatttaatgtaataacatgttaaagatgttttccaaatcagaaccatgttgaagatacaagcgtaaattgttaggctgctattttctagaaaatgctgtaccttgactttttaaaataatcttatgaaacataattctgataaaatataattgttcaattaacaaagtaaaatgatgtttgacaattatgtaaaaaaaaaaa

SEQ ID NO: 4955 - DNA, 1379 bp, Homo sapiens; identical to SEQ ID NO: 572

SEQ ID NO: 4956 - DNA, 2176 bp, Homo sapiens
aggatgatggtgaggcaggagaggaggacgaagaggaccacaagcggggccgggctacagatgctgcggctgcccgggcagcgctagcaccgaggacctgacagtcgggtgagggcctgggacagacgcagcagactgggatatgcaaagagaggagtagcctaattgtcaagtctagatctaacaaaagcagtgtcccaagatcatggcatatttccctggaactggaaggactgatcaagaaacacagctagacttgtccttgtgtggacgggagccggaaagccttgagaacttattcctcgacccggacatggcacaggagaaaatgaaactaggtttcaagtcgctgccgagttccactaccgcagacggcaacattctgagaagagtcaacagtgcccctttgatcaatggacttggttttaattcacaggtgttgcaagctgacatgttaagaattaggacaaacagaacaacatttaggaatcgacgctctctggaaattacttcacccacttctgttgaacagaagcccaaagacctcttctgaccttgagactatgccttctcccaaatcgcccctttgctttatctcctaagaactctgaagttgccatgcctgttcctttctctcccaccaggaattctggcacttctgctcaagccggatgtcactgcgtcacttctccatccccaccccctcctcttccaaaggaagcaggggaaatgtctcatcttcctaagagaaaaggttgtgcttttcttgagcaattcatctgttctaattttaggcctactgacatctgtctcattaggttttgcttttcctattggcaaccacaaaccccaaatctagtgtatggcccacaaagttgcaagcatgtaatacattcctgatcctgctttatgccctgcacatctagcccatgttcagttcatgttaagtagcattataaaccatcttaaatcatttctgaaactaggcagagacatttataaacacagtgtacaaccctttgtttaggattttctgagcattttatctctagttactatagtaggaaatggcttaaaaacagcaaacctaggaaaatgaaaaataatttttaaaaatcttaatgtctttacaatatgaattttctgtgatctctcttaaatggaactaagcttggtttttcctcctatcttaatcctttcactggagataattcttagtaattagcttcacccagcaccctccctaacctcccgctacttctactcccagccaccttcacaccatgacatcattccttggtgctgatactcttggttccttccaaggacttttctttcttcctggagtgtgagaaaaaggcacagtgggaaatttacacaaaagataccagtgatgtttattacatctcagtgaagtcattatttctattttaatactttgtttcatgtggaaaaattatctaaggtaattcctttgcaaacgccacttgtagtacttaatttggggagaattctcttccagaagccttgttttctgcaattaatttctcacattattactaaaagaatcagccaatacaagatttgatccacattttgtccaattaaaaaattcttgtagcttatgattctgtagctcaagttcaaatcctacctacctcagacatttcacactatctccctgctggtgtcatcaatttcagtctatcttctcatgatttcctggatgaagtttttcagtgggaaatcctaagcctttgcctgaacctaaattggttccttcccatcccttaggtataaattaaaaataatctcttctagggaagtctttcatcattattttatgaaggaaatttgccataccatgttttctcacttataagtcggagctaaatgataagaacttatgaacacaaggaaacaacagacactagggtctacttgagcggggaggatgtgaggagggaagcagaaaagataactattaggtactgggcttactacctgggtgatgaaatagtatgtacaacaggccaggcgcggtggctcacacctgtaatcccagcactttggaaggccaaggtgggcagatcacctgaggtcaggagtttgagatcagcctggtcaacatggtgaaaccccatctctactaaaaatacaaaaaaaaaaaaaaaaa

SEQ ID NO: 4957 - DNA, 2523 bp, Homo sapiens
ggcgggacccaactgattgtcaaaggcggcagattgtagtttttgttttggccggaaaggcttaccatgagttgccagggctgagagagatggagaaggattcgcggcggtgacagattaaattccccagttacattatagacttggaggtgggggatcttctcatcgttagaggccccgatcatgggagataggcggttcggagccagttctgcctaactttgtgttcactgatgttagggctgctagggctgcaaaggtgggcacccctactcgcctaagagctttctcctctcttctctttttcccctttgcctctctccttacatcacctgcccactaagtagacttgtccttgtgtggacgggagccggaaagccttgagaacttattcctcgacccggacatggcacaggagaaaatgaaactaggtttcaagtcgctgccgagttccactaccgcagacggcaacattctgagaagagtcaacagtgcccctttgatcaatggacttggacggagtctcactgtgtcgcccaggctggagtgcagtggcatgatctcggctcactgcaacctctgcctcccgggttcaagcgattctcctgcctcagactcccgagtagctgggacttcaggcacccgccaccacgcccacctaattttttgtatttttagtagagacggggtttcaccgtgttagccaggatggtcttgatctcctgaccttgtgatccgcccaccttggcctcccaaagtgttgggattacaggcgtgagccactgcgcctggcctaaatcttacttcttaaactagacttttaaaatgagatgttggatttcacatttcagtattataaggttttctagataccgtaaaaatgtctgaaaaatgcattcactacatatgttactaactttgctcttcaccttttgttgcatcatactaattgatagttgtaattcacagtaccatagactatcaggaagggattcagagaccagctttaccctccttgtttaacatatgaggaaactgaggcccataaatctccaaaatgacgtttagtggcagagccagtactaggaagctctgtttcctgactcctaaactactgttctggccactactaaccaatacctaagctgattaactctaaatgaatgcagcttttgggtcatttgaggtaggagagaatatattgttcacaaaatgaaaagcaaactaagattgaccaaaaaaaaatacattacctttttaaaataggcaggtagaaaaacatagaagggggactctgcatgttgtgctgagaacaagaacattttattcactcaggattttgctctaattctgttgtgggaaaaaggaattatgggacccactctactagtagaagagagcagtagggagaatgttggatttattgaagacaatataaaaagaagaaataggttgcaaatagacgatggaagatgtgtactggaaggaacctgtggatcctctttaatgtattaaatacaccagagaaggagtggacccttccctaatccttaaagccctggaaacagagagatctcagttatcccttcataccttgctttgttctgcaaaggatttttttgttttgtttgtttgttttttgcttatattagagcatagctacagtgttacattccatagcttaagatcctgatgcatgaagtaaaatttgtacagaaagataagggtcactagcatatttctgtagtaggagtttaaagatacagaaaccacaaagtggacggagtccagggactctagtctgtcagaaagaagtaacataggaatgatgtgtgacatccctgagattaggggacttgcccagatgatctgagggcatattttgtgctgttgtagaaaatgtagggcatagtcagagaagttattctgaagcaagaaaaatttagagtaggattacactgagccttagttgaattcattttcacctcagttctcatttgcatatgtatactgctcacttttctccctttttttttccttccttggccctctaatacttgagtacttcctctttctaaactatacctggccagtaaagcattcttttcagaaaggtgaaagtcactagcatatttctttagtaggaattaaagatatagaaaccacaaagtggacagagttcagagactccagtccctcagaaagaagtaacataggaatgatgtgtgacatgcctgaggtcagggaacttgcccaaatgatctgaggggatgttttgtgctgttgtagaaaatatttagcttgctaaacattgttgcacctctttcaagtaattttcgaactttgcttgatgtttcttctatataaagaccctcttgcaccagcatttgcagaattaaattccttaggtttgtttctttcatatcaactctttaatacagtattactgttttaaagaagtatctgcactgttttatgtatatcttgaactaataaaaattccaacgtcaaaaaaaaaaaaaa

SEQ ID NO: 4958 - DNA, 1947 bp, Homo sapiens
ttatcgcaggctctgaggggcgggacccaactgattgtcaaaggcggcagattgtagtttttgttttggccggaaaggcttaccatgagttgccagggctgagagagatggagaaggattcgcggcggtgacagattaaattccccagttacattatagacttggagacttgtccttgtgtggacgggagccggaaagccttgagaacttattcctcgacccggacatggcacaggagaaaatgaaactaggtttcaagtcgctgccgagttccactaccgcagacggcaacattctgagaagagtcaacagtgcccctttgatcaatggacttggttttaattcacaggtgttgcaagctgacatgttaagaattaggacaaacagaacaacatttaggaatcgacgctctctggaattctggcacttctgctcaagccggatgtcactgcgtcacttctccatccccaccccctcctcttccaaaggaagcaggggaaatgtctcatcttcctaagagaaaaggttgtgcttttcttgagcaattcatctgttctaattttaggcctactgacatctgtctcattaggttttgcttttcctattggcaaccacaaaccccaaatctagtgtatggcccacaaagttgcaagcatgtaatacattcctgatcctgctttatgccctgcacatctagcccatgttcagttcatgttaagtagcattataaaccatcttaaatcatttctgaaactaggcagagacatttataaacacagtgtacaaccctttgtttaggattttctgagcattttatctctagttactatagtaggaaatggcttaaaaacagcaaacctaggaaaatgaaaaataatttttaaaaatcttaatgtctttacaatatgaattttctgtgatctctcttaaatggaactaagcttggtttttcctcctatcttaatcctttcactggagataattcttagtaattagcttcacccagcaccctccctaacctcccgctacttctactcccagccaccttcacaccatgacatcattccttggtgctgatactcttggttccttccaaggacttttctttcttcctggagtgtgagaaaaaggcacagtgggaaatttacacaaaagataccagtgatgtttattacatctcagtgaagtcattatttctattttaatactttgtttcatgtggaaaaattatctaaggtaattcctttgcaaacgccacttgtagtacttaatttggggagaattctcttccagaagccttgttttctgcaattaatttctcacattattactaaaagaatcagccaatacaagatttgatccacattttgtccaattaaaaaattcttgtagcttatgattctgtagctcaagttcaaatcctacctacctcagacatttcacactatctccctgctggtgtcatcaatttcagtctatcttctcatgatttcctggatgaagtttttcagtgggaaatcctaagcctttgcctgaacctaaattggttccttcccatcccttaggtataaattaaaaataatctcttctagggaagtctttcatcattattttatgaaggaaatttgccataccatgttttctcacttataagtcggagctaaatgataagaacttatgaacacaaggaaacaacagacactagggtctacttgagcggggaggatgtgaggagggaagcagaaaagataactattaggtactgggcttactacctgggtgatgaaatagtatgtacaacaggccaggcgcggtggctcacacctgtaatcccagcactttggaaggccaaggtgggcagatcacctgaggtcaggagtttgagatcagcctggtcaacatggtgaaaccccatctctactaaaaatacaaaaaaaaaaaaaaaaa

SEQ ID NO: 4959 - DNA, 2269 bp, Homo sapiens
ggcgggacccaactgattgtcaaaggcggcagattgtagtttttgttttggccggaaaggcttaccatgagttgccagggctgagagagatggagaaggattcgcggcggtgacagattaaattccccagttacattatagacttggaggtgggggatcttctcatcgttagaggccccgatcatgggagataggcggttcggagccagttctgcctaactttgtgttcactgatgttagggctgctagggctgcaaaggtgggcacccctactcgcctaagagctttctcctctcttctctttttcccctttgcctctctccttacatcacctgcccactaagtagacttgtccttgtgtggacgggagccggaaagccttgagaacttattcctcgacccggacatggcacaggagaaaatgaaactaggtttcaagtcgctgccgagttccactaccgcagacggcaacattctgagaagagtcaacagtgcccctttgatcaatggacttggttttaattcacaggtgttgcaagctgacatgttaagaattaggacaaacagaacaacatttaggaatcgacgctctctggaaattacttcacccacttctgttgaacagaagcccaaagacctcttctgaccttgagactatgccttctcccaaatcgcccctttgctttatctcctaagaactctgaagttgccatgcctgttcctttctctcccaccaggaattctggcacttctgctcaagccggatgtcactgcgtcacttctccatccccaccccctcctcttccaaaggaagcaggggaaatgtctcatcttcctaagagaaaaggttgtgcttttcttgagcaattcatctgttctaattttaggcctactgacatctgtctcattaggttttgcttttcctattggcaaccacaaaccccaaatctagtgtatggcccacaaagttgcaagcatgtaatacattcctgatcctgctttatgccctgcacatctagcccatgttcagttcatgttaagtagcattataaaccatcttaaatcatttctgaaactaggcagagacatttataaacacagtgtacaaccctttgtttaggattttctgagcattttatctctagttactatagtaggaaatggcttaaaaacagcaaacctaggaaaatgaaaaataatttttaaaaatcttaatgtctttacaatatgaattttctgtgatctctcttaaatggaactaagcttggtttttcctcctatcttaatcctttcactggagataattcttagtaattagcttcacccagcaccctccctaacctcccgctacttctactcccagccaccttcacaccatgacatcattccttggtgctgatactcttggttccttccaaggacttttctttcttcctggagtgtgagaaaaaggcacagtgggaaatttacacaaaagataccagtgatgtttattacatctcagtgaagtcattatttctattttaatactttgtttcatgtggaaaaattatctaaggtaattcctttgcaaacgccacttgtagtacttaatttggggagaattctcttccagaagccttgttttctgcaattaatttctcacattattactaaaagaatcagccaatacaagatttgatccacattttgtccaattaaaaaattcttgtagcttatgattctgtagctcaagttcaaatcctacctacctcagacatttcacactatctccctgctggtgtcatcaatttcagtctatcttctcatgatttcctggatgaagtttttcagtgggaaatcctaagcctttgcctgaacctaaattggttccttcccatcccttaggtataaattaaaaataatctcttctagggaagtctttcatcattattttatgaaggaaatttgccataccatgttttctcacttataagtcggagctaaatgataagaacttatgaacacaaggaaacaacagacactagggtctacttgagcggggaggatgtgaggagggaagcagaaaagataactattaggtactgggcttactacctgggtgatgaaatagtatgtacaacaggccaggcgcggtggctcacacctgtaatcccagcactttggaaggccaaggtgggcagatcacctgaggtcaggagtttgagatcagcctggtcaacatggtgaaaccccatctctactaaaaatacaaaaaaaaaaaaaaaaa

SEQ ID NO: 4960 - DNA, 2089 bp, Homo sapiens
ttatcgcaggctctgaggggcgggacccaactgattgtcaaaggcggcagattgtagtttttgttttggccggaaaggcttaccatgagttgccagggctgagagagatggagaaggattcgcggcggtgacagattaaattccccagttacattatagacttggagacttgtccttgtgtggacgggagccggaaagccttgagaacttattcctcgacccggacatggcacaggagaaaatgaaactaggtttcaagtcgctgccgagttccactaccgcagacggcaacattctgagaagagtcaacagtgcccctttgatcaatggacttggttttaattcacaggtgttgcaagctgacatgttaagaattaggacaaacagaacaacatttaggaatcgacgctctctggaaattacttcacccacttctgttgaacagaagcccaaagacctcttctgaccttgagactatgccttctcccaaatcgcccctttgctttatctcctaagaactctgaagttgccatgcctgttcctttctctcccaccaggaattctggcacttctgctcaagccggatgtcactgcgtcacttctccatccccaccccctcctcttccaaaggaagcaggggaaatgtctcatcttcctaagagaaaaggttgtgcttttcttgagcaattcatctgttctaattttaggcctactgacatctgtctcattaggttttgcttttcctattggcaaccacaaaccccaaatctagtgtatggcccacaaagttgcaagcatgtaatacattcctgatcctgctttatgccctgcacatctagcccatgttcagttcatgttaagtagcattataaaccatcttaaatcatttctgaaactaggcagagacatttataaacacagtgtacaaccctttgtttaggattttctgagcattttatctctagttactatagtaggaaatggcttaaaaacagcaaacctaggaaaatgaaaaataatttttaaaaatcttaatgtctttacaatatgaattttctgtgatctctcttaaatggaactaagcttggtttttcctcctatcttaatcctttcactggagataattcttagtaattagcttcacccagcaccctccctaacctcccgctacttctactcccagccaccttcacaccatgacatcattccttggtgctgatactcttggttccttccaaggacttttctttcttcctggagtgtgagaaaaaggcacagtgggaaatttacacaaaagataccagtgatgtttattacatctcagtgaagtcattatttctattttaatactttgtttcatgtggaaaaattatctaaggtaattcctttgcaaacgccacttgtagtacttaatttggggagaattctcttccagaagccttgttttctgcaattaatttctcacattattactaaaagaatcagccaatacaagatttgatccacattttgtccaattaaaaaattcttgtagcttatgattctgtagctcaagttcaaatcctacctacctcagacatttcacactatctccctgctggtgtcatcaatttcagtctatcttctcatgatttcctggatgaagtttttcagtgggaaatcctaagcctttgcctgaacctaaattggttccttcccatcccttaggtataaattaaaaataatctcttctagggaagtctttcatcattattttatgaaggaaatttgccataccatgttttctcacttataagtcggagctaaatgataagaacttatgaacacaaggaaacaacagacactagggtctacttgagcggggaggatgtgaggagggaagcagaaaagataactattaggtactgggcttactacctgggtgatgaaatagtatgtacaacaggccaggcgcggtggctcacacctgtaatcccagcactttggaaggccaaggtgggcagatcacctgaggtcaggagtttgagatcagcctggtcaacatggtgaaaccccatctctactaaaaatacaaaaaaaaaaaaaaaaa

SEQ ID NO: 4961 - DNA, 2592 bp, Homo sapiens
atggcactgcccagatgcacgtggccaaattatgtttggagagcagtgatggcatgcttggtacaccggggattgggtgccccattgactctctgtatgttgggatgtttgcttcaggctggccatgtgctatcacaaaaattggatgatgtggacccactggtggctaccaactttggaaagataagagggattaagaaggaactcaataatgaaattttggggcctgttattcaatttcttggggttccatatgcagccccaccaacaggggaacgtcgttttcagcctccagaaccaccatctccctggtcagatatcagaaatgccactcaatttgctcctgtgtgtccccagaatatcattgatggcagattgccagaagtcatgcttcctgtgtggtttactaataacttggatgtggtttcatcatatgtgcaagaccagagcgaagactgcctatatttaaatatatatgtcccgactgaggatgtaaaaagaatatccaaggaatgtgccagaaagcccggcaagaaaatatgtagaaaaggaggtccccttacaaagaaacagacagatgatttaggtgataatgacggtgctgaagatgaagatattcgggacagtgggggtcccaaaccagtgatggtgtatatccatggtggctcatatatggaaggtactggaaatttatatgatggaagtgtcttggcaagttatggcaatgtgatcgtcatcacagtcaactatcgacttggagtactcggtttcttgagtacaggcgatcaggctgcaaaggggaactatggactccttgatctcatacaagctttaagatggactagtgaaaacattggattctttggtggtgaccccttaagaatcactgtttttggatctggtgctgggggttcatgtgtcaacctgctgactttatcccattattctgaaggtaaccgttggagcaattcaaccaaaggactttttcaacgagcaatagctcaaagtggaacagccctttccagctgggctgttagttttcaacctgcaaaatatgctagaatgttggccacaaaagttggttgcaatgtttcagatacagtagagttagtggaatgcctacagaagaagccttacaaagaacttgttgaccaagatattcaaccagctcgataccacatagcctttggacctgtgattgatggtgatgtaataccagacgacccccagatattgatggagcaaggagagtttctcaactatgatataatgttaggagtgaaccaaggggaagggttaaaatttgttgaaaatatagtagatagcgatgatggtatatcagctagtgattttgactttgctgtttcaaattttgttgataatttatatggatatcctgaaggcaaagatgttttgagagaaaccattaagttcatgtatactgactgggctgaccgtcataaccctgaaaccagaagaaagacattactggctttgtttacggaccatcagtgggtggcaccagctgtagccacagcggatcttcactcaaactttggttcacctacgtacttctatgccttttaccatcattgccaaacagatcaggttccagcttgggctgatgcagcccacggagacgaggttccctatgtactgggaatccccatgattggccctacagagttatttccttgcaatttctccaaaaatgatgtgatgctgagtgcagttgtaatgacatactggacaaattttgctaaaactggtgacccaaatcaaccagtccctcaagacacgaaattcattcataccaaacccaaccgttttgaagaagtagcatggaccagatattcccagaaagaccaactttatctccatattggattaaaaccaagagttaaagaacattacagagccaataaggtgaacctctggttggagttggtacctcatctgcataatctcaatgacatttctcagtatacctctacaacaactaaagtgccatcaactgacatcactttcagacctacgagaaaaaattctgtacctgtcacgtcagcctttcccactgccaagcaggatgatcccaaacaacaaccaagtccattttcagtggatcaaagggactactcaacagagctgagtgtcactattgcagttggagcatcactgctgtttctgaacatcttggcctttgcagccctgtactacaaaaaggataagaggagacatgatgttcacaggagatgcagccctcagcgcactactaccaatgatctaacccatgcacaagaagaggaaatcatgtccctccaaatgaagcacactgatttggatcatgaatgtgagtccattcatccacatgaggtggttcttcggaccgcctgtcccccagattacacactagctatgaggaggtcacctgatgatgttcccttaatgacacccaacaccattacaatgattcccaacactataccagggattcagcccttacacacattcaatacatttactggaggacagaacaatactctgccccatccccatccccacccccattcacattcaacaaccagggtatag

SEQ ID NO: 4962 - DNA, 555 bp, Homo sapiens
  misc_feature (508)..(508): n is a, c, g, or t
gagattaccagccacagacgggtcatgagcccggtattactgctggccctcctggggttcatcctcccactgccaggagtgcaggcgctgctctgccagtttgggacagttcagcatgtgtggaaggtgtccgacctgccccggcaatggacccctaagaacaccagctgcgacagcggcttggggtgccaggacacgttgatgctcattgagagcggaccccaagtgagcctggtgctctccaagggctgcacggaggccaaggaccaggagccccgcgtcactgagcaccggatgggccccggcctctccctgatctcctacaccttcgtgtgccgccaggaggacttctgcaacaacctcgttaactccctcccgctttgggccccacagcccccagcaggtgcctgcgggagggtcgggaggagagggaggggctgctagaaggggatccgctgagcacagaggggctgttacggagtccctcccacttccgctcgctatcccnaccctcgctggctccatccctcccctgagaaaaaaaaaaaaaaaaaa

SEQ ID NO: 4963 - DNA, 9847 bp, Homo sapiens; identical to SEQ ID NO: 1791

SEQ ID NO: 4964 - DNA, 2020 bp, Homo sapiens; identical to SEQ ID NO: 2307

SEQ ID NO: 4965 - DNA, 1049 bp, Homo sapiens; identical to SEQ ID NO: 772

SEQ ID NO: 4966 - DNA, 3677 bp, Homo sapiens; identical to SEQ ID NO: 576

SEQ ID NO: 4967 - DNA, 3626 bp, Homo sapiens
tcgcggaggcttggggcagccgggtagctcggaggtcgtggcgctgggggctagcaccagcgctctgtcgggaggcgcagcggttaggtggaccggtcagcggactcaccggccagggcgctcggtgctggaatttgatattcattgatccgggttttatccctcttcttttttcttaaacatttttttttaaaactgtattgtttctcgttttaatttatttttgcttgccattccccacttgaatcgggccgacggcttggggagattgctctacttccccaaatcactgtggattttggaaaccagcagaaagaggaaagaggtagcaagagctccagagagaagtcgaggaagagagagacggggtcagagagagcgcgcgggcgtgcgagcagcgaaagcgacaggggcaaagtgagtgacctgcttttgggggtgaccgccggagcgcggcgtgagccctcccccttgggatcccgcagctgaccagtcgcgctgacggacagacagacagacaccgcccccagccccagctaccacctcctccccggccggcggcggacagtggacgcggcggcgagccgcgggcaggggccggagcccgcgcccggaggcggggtggagggggtcggggctcgcggcgtcgcactgaaacttttcgtccaacttctgggctgttctcgcttcggaggagccgtggtccgcgcgggggaagccgagccgagcggagccgcgagaagtgctagctcgggccgggaggagccgcagccggaggagggggaggaggaagaagagaaggaagaggagagggggccgcagtggcgactcggcgctcggaagccgggctcatggacgggtgaggcggcggtgtgcgcagacagtgctccagccgcgcgcgctccccaggccctggcccgggcctcgggccggggaggaagagtagctcgccgaggcgccgaggagagcgggccgccccacagcccgagccggagagggagcgcgagccgcgccggccccggtcgggcctccgaaaccatgaactttctgctgtcttgggtgcattggagccttgccttgctgctctacctccaccatgccaagtggtcccaggctgcacccatggcagaaggaggagggcagaatcatcacgaagtggtgaagttcatggatgtctatcagcgcagctactgccatccaatcgagaccctggtggacatcttccaggagtaccctgatgagatcgagtacatcttcaagccatcctgtgtgcccctgatgcgatgcgggggctgctgcaatgacgagggcctggagtgtgtgcccactgaggagtccaacatcaccatgcagattatgcggatcaaacctcaccaaggccagcacataggagagatgagcttcctacagcacaacaaatgtgaatgcagaccaaagaaagatagagcaagacaagaaaaaaaatcagttcgaggaaagggaaaggggcaaaaacgaaagcgcaagaaatcccggtataagtcctggagcgttccctgtgggccttgctcagagcggagaaagcatttgtttgtacaagatccgcagacgtgtaaatgttcctgcaaaaacacagactcgcgttgcaaggcgaggcagcttgagttaaacgaacgtacttgcagatgtgacaagccgaggcggtgagccgggcaggaggaaggagcctccctcagggtttcgggaaccagatctctcaccaggaaagactgatacagaacgatcgatacagaaaccacgctgccgccaccacaccatcaccatcgacagaacagtccttaatccagaaacctgaaatgaaggaagaggagactctgcgcagagcactttgggtccggagggcgagactccggcggaagcattcccgggcgggtgacccagcacggtccctcttggaattggattcgccattttatttttcttgctgctaaatcaccgagcccggaagattagagagttttatttctgggattcctgtagacacacccacccacatacatacatttatatatatatatattatatatatataaaaataaatatctctattttatatatataaaatatatatattctttttttaaattaacagtgctaatgttattggtgtcttcactggatgtatttgactgctgtggacttgagttgggaggggaatgttcccactcagatcctgacagggaagaggaggagatgagagactctggcatgatcttttttttgtcccacttggtggggccagggtcctctcccctgcccaggaatgtgcaaggccagggcatgggggcaaatatgacccagttttgggaacaccgacaaacccagccctggcgctgagcctctctaccccaggtcagacggacagaaagacagatcacaggtacagggatgaggacaccggctctgaccaggagtttggggagcttcaggacattgctgtgctttggggattccctccacatgctgcacgcgcatctcgcccccaggggcactgcctggaagattcaggagcctgggcggccttcgcttactctcacctgcttctgagttgcccaggagaccactggcagatgtcccggcgaagagaagagacacattgttggaagaagcagcccatgacagctccccttcctgggactcgccctcatcctcttcctgctccccttcctggggtgcagcctaaaaggacctatgtcctcacaccattgaaaccactagttctgtccccccaggagacctggttgtgtgtgtgtgagtggttgaccttcctccatcccctggtccttcccttcccttcccgaggcacagagagacagggcaggatccacgtgcccattgtggaggcagagaaaagagaaagtgttttatatacggtacttatttaatatccctttttaattagaaattaaaacagttaatttaattaaagagtagggttttttttcagtattcttggttaatatttaatttcaactatttatgagatgtatcttttgctctctcttgctctcttatttgtaccggtttttgtatataaaattcatgtttccaatctctctctccctgatcggtgacagtcactagcttatcttgaacagatatttaattttgctaacactcagctctgccctccccgatcccctggctccccagcacacattcctttgaaataaggtttcaatatacatctacatactatatatatatttggcaacttgtatttgtgtgtatatatatatatatatgtttatgtatatatgtgattctgataaaatagacattgctattctgttttttatatgtaaaaacaaaacaagaaaaaatagagaattctacatactaaatctctctccttttttaattttaatatttgttatcatttatttattggtgctactgtttatccgtaataattgtggggaaaagatattaacatcacgtctttgtctctagtgcagtttttcgagatattccgtagtacatatttatttttaaacaacgacaaagaaatacagatatatcttaaaaaaaaaaaagcattttgtattaaagaatttaattctgatctcaaaaaaaaaaaaaaaaaa

SEQ ID NO: 4968 - DNA, 3608 bp, Homo sapiens
tcgcggaggcttggggcagccgggtagctcggaggtcgtggcgctgggggctagcaccagcgctctgtcgggaggcgcagcggttaggtggaccggtcagcggactcaccggccagggcgctcggtgctggaatttgatattcattgatccgggttttatccctcttcttttttcttaaacatttttttttaaaactgtattgtttctcgttttaatttatttttgcttgccattccccacttgaatcgggccgacggcttggggagattgctctacttccccaaatcactgtggattttggaaaccagcagaaagaggaaagaggtagcaagagctccagagagaagtcgaggaagagagagacggggtcagagagagcgcgcgggcgtgcgagcagcgaaagcgacaggggcaaagtgagtgacctgcttttgggggtgaccgccggagcgcggcgtgagccctcccccttgggatcccgcagctgaccagtcgcgctgacggacagacagacagacaccgcccccagccccagctaccacctcctccccggccggcggcggacagtggacgcggcggcgagccgcgggcaggggccggagcccgcgcccggaggcggggtggagggggtcggggctcgcggcgtcgcactgaaacttttcgtccaacttctgggctgttctcgcttcggaggagccgtggtccgcgcgggggaagccgagccgagcggagccgcgagaagtgctagctcgggccgggaggagccgcagccggaggagggggaggaggaagaagagaaggaagaggagagggggccgcagtggcgactcggcgctcggaagccgggctcatggacgggtgaggcggcggtgtgcgcagacagtgctccagccgcgcgcgctccccaggccctggcccgggcctcgggccggggaggaagagtagctcgccgaggcgccgaggagagcgggccgccccacagcccgagccggagagggagcgcgagccgcgccggccccggtcgggcctccgaaaccatgaactttctgctgtcttgggtgcattggagccttgccttgctgctctacctccaccatgccaagtggtcccaggctgcacccatggcagaaggaggagggcagaatcatcacgaagtggtgaagttcatggatgtctatcagcgcagctactgccatccaatcgagaccctggtggacatcttccaggagtaccctgatgagatcgagtacatcttcaagccatcctgtgtgcccctgatgcgatgcgggggctgctgcaatgacgagggcctggagtgtgtgcccactgaggagtccaacatcaccatgcagattatgcggatcaaacctcaccaaggccagcacataggagagatgagcttcctacagcacaacaaatgtgaatgcagaccaaagaaagatagagcaagacaagaaaaaaaatcagttcgaggaaagggaaaggggcaaaaacgaaagcgcaagaaatcccgtccctgtgggccttgctcagagcggagaaagcatttgtttgtacaagatccgcagacgtgtaaatgttcctgcaaaaacacagactcgcgttgcaaggcgaggcagcttgagttaaacgaacgtacttgcagatgtgacaagccgaggcggtgagccgggcaggaggaaggagcctccctcagggtttcgggaaccagatctctcaccaggaaagactgatacagaacgatcgatacagaaaccacgctgccgccaccacaccatcaccatcgacagaacagtccttaatccagaaacctgaaatgaaggaagaggagactctgcgcagagcactttgggtccggagggcgagactccggcggaagcattcccgggcgggtgacccagcacggtccctcttggaattggattcgccattttatttttcttgctgctaaatcaccgagcccggaagattagagagttttatttctgggattcctgtagacacacccacccacatacatacatttatatatatatatattatatatatataaaaataaatatctctattttatatatataaaatatatatattctttttttaaattaacagtgctaatgttattggtgtcttcactggatgtatttgactgctgtggacttgagttgggaggggaatgttcccactcagatcctgacagggaagaggaggagatgagagactctggcatgatcttttttttgtcccacttggtggggccagggtcctctcccctgcccaggaatgtgcaaggccagggcatgggggcaaatatgacccagttttgggaacaccgacaaacccagccctggcgctgagcctctctaccccaggtcagacggacagaaagacagatcacaggtacagggatgaggacaccggctctgaccaggagtttggggagcttcaggacattgctgtgctttggggattccctccacatgctgcacgcgcatctcgcccccaggggcactgcctggaagattcaggagcctgggcggccttcgcttactctcacctgcttctgagttgcccaggagaccactggcagatgtcccggcgaagagaagagacacattgttggaagaagcagcccatgacagctccccttcctgggactcgccctcatcctcttcctgctccccttcctggggtgcagcctaaaaggacctatgtcctcacaccattgaaaccactagttctgtccccccaggagacctggttgtgtgtgtgtgagtggttgaccttcctccatcccctggtccttcccttcccttcccgaggcacagagagacagggcaggatccacgtgcccattgtggaggcagagaaaagagaaagtgttttatatacggtacttatttaatatccctttttaattagaaattaaaacagttaatttaattaaagagtagggttttttttcagtattcttggttaatatttaatttcaactatttatgagatgtatcttttgctctctcttgctctcttatttgtaccggtttttgtatataaaattcatgtttccaatctctctctccctgatcggtgacagtcactagcttatcttgaacagatatttaattttgctaacactcagctctgccctccccgatcccctggctccccagcacacattcctttgaaataaggtttcaatatacatctacatactatatatatatttggcaacttgtatttgtgtgtatatatatatatatatgtttatgtatatatgtgattctgataaaatagacattgctattctgttttttatatgtaaaaacaaaacaagaaaaaatagagaattctacatactaaatctctctccttttttaattttaatatttgttatcatttatttattggtgctactgtttatccgtaataattgtggggaaaagatattaacatcacgtctttgtctctagtgcagtttttcgagatattccgtagtacatatttatttttaaacaacgacaaagaaatacagatatatcttaaaaaaaaaaaagcattttgtattaaagaatttaattctgatctcaaaaaaaaaaaaaaaaaa

SEQ ID NO: 4969 - DNA, 3554 bp, Homo sapiens
tcgcggaggcttggggcagccgggtagctcggaggtcgtggcgctgggggctagcaccagcgctctgtcgggaggcgcagcggttaggtggaccggtcagcggactcaccggccagggcgctcggtgctggaatttgatattcattgatccgggttttatccctcttcttttttcttaaacatttttttttaaaactgtattgtttctcgttttaatttatttttgcttgccattccccacttgaatcgggccgacggcttggggagattgctctacttccccaaatcactgtggattttggaaaccagcagaaagaggaaagaggtagcaagagctccagagagaagtcgaggaagagagagacggggtcagagagagcgcgcgggcgtgcgagcagcgaaagcgacaggggcaaagtgagtgacctgcttttgggggtgaccgccggagcgcggcgtgagccctcccccttgggatcccgcagctgaccagtcgcgctgacggacagacagacagacaccgcccccagccccagctaccacctcctccccggccggcggcggacagtggacgcggcggcgagccgcgggcaggggccggagcccgcgcccggaggcggggtggagggggtcggggctcgcggcgtcgcactgaaacttttcgtccaacttctgggctgttctcgcttcggaggagccgtggtccgcgcgggggaagccgagccgagcggagccgcgagaagtgctagctcgggccgggaggagccgcagccggaggagggggaggaggaagaagagaaggaagaggagagggggccgcagtggcgactcggcgctcggaagccgggctcatggacgggtgaggcggcggtgtgcgcagacagtgctccagccgcgcgcgctccccaggccctggcccgggcctcgggccggggaggaagagtagctcgccgaggcgccgaggagagcgggccgccccacagcccgagccggagagggagcgcgagccgcgccggccccggtcgggcctccgaaaccatgaactttctgctgtcttgggtgcattggagccttgccttgctgctctacctccaccatgccaagtggtcccaggctgcacccatggcagaaggaggagggcagaatcatcacgaagtggtgaagttcatggatgtctatcagcgcagctactgccatccaatcgagaccctggtggacatcttccaggagtaccctgatgagatcgagtacatcttcaagccatcctgtgtgcccctgatgcgatgcgggggctgctgcaatgacgagggcctggagtgtgtgcccactgaggagtccaacatcaccatgcagattatgcggatcaaacctcaccaaggccagcacataggagagatgagcttcctacagcacaacaaatgtgaatgcagaccaaagaaagatagagcaagacaagaaaatccctgtgggccttgctcagagcggagaaagcatttgtttgtacaagatccgcagacgtgtaaatgttcctgcaaaaacacagactcgcgttgcaaggcgaggcagcttgagttaaacgaacgtacttgcagatgtgacaagccgaggcggtgagccgggcaggaggaaggagcctccctcagggtttcgggaaccagatctctcaccaggaaagactgatacagaacgatcgatacagaaaccacgctgccgccaccacaccatcaccatcgacagaacagtccttaatccagaaacctgaaatgaaggaagaggagactctgcgcagagcactttgggtccggagggcgagactccggcggaagcattcccgggcgggtgacccagcacggtccctcttggaattggattcgccattttatttttcttgctgctaaatcaccgagcccggaagattagagagttttatttctgggattcctgtagacacacccacccacatacatacatttatatatatatatattatatatatataaaaataaatatctctattttatatatataaaatatatatattctttttttaaattaacagtgctaatgttattggtgtcttcactggatgtatttgactgctgtggacttgagttgggaggggaatgttcccactcagatcctgacagggaagaggaggagatgagagactctggcatgatcttttttttgtcccacttggtggggccagggtcctctcccctgcccaggaatgtgcaaggccagggcatgggggcaaatatgacccagttttgggaacaccgacaaacccagccctggcgctgagcctctctaccccaggtcagacggacagaaagacagatcacaggtacagggatgaggacaccggctctgaccaggagtttggggagcttcaggacattgctgtgctttggggattccctccacatgctgcacgcgcatctcgcccccaggggcactgcctggaagattcaggagcctgggcggccttcgcttactctcacctgcttctgagttgcccaggagaccactggcagatgtcccggcgaagagaagagacacattgttggaagaagcagcccatgacagctccccttcctgggactcgccctcatcctcttcctgctccccttcctggggtgcagcctaaaaggacctatgtcctcacaccattgaaaccactagttctgtccccccaggagacctggttgtgtgtgtgtgagtggttgaccttcctccatcccctggtccttcccttcccttcccgaggcacagagagacagggcaggatccacgtgcccattgtggaggcagagaaaagagaaagtgttttatatacggtacttatttaatatccctttttaattagaaattaaaacagttaatttaattaaagagtagggttttttttcagtattcttggttaatatttaatttcaactatttatgagatgtatcttttgctctctcttgctctcttatttgtaccggtttttgtatataaaattcatgtttccaatctctctctccctgatcggtgacagtcactagcttatcttgaacagatatttaattttgctaacactcagctctgccctccccgatcccctggctccccagcacacattcctttgaaataaggtttcaatatacatctacatactatatatatatttggcaacttgtatttgtgtgtatatatatatatatatgtttatgtatatatgtgattctgataaaatagacattgctattctgttttttatatgtaaaaacaaaacaagaaaaaatagagaattctacatactaaatctctctccttttttaattttaatatttgttatcatttatttattggtgctactgtttatccgtaataattgtggggaaaagatattaacatcacgtctttgtctctagtgcagtttttcgagatattccgtagtacatatttatttttaaacaacgacaaagaaatacagatatatcttaaaaaaaaaaaagcattttgtattaaagaatttaattctgatctcaaaaaaaaaaaaaaaaaa

SEQ ID NO: 4970 - DNA, 3519 bp, Homo sapiens
tcgcggaggcttggggcagccgggtagctcggaggtcgtggcgctgggggctagcaccagcgctctgtcgggaggcgcagcggttaggtggaccggtcagcggactcaccggccagggcgctcggtgctggaatttgatattcattgatccgggttttatccctcttcttttttcttaaacatttttttttaaaactgtattgtttctcgttttaatttatttttgcttgccattccccacttgaatcgggccgacggcttggggagattgctctacttccccaaatcactgtggattttggaaaccagcagaaagaggaaagaggtagcaagagctccagagagaagtcgaggaagagagagacggggtcagagagagcgcgcgggcgtgcgagcagcgaaagcgacaggggcaaagtgagtgacctgcttttgggggtgaccgccggagcgcggcgtgagccctcccccttgggatcccgcagctgaccagtcgcgctgacggacagacagacagacaccgcccccagccccagctaccacctcctccccggccggcggcggacagtggacgcggcggcgagccgcgggcaggggccggagcccgcgcccggaggcggggtggagggggtcggggctcgcggcgtcgcactgaaacttttcgtccaacttctgggctgttctcgcttcggaggagccgtggtccgcgcgggggaagccgagccgagcggagccgcgagaagtgctagctcgggccgggaggagccgcagccggaggagggggaggaggaagaagagaaggaagaggagagggggccgcagtggcgactcggcgctcggaagccgggctcatggacgggtgaggcggcggtgtgcgcagacagtgctccagccgcgcgcgctccccaggccctggcccgggcctcgggccggggaggaagagtagctcgccgaggcgccgaggagagcgggccgccccacagcccgagccggagagggagcgcgagccgcgccggccccggtcgggcctccgaaaccatgaactttctgctgtcttgggtgcattggagccttgccttgctgctctacctccaccatgccaagtggtcccaggctgcacccatggcagaaggaggagggcagaatcatcacgaagtggtgaagttcatggatgtctatcagcgcagctactgccatccaatcgagaccctggtggacatcttccaggagtaccctgatgagatcgagtacatcttcaagccatcctgtgtgcccctgatgcgatgcgggggctgctgcaatgacgagggcctggagtgtgtgcccactgaggagtccaacatcaccatgcagattatgcggatcaaacctcaccaaggccagcacataggagagatgagcttcctacagcacaacaaatgtgaatgcagaccaaagaaagatagagcaagacaagaaaatccctgtgggccttgctcagagcggagaaagcatttgtttgtacaagatccgcagacgtgtaaatgttcctgcaaaaacacagactcgcgttgcaagatgtgacaagccgaggcggtgagccgggcaggaggaaggagcctccctcagggtttcgggaaccagatctctcaccaggaaagactgatacagaacgatcgatacagaaaccacgctgccgccaccacaccatcaccatcgacagaacagtccttaatccagaaacctgaaatgaaggaagaggagactctgcgcagagcactttgggtccggagggcgagactccggcggaagcattcccgggcgggtgacccagcacggtccctcttggaattggattcgccattttatttttcttgctgctaaatcaccgagcccggaagattagagagttttatttctgggattcctgtagacacacccacccacatacatacatttatatatatatatattatatatatataaaaataaatatctctattttatatatataaaatatatatattctttttttaaattaacagtgctaatgttattggtgtcttcactggatgtatttgactgctgtggacttgagttgggaggggaatgttcccactcagatcctgacagggaagaggaggagatgagagactctggcatgatcttttttttgtcccacttggtggggccagggtcctctcccctgcccaggaatgtgcaaggccagggcatgggggcaaatatgacccagttttgggaacaccgacaaacccagccctggcgctgagcctctctaccccaggtcagacggacagaaagacagatcacaggtacagggatgaggacaccggctctgaccaggagtttggggagcttcaggacattgctgtgctttggggattccctccacatgctgcacgcgcatctcgcccccaggggcactgcctggaagattcaggagcctgggcggccttcgcttactctcacctgcttctgagttgcccaggagaccactggcagatgtcccggcgaagagaagagacacattgttggaagaagcagcccatgacagctccccttcctgggactcgccctcatcctcttcctgctccccttcctggggtgcagcctaaaaggacctatgtcctcacaccattgaaaccactagttctgtccccccaggagacctggttgtgtgtgtgtgagtggttgaccttcctccatcccctggtccttcccttcccttcccgaggcacagagagacagggcaggatccacgtgcccattgtggaggcagagaaaagagaaagtgttttatatacggtacttatttaatatccctttttaattagaaattaaaacagttaatttaattaaagagtagggttttttttcagtattcttggttaatatttaatttcaactatttatgagatgtatcttttgctctctcttgctctcttatttgtaccggtttttgtatataaaattcatgtttccaatctctctctccctgatcggtgacagtcactagcttatcttgaacagatatttaattttgctaacactcagctctgccctccccgatcccctggctccccagcacacattcctttgaaataaggtttcaatatacatctacatactatatatatatttggcaacttgtatttgtgtgtatatatatatatatatgtttatgtatatatgtgattctgataaaatagacattgctattctgttttttatatgtaaaaacaaaacaagaaaaaatagagaattctacatactaaatctctctccttttttaattttaatatttgttatcatttatttattggtgctactgtttatccgtaataattgtggggaaaagatattaacatcacgtctttgtctctagtgcagtttttcgagatattccgtagtacatatttatttttaaacaacgacaaagaaatacagatatatcttaaaaaaaaaaaagcattttgtattaaagaatttaattctgatctcaaaaaaaaaaaaaaaaaa

SEQ ID NO: 4971 - DNA, 3422 bp, Homo sapiens
tcgcggaggcttggggcagccgggtagctcggaggtcgtggcgctgggggctagcaccagcgctctgtcgggaggcgcagcggttaggtggaccggtcagcggactcaccggccagggcgctcggtgctggaatttgatattcattgatccgggttttatccctcttcttttttcttaaacatttttttttaaaactgtattgtttctcgttttaatttatttttgcttgccattccccacttgaatcgggccgacggcttggggagattgctctacttccccaaatcactgtggattttggaaaccagcagaaagaggaaagaggtagcaagagctccagagagaagtcgaggaagagagagacggggtcagagagagcgcgcgggcgtgcgagcagcgaaagcgacaggggcaaagtgagtgacctgcttttgggggtgaccgccggagcgcggcgtgagccctcccccttgggatcccgcagctgaccagtcgcgctgacggacagacagacagacaccgcccccagccccagctaccacctcctccccggccggcggcggacagtggacgcggcggcgagccgcgggcaggggccggagcccgcgcccggaggcggggtggagggggtcggggctcgcggcgtcgcactgaaacttttcgtccaacttctgggctgttctcgcttcggaggagccgtggtccgcgcgggggaagccgagccgagcggagccgcgagaagtgctagctcgggccgggaggagccgcagccggaggagggggaggaggaagaagagaaggaagaggagagggggccgcagtggcgactcggcgctcggaagccgggctcatggacgggtgaggcggcggtgtgcgcagacagtgctccagccgcgcgcgctccccaggccctggcccgggcctcgggccggggaggaagagtagctcgccgaggcgccgaggagagcgggccgccccacagcccgagccggagagggagcgcgagccgcgccggccccggtcgggcctccgaaaccatgaactttctgctgtcttgggtgcattggagccttgccttgctgctctacctccaccatgccaagtggtcccaggctgcacccatggcagaaggaggagggcagaatcatcacgaagtggtgaagttcatggatgtctatcagcgcagctactgccatccaatcgagaccctggtggacatcttccaggagtaccctgatgagatcgagtacatcttcaagccatcctgtgtgcccctgatgcgatgcgggggctgctgcaatgacgagggcctggagtgtgtgcccactgaggagtccaacatcaccatgcagattatgcggatcaaacctcaccaaggccagcacataggagagatgagcttcctacagcacaacaaatgtgaatgcagaccaaagaaagatagagcaagacaagaaaaatgtgacaagccgaggcggtgagccgggcaggaggaaggagcctccctcagggtttcgggaaccagatctctcaccaggaaagactgatacagaacgatcgatacagaaaccacgctgccgccaccacaccatcaccatcgacagaacagtccttaatccagaaacctgaaatgaaggaagaggagactctgcgcagagcactttgggtccggagggcgagactccggcggaagcattcccgggcgggtgacccagcacggtccctcttggaattggattcgccattttatttttcttgctgctaaatcaccgagcccggaagattagagagttttatttctgggattcctgtagacacacccacccacatacatacatttatatatatatatattatatatatataaaaataaatatctctattttatatatataaaatatatatattctttttttaaattaacagtgctaatgttattggtgtcttcactggatgtatttgactgctgtggacttgagttgggaggggaatgttcccactcagatcctgacagggaagaggaggagatgagagactctggcatgatcttttttttgtcccacttggtggggccagggtcctctcccctgcccaggaatgtgcaaggccagggcatgggggcaaatatgacccagttttgggaacaccgacaaacccagccctggcgctgagcctctctaccccaggtcagacggacagaaagacagatcacaggtacagggatgaggacaccggctctgaccaggagtttggggagcttcaggacattgctgtgctttggggattccctccacatgctgcacgcgcatctcgcccccaggggcactgcctggaagattcaggagcctgggcggccttcgcttactctcacctgcttctgagttgcccaggagaccactggcagatgtcccggcgaagagaagagacacattgttggaagaagcagcccatgacagctccccttcctgggactcgccctcatcctcttcctgctccccttcctggggtgcagcctaaaaggacctatgtcctcacaccattgaaaccactagttctgtccccccaggagacctggttgtgtgtgtgtgagtggttgaccttcctccatcccctggtccttcccttcccttcccgaggcacagagagacagggcaggatccacgtgcccattgtggaggcagagaaaagagaaagtgttttatatacggtacttatttaatatccctttttaattagaaattaaaacagttaatttaattaaagagtagggttttttttcagtattcttggttaatatttaatttcaactatttatgagatgtatcttttgctctctcttgctctcttatttgtaccggtttttgtatataaaattcatgtttccaatctctctctccctgatcggtgacagtcactagcttatcttgaacagatatttaattttgctaacactcagctctgccctccccgatcccctggctccccagcacacattcctttgaaataaggtttcaatatacatctacatactatatatatatttggcaacttgtatttgtgtgtatatatatatatatatgtttatgtatatatgtgattctgataaaatagacattgctattctgttttttatatgtaaaaacaaaacaagaaaaaatagagaattctacatactaaatctctctccttttttaattttaatatttgttatcatttatttattggtgctactgtttatccgtaataattgtggggaaaagatattaacatcacgtctttgtctctagtgcagtttttcgagatattccgtagtacatatttatttttaaacaacgacaaagaaatacagatatatcttaaaaaaaaaaaagcattttgtattaaagaatttaattctgatctcaaaaaaaaaaaaaaaaaa

SEQ ID NO: 4972 - DNA, 3488 bp, Homo sapiens
tcgcggaggcttggggcagccgggtagctcggaggtcgtggcgctgggggctagcaccagcgctctgtcgggaggcgcagcggttaggtggaccggtcagcggactcaccggccagggcgctcggtgctggaatttgatattcattgatccgggttttatccctcttcttttttcttaaacatttttttttaaaactgtattgtttctcgttttaatttatttttgcttgccattccccacttgaatcgggccgacggcttggggagattgctctacttccccaaatcactgtggattttggaaaccagcagaaagaggaaagaggtagcaagagctccagagagaagtcgaggaagagagagacggggtcagagagagcgcgcgggcgtgcgagcagcgaaagcgacaggggcaaagtgagtgacctgcttttgggggtgaccgccggagcgcggcgtgagccctcccccttgggatcccgcagctgaccagtcgcgctgacggacagacagacagacaccgcccccagccccagctaccacctcctccccggccggcggcggacagtggacgcggcggcgagccgcgggcaggggccggagcccgcgcccggaggcggggtggagggggtcggggctcgcggcgtcgcactgaaacttttcgtccaacttctgggctgttctcgcttcggaggagccgtggtccgcgcgggggaagccgagccgagcggagccgcgagaagtgctagctcgggccgggaggagccgcagccggaggagggggaggaggaagaagagaaggaagaggagagggggccgcagtggcgactcggcgctcggaagccgggctcatggacgggtgaggcggcggtgtgcgcagacagtgctccagccgcgcgcgctccccaggccctggcccgggcctcgggccggggaggaagagtagctcgccgaggcgccgaggagagcgggccgccccacagcccgagccggagagggagcgcgagccgcgccggccccggtcgggcctccgaaaccatgaactttctgctgtcttgggtgcattggagccttgccttgctgctctacctccaccatgccaagtggtcccaggctgcacccatggcagaaggaggagggcagaatcatcacgaagtggtgaagttcatggatgtctatcagcgcagctactgccatccaatcgagaccctggtggacatcttccaggagtaccctgatgagatcgagtacatcttcaagccatcctgtgtgcccctgatgcgatgcgggggctgctgcaatgacgagggcctggagtgtgtgcccactgaggagtccaacatcaccatgcagattatgcggatcaaacctcaccaaggccagcacataggagagatgagcttcctacagcacaacaaatgtgaatgcagaccaaagaaagatagagcaagacaagaaaatccctgtgggccttgctcagagcggagaaagcatttgtttgtacaagatccgcagacgtgtaaatgttcctgcaaaaacacagactcgcgttgcaaggcgaggcagcttgagttaaacgaacgtacttgcagatctctcaccaggaaagactgatacagaacgatcgatacagaaaccacgctgccgccaccacaccatcaccatcgacagaacagtccttaatccagaaacctgaaatgaaggaagaggagactctgcgcagagcactttgggtccggagggcgagactccggcggaagcattcccgggcgggtgacccagcacggtccctcttggaattggattcgccattttatttttcttgctgctaaatcaccgagcccggaagattagagagttttatttctgggattcctgtagacacacccacccacatacatacatttatatatatatatattatatatatataaaaataaatatctctattttatatatataaaatatatatattctttttttaaattaacagtgctaatgttattggtgtcttcactggatgtatttgactgctgtggacttgagttgggaggggaatgttcccactcagatcctgacagggaagaggaggagatgagagactctggcatgatcttttttttgtcccacttggtggggccagggtcctctcccctgcccaggaatgtgcaaggccagggcatgggggcaaatatgacccagttttgggaacaccgacaaacccagccctggcgctgagcctctctaccccaggtcagacggacagaaagacagatcacaggtacagggatgaggacaccggctctgaccaggagtttggggagcttcaggacattgctgtgctttggggattccctccacatgctgcacgcgcatctcgcccccaggggcactgcctggaagattcaggagcctgggcggccttcgcttactctcacctgcttctgagttgcccaggagaccactggcagatgtcccggcgaagagaagagacacattgttggaagaagcagcccatgacagctccccttcctgggactcgccctcatcctcttcctgctccccttcctggggtgcagcctaaaaggacctatgtcctcacaccattgaaaccactagttctgtccccccaggagacctggttgtgtgtgtgtgagtggttgaccttcctccatcccctggtccttcccttcccttcccgaggcacagagagacagggcaggatccacgtgcccattgtggaggcagagaaaagagaaagtgttttatatacggtacttatttaatatccctttttaattagaaattaaaacagttaatttaattaaagagtagggttttttttcagtattcttggttaatatttaatttcaactatttatgagatgtatcttttgctctctcttgctctcttatttgtaccggtttttgtatataaaattcatgtttccaatctctctctccctgatcggtgacagtcactagcttatcttgaacagatatttaattttgctaacactcagctctgccctccccgatcccctggctccccagcacacattcctttgaaataaggtttcaatatacatctacatactatatatatatttggcaacttgtatttgtgtgtatatatatatatatatgtttatgtatatatgtgattctgataaaatagacattgctattctgttttttatatgtaaaaacaaaacaagaaaaaatagagaattctacatactaaatctctctccttttttaattttaatatttgttatcatttatttattggtgctactgtttatccgtaataattgtggggaaaagatattaacatcacgtctttgtctctagtgcagtttttcgagatattccgtagtacatatttatttttaaacaacgacaaagaaatacagatatatcttaaaaaaaaaaaagcattttgtattaaagaatttaattctgatctcaaaaaaaaaaaaaaaaaa

SEQ ID NO: 4973 - DNA, 3392 bp, Homo sapiens
tcgcggaggcttggggcagccgggtagctcggaggtcgtggcgctgggggctagcaccagcgctctgtcgggaggcgcagcggttaggtggaccggtcagcggactcaccggccagggcgctcggtgctggaatttgatattcattgatccgggttttatccctcttcttttttcttaaacatttttttttaaaactgtattgtttctcgttttaatttatttttgcttgccattccccacttgaatcgggccgacggcttggggagattgctctacttccccaaatcactgtggattttggaaaccagcagaaagaggaaagaggtagcaagagctccagagagaagtcgaggaagagagagacggggtcagagagagcgcgcgggcgtgcgagcagcgaaagcgacaggggcaaagtgagtgacctgcttttgggggtgaccgccggagcgcggcgtgagccctcccccttgggatcccgcagctgaccagtcgcgctgacggacagacagacagacaccgcccccagccccagctaccacctcctccccggccggcggcggacagtggacgcggcggcgagccgcgggcaggggccggagcccgcgcccggaggcggggtggagggggtcggggctcgcggcgtcgcactgaaacttttcgtccaacttctgggctgttctcgcttcggaggagccgtggtccgcgcgggggaagccgagccgagcggagccgcgagaagtgctagctcgggccgggaggagccgcagccggaggagggggaggaggaagaagagaaggaagaggagagggggccgcagtggcgactcggcgctcggaagccgggctcatggacgggtgaggcggcggtgtgcgcagacagtgctccagccgcgcgcgctccccaggccctggcccgggcctcgggccggggaggaagagtagctcgccgaggcgccgaggagagcgggccgccccacagcccgagccggagagggagcgcgagccgcgccggccccggtcgggcctccgaaaccatgaactttctgctgtcttgggtgcattggagccttgccttgctgctctacctccaccatgccaagtggtcccaggctgcacccatggcagaaggaggagggcagaatcatcacgaagtggtgaagttcatggatgtctatcagcgcagctactgccatccaatcgagaccctggtggacatcttccaggagtaccctgatgagatcgagtacatcttcaagccatcctgtgtgcccctgatgcgatgcgggggctgctgcaatgacgagggcctggagtgtgtgcccactgaggagtccaacatcaccatgcagattatgcggatcaaacctcaccaaggccagcacataggagagatgagcttcctacagcacaacaaatgtgaatgcagatgtgacaagccgaggcggtgagccgggcaggaggaaggagcctccctcagggtttcgggaaccagatctctcaccaggaaagactgatacagaacgatcgatacagaaaccacgctgccgccaccacaccatcaccatcgacagaacagtccttaatccagaaacctgaaatgaaggaagaggagactctgcgcagagcactttgggtccggagggcgagactccggcggaagcattcccgggcgggtgacccagcacggtccctcttggaattggattcgccattttatttttcttgctgctaaatcaccgagcccggaagattagagagttttatttctgggattcctgtagacacacccacccacatacatacatttatatatatatatattatatatatataaaaataaatatctctattttatatatataaaatatatatattctttttttaaattaacagtgctaatgttattggtgtcttcactggatgtatttgactgctgtggacttgagttgggaggggaatgttcccactcagatcctgacagggaagaggaggagatgagagactctggcatgatcttttttttgtcccacttggtggggccagggtcctctcccctgcccaggaatgtgcaaggccagggcatgggggcaaatatgacccagttttgggaacaccgacaaacccagccctggcgctgagcctctctaccccaggtcagacggacagaaagacagatcacaggtacagggatgaggacaccggctctgaccaggagtttggggagcttcaggacattgctgtgctttggggattccctccacatgctgcacgcgcatctcgcccccaggggcactgcctggaagattcaggagcctgggcggccttcgcttactctcacctgcttctgagttgcccaggagaccactggcagatgtcccggcgaagagaagagacacattgttggaagaagcagcccatgacagctccccttcctgggactcgccctcatcctcttcctgctccccttcctggggtgcagcctaaaaggacctatgtcctcacaccattgaaaccactagttctgtccccccaggagacctggttgtgtgtgtgtgagtggttgaccttcctccatcccctggtccttcccttcccttcccgaggcacagagagacagggcaggatccacgtgcccattgtggaggcagagaaaagagaaagtgttttatatacggtacttatttaatatccctttttaattagaaattaaaacagttaatttaattaaagagtagggttttttttcagtattcttggttaatatttaatttcaactatttatgagatgtatcttttgctctctcttgctctcttatttgtaccggtttttgtatataaaattcatgtttccaatctctctctccctgatcggtgacagtcactagcttatcttgaacagatatttaattttgctaacactcagctctgccctccccgatcccctggctccccagcacacattcctttgaaataaggtttcaatatacatctacatactatatatatatttggcaacttgtatttgtgtgtatatatatatatatatgtttatgtatatatgtgattctgataaaatagacattgctattctgttttttatatgtaaaaacaaaacaagaaaaaatagagaattctacatactaaatctctctccttttttaattttaatatttgttatcatttatttattggtgctactgtttatccgtaataattgtggggaaaagatattaacatcacgtctttgtctctagtgcagtttttcgagatattccgtagtacatatttatttttaaacaacgacaaagaaatacagatatatcttaaaaaaaaaaaagcattttgtattaaagaatttaattctgatctcaaaaaaaaaaaaaaaaaa

SEQ ID NO: 4974 - DNA, 3677 bp, Homo sapiens; identical to SEQ ID NO: 576

SEQ ID NO: 4975 - DNA, 3626 bp, Homo sapiens; identical to SEQ ID NO: 4967

SEQ ID NO: 4976 - DNA, 3608 bp, Homo sapiens; identical to SEQ ID NO: 4968

SEQ ID NO: 4977 - DNA, 3554 bp, Homo sapiens; identical to SEQ ID NO: 4969

SEQ ID NO: 4978 - DNA, 3519 bp, Homo sapiens; identical to SEQ ID NO: 4970

SEQ ID NO: 4979 - DNA, 3422 bp, Homo sapiens; identical to SEQ ID NO: 4971

SEQ ID NO: 4980 - DNA, 3488 bp, Homo sapiens; identical to SEQ ID NO: 4972

SEQ ID NO: 4981 - DNA, 3392 bp, Homo sapiens; identical to SEQ ID NO: 4973

SEQ ID NO: 4982 - DNA, 9243 bp, Homo sapiens; identical to SEQ ID NO: 785

SEQ ID NO: 4983 - DNA, 9171 bp, Homo sapiens
atttcatttcttccactaaagcgtttgcggagacttcaaggtataatctatcccagatcctttcccagagagaaacttggcgatcacgttttcacatgatgctcacgctcagggcgcttcaattatccctccccacaaagataggtggcgcgtgtttcagggtctctcgtctctctcctacagaaaagaaaaagaaaaaaatgtcattagaagaggcgtaacacgtcagtccgtccccaggtttgtgtttcctggagtggccgaaagagatcagttctaacctgctctgcaggaataacggtcctgcctcccgacactcttggcgaggtttttgtacagtttgctccgggagctgtttcttcgcttccacctttttctcccccacacttcgcggcttcttcatgctttttcttctcaccatttctggccaaaactacaaacaagacttcgcagatcgagcctgcgtgctgccgaagcagggcgccgagtccatgcgaactgccatctgatccgctcttatcaatgaagcagccgatcatggcggatggcccccggtgcaagaggcgcaaacaagccaatcccaggaggaaaaacgtggtgaactatgacaatgtagtggacacaggttctgaaacagatgaggaagacaagcttcatattgctgaggatgacggtattgccaaccctctggaccaggagacgagtccagctagtgtgcccaaccatgagtcctccccacacgtgagccaagctctgttgccaagagaggaagaggaagatgaaataagggagggtggagtggaacacccctggcacaacaacgagattctacaagcctctgtagatggtccagtgaagaatgcaaattgcacatcagattttgaggaatactttgccaaaagaaaactggaggaacgcgatggtcatgcagtcagcatcgaggagtaccttcagcgcagtgacacagccattatttacccagaagcccctgaggagctgtctcgccttggcacgccagaggccaatgggcaagaagaaaatgacctgccacctggaactccagatgcttttgcccaactgctgacctgcccctactgcgaccggggctacaagcgcttgacatcactgaaggagcacatcaagtaccgccacgagaagaatgaagagaacttttcctgccctctctgtagctacacgtttgcctaccgcacccagctcgagcggcatatggtgacacacaagccagggacagatcagcaccaaatgctaacccaaggagcaggtaatcgcaagttcaaatgcacagagtgtggcaaggccttcaaatataaacaccatctgaaagaacacctgcgaattcacagtggtgaaaaaccttacgagtgcccaaactgcaagaaacgtttctcccattctggttcctacagttcgcacatcagcagcaagaaatgtattggtttaatctctgtaaatggccgaatgagaaacaatatcaagacgggttcttcccctaattctgtttcttcttctcctactaattcagccattacccagttaagaaacaagttggagaatggaaaaccacttagtatgtctgaacagacaggcttacttaaaattaaaacagaaccactagacttcaatgactataaagttcttatggctacacacgggtttagtggcactagtccctttatgaatggtgggcttggagccaccagccctttaggagttcatccatctgctcagagtccaatgcagcacttaggtgtagggatggaagcccctttacttgggtttcccaccatgaatagtaatttaagtgaggtacaaaaggttctacagattgtggacaatactgtttccaggcaaaaaatggactgcaaggctgaagaaatttcaaagttgaaaggttatcacatgaaggatccatgctctcaacctgaggaacaaggagttacttctcctaatattccgcctgtcggtcttccggtagtgagtcataatggtgccactaaaagtattattgactatacgttggaaaaagtcaatgaagccaaagcttgcctccagagcttgactactgactcaaggagacagatcagtaatataaagaaagagaagctacgtactttaatagatttggtcactgatgacaaaatgattgagaaccacaacatatccactccattttcatgccagttctgtaaagaaagttttcctggccccatccctttgcatcagcatgaacgttacctttgtaagatgaatgaagagatcaaggcggtcctgcagcctcatgaaaacatagtccccaacaaagccggagtttttgttgataataaagccctcctcttgtcatctgtactttctgagaaaggaatgacaagccccatcaacccatacaaggaccacatgtctgtactcaaagcatactatgctatgaacatggagcccaactccgatgaactgctgaaaatttccattgctgtgggccttcctcaggaatttgtgaaggaatggtttgaacaacgaaaagtctaccagtactcaaattccaggtccccatccctggaaagaagctccaagccgttagctcccaacagtaaccctcccacaaaagactctttattacccaggtctcctgtaaaacctatggactccataacatcaccatctatagcagaactccacaacagtgttacgaattgtgatcctcctctcaggctaacaaaaccttcccattttaccaatattaaaccagttgaaaaattggaccactccaggagtaatactccttctcccttaaatctttcctccacatcttctaaaaactcccacagtagttcatacactccaaacagcttctcttctgaggagctccaggctgagcctttagacttgtcattaccaaaacaaatgaaagaacccaaaagtattatagccacaaagaacaaaacaaaagctagtagcatcagtttagatcataacagtgtttcttcctcatctgaaaactcagatgagcctctgaacttgacttttatcaagaaggaattttcaaattcaaataatctggacaacaaaagcactaacccagtgttcagcatgaacccatttagtgccaaacctttatacacagctcttccacctcaaagcgcatttccccctgctactttcatgccaccagtccagaccagtattcctgggctacgaccatacccaggactggatcagatgagcttcctaccacatatggcctacacctacccaactggagcagctacttttgctgatatgcagcaaaggagaaagtaccagcggaaacaaggatttcagggagaattgcttgatggagcacaagactacatgtcaggcctagatgatatgacagactccgactcctgtctgtctcgcaaaaagatcaagaagacagagagtggcatgtatgcatgtgacttatgtgacaagacattccagaaaagcagttcccttctgcgacataaatacgaacacacaggaaaaagaccacatcagtgtcagatttgtaagaaagcgtttaaacacaagcaccaccttatcgagcactcaaggcttcactcgggcgagaagccctatcagtgtgataaatgtggcaagcgcttctcacactcgggctcgtactcgcagcacatgaatcacaggtattcctactgcaagcgggaggcggaggagcgggaagcggcggagcgcgaggcgcgcgagaaagggcacttggaacccaccgagctgctgatgaaccgggcttacttgcagagcattacccctcaggggtactctgactcggaggagagggagagtatgccgagggatggcgagagcgagaaggagcacgagaaagaaggcgaggatggctacgggaagctgggcagacaggatggcgacgaggagttcgaggaggaagaggaagaaagtgaaaataaaagtatggatacggatcccgaaacgatacgagatgaagaagagactggagatcactccatggacgatagttcggaggatgggaaaatggaaaccaaatcagaccacgaggaagacaatatggaagatggcatgtaataaactactgcattttaagcttcctatttttttttccagtagtattgttacctgcttgaaaacactgctgtgttaagctgttcatgcacgtgcctgacgcttccaggaagctgtagagagggacagaaggggcggttcagccaagacagatgtagacggagttggagctgggtattgttaaaaactgcattatgcaaaaattttgtacagtgttaaggcctaaaaactgtgtggttcagagactaattcctgtgtttaatagcatttatactttaagcacaactagaaaattgtaagaattgcactctacttatgtatcactacaaactttaaaaaactatgtctaatttatattaatacattttaaaaaggtgcccgcactaccatacatcagtatttttattattattattgttattcctttttaatttaatgtgctcgcactacaatgcatcagtattatgattcctctgtactttcctttcgctattcatcaatttcccattttttttttcagcttaagtaaccacacaattttaggcctcaatttttttttttttctgtgaaggaacttgaagtgatgcatgtgtgaatttaagataccgaagtcttaaagtgacctggacgtgaaggaaaaagtaagatgagaaataaagaaagcctttgtaaggtggttttaaaagccttatatgcaaaccttttaatctgtgtttctgcaagtgccatccttgtacagtgttaagagggtaacatgggttacctttgcaccagcttcagtgttaagctcaccctgttctttgaagcacccatgtcagtattagaagaataggcagcagttccttagtttacatatgtttgtgcaattattttctgtacttttttgttcattaattttgtcagtattacaccaaactgtttttgcaacaaaaaaattttttttgcattcatttaattttaggtcaaataacattttatttatgtggctcattttatatttcctaattttatttatttcatactgtagtgtacagtattatagttcttcaatatatagatatattttagtaaaaaaggaacatgacgttgatcatttgggcaaattttacgtaaagagaagagcatttattgtgttttggaacattaattgtgagatgggatttttcaattttattattttatttttgtttttttccaattactggaaattccaaatttgggaacttttgatacgatcttgtgaaaacactgtattttcgactgaaaattccactttcttcatcttgttttttagctaaaaagagggactgttaaatacaatgtatgataccatgacaaaaatctttcctgaattgtctttgtaaaagtattattgaattttcaatttgtaatttcttttgaaaatgaccatgctcgaataaaaatgtagccaaactaagaatgtagttaatgagttctgtacttttagagagttttccttcaatgaccattaacatgtaacatgctttatgcttataataatgctaattatgtttttttcatataattttagtttagcaataattttgactggtaccaataactgttttttaaaattccatacctatgtacagcaattttacagcttttctcaactgatcctgattccagattgtgtatttttatgtgaggttatattattcaaatttagtctatttactttacagacatttctacttttgcattacgagtatttagagattatgtgttaaaaattcacttctctgtccaaggggtctttgtgatttattcaaaaaaaagtctaatttcaaaaagacagctattattcagtgttatttataatatgtaaccttttttaaaggattgggatagtttatctcactttttgaaatgcagacagtagtttaccgtttatctgaaactagaaggcgtgggtgggagaggaaaagctaaaagcaaatgctaacaaaaataaccgtgattttctaagacagtttttcagtttttacaagatgaccctaatattcagaatatgaatgtattcgtaggttttacataatgacttttatcaagaaactagattctgcttcttaaatctaattgccaagtgaagaataacagaaaaaacagattaccttatcaaatttacagctcttgaatatacagaactataatatagtagctgtccatgtattttttctactttagaatcaaagaagaaaagcatcattttgctattaaatttgctaaaattttgagtatgatatttccagttggcaagaacaacatatttatatttattccttagccataataccactttcctaaatttcacaaaagtcattctttgcaacttgaaactcaatagaaagtgtgtatgtgtgtgtgtgtatatatatatatatatacacacacacacatacacagaaaggatgtaatgaagatacagtaatagttgagcagacctttttagaaaaacatgtttttagctctatcttcaaactttctggcagagggggtggggggggcagggggaggagtggcatcaaaatgctatgcctcctgttatccacagcctagagtttttatatttggaaagtttagaaaattctatcctcgtttctccttctttgaatggcacaaataaatacactacataaatttttctggtttgaaaggctctaggcgataactttattaattcaacctgaaaatatcaagccattaaattttgtccgggtagaataaatccctgtggcctcttttaaagcaatgtaggtctctgttgcccatggggcatatctgtgtcccaatccacaagagataggaccaacaaacaatgaatgtgcaacctaactctttctccttggaaagaagaaagtgtgcacgaagtagaggagggtgggcagaccctgccttgcccctcctgttacccccttctctgtcatttgttcctaactccatttcataggcaggctcagaatacctgagtctgaaaatatcaggataacacttgtgaattgtgacaatcactacaatgtcccatatctgaggagttttttttaatgctatttatccgctggacacgattgcacattagggctgcataatcctctaactctagggaaaaataaaaacttttgatttgtcttaagattcttctccaaggtcgcaaacaagaaattcccctccacaaccaagagatgtgcattttagtaacatcagatgtgttcttctgttttatcaactacttactcttcccacacgcttagttctaaatctaacctttcccccctcgaatagggggcaggggaggatgaggaaacactggaacaactgaacacccctgcccattttctccaagagccttttgtattctagcatatctgtgcaatcttttcttttttcttcacatgacactgtaagcttaggcctgaaataactgggaagagagatgcgtatcagaatttctccgcaagagctaaacaaaacatacatcttccttagcatgaattggactgggggcggagtgggagggcttggaggaaaggggaaagaagggactatatttgaataaatatgaataaatgtattagatacttttcacaatcagataacttttaaaaaggtcattttttatctttctaataatgtaagccttaataaaagcaaatcttagtcacaaatttgaggagactgcccaataataagtttacatgtatttgaactgaaaaattgttaaccatgcttttgctccaagatgtgtgaggccattcaggggctgtagggccctggatatacacacaaacaagtgtgtgtatatctggagccccacacattgtaataaacacagctgcatttatttgactatgtgatcccatgtacatgtaaaaacattcaaacaaacacactcagcggatttatttattgtgcaatggggcaattattcaaataaacatgctcaatgcaattatttgaatctcacattgcatgttcatcaatcatagcactaaaaaaagagggggaaaaaacaccaaagaattcacatggggaaaaaatatatatatgaaaaccaccttattatagattttatagggcagctgaggttatggctcccttcttaactgtaactcaactattctgtattcaatgacatttgtttctaatgattaattggttcactcacttgatcatataatagcaaactttataaacctgtattgtgtagagatgtgaaatctctatatttcaagagcagaagagttctttctagacaccttacatcaagggacactggtccaattattatcgcttatataagcactcctataaattctgaaaaattttatacatgcaacaaaacattcctacatttgaagacattaagaaaaatcacaggtgactcatctgatcattctatatattaataaatattatgacatatatgtgaacacatcacaaatcatattggtgtaccaagaggcaatttatgcctctcttaagtatgtactgacataacctaatatactaaaatgggaaggggcttttagtcactgaaatatgcatcgtgtaacaaagatgaagaaaatacatggcttgtgcccatcataaaaaaagattcagactgaaggcttagctttggttttttcaattaaattgttaaactgtgcacagtgatttttttttagaacttgagacatttgtgatgttggctgtttaaatctttgttaccttcgctgtgaattgaaattgtacatatttagtaaatcatgcagacaaaacaaactttttagacaatatttttattggagagttttcttttcctgtatccatgttaaaaaaaaaaaagacctcctttcccaaaataaaaatgtcaatactaaatttaaagaagtataaaggaatgattgcttcctttagagcaaaatatttaaataaacatggagataattggcaacatgttctttttgggctagtaggctgtgtccaattttttgggtctgatgtttcagagggcctctgtttcagggttgaagatgatatattaatctcggaattaaacaaatgctattaaataac

SEQ ID NO: 4984 - DNA, 3026 bp, Homo sapiens
atttcatttcttccactaaagcgtttgcggagacttcaaggtataatctatcccagatcctttcccagagagaaacttggcgatcacgttttcacatgatgctcacgctcagggcgcttcaattatccctccccacaaagataggtggcgcgtgtttcagggtctctcgtctctctcctacagaaaagaaaaagaaaaaaatgtcattagaagaggcgtaacacgtcagtccgtccccaggtttgtgtttcctggagtggccgaaagagatcagttctaacctgctctgcaggaataacggtcctgcctcccgacactcttggcgaggtttttgtacagtttgctccgggagctgtttcttcgcttccacctttttctcccccacacttcgcggcttcttcatgctttttcttctcaccatttctggccaaaactacaaacaagacttcgcagatcgagcctgcgtgctgccgaagcagggcgccgagtccatgcgaactgccatctgatccgctcttatcaatgaagcagccgatcatggcggatggcccccggtgcaagaggcgcaaacaagccaatcccaggaggaaaaacgccttggagtcagaaatgagcactcggagcgggagatgccctgctgctgcttgccaccggtgcggcccgtttgtaacttgcaaagtttgttgcttttgcccctgattcgggcagcgggtcctgggatgctcctgcttccctcctgcctcccacggagcccgggaagagggtctgcctccccatcccgccaccttccagcatcagcctctgaaaaatctcacagagacatgcacgttgtagcaaaaatcaaatccggaaactgcttgtttcagagaaagaaatgaagttgtcttttaaagaaaaactgaattaggaggagagaaaagggaaataggagaagaaaggaaaagttaaatttgatttttctccagagtttccactaaagggttggggacagtgtgaaggagaaggggagctttttacaaatgcctttggtctctgaacttcagtggcaaagaacagggatcaagttgaatgttctcagggctttggatcctagaggagaaacaatcagaagagcagaaatggttatccctgtttaaaataagccctcactctttaccacttccttaaaggagtggaggtgctggtagtgatggttagaggcaatgagggacggagaagttgctcccgtttcagagatgcttaaatgaaaaggaaagaaaatgcagtcaaccccttctccaggaggtgcctcctagctctcctccctgagaggtgaagttgggatggggcaacgagagtcatacacacttagacaaggaagtttccttcggatcactgtcagtccagacttggttatctttgcaaagtgtggaaatctttggcaagtagctttcttcgtaaagttgatgagcttctagggagcctgttttgctgactttcaaagcactggggcaggttgtgtggcaggtaccagttctgagggcgctccaaagatatccatctccatccttttttctctgtggagatcttctgcaagttttgtcacgctgcacacacacaaggctgggggctatgtatctaggctgatctatttgttttattttggtctggaaaaactaagccaattggggtagaaacatgctttccttcgtagcagagccagtaggctgctggtgtccatagagtgacagtccaccaggactaagggtgggctgaggattttaaactttacattgtttctctgttaccagatacaaataaattcacgtcttccaccatttgttttcaaatagggtaaaaccaagattaaagttccctgctcaactgctatgtcataggtttcagtgtttcccttccttcttaatttgcttaaagaaaattccaagaggttattaaagaccttgatgccatattaagaatatttcctgggaaaaatgtatgtctaccctgaaggtaggaaaggagggcgttgctagcctctagcagtgccgcgtttattctaagatgtgggagattcttttccttgcaacagtttttgtcatctgcattcttccaaggcttttaaggtgcattttcttctgtgtgaaaggaaattctttgtccttttcctctcagcaccgtggcttcccaaggtagacactattttgtgcctgtcacagagagagggagtgcaggtttgcaatgctcacagacaattgattgtctgccctaatgtgtttcatttacatgtttataacgtcaatggtgctggggtgtccactgtaccattcattcccgcattcccacaagggggcaattgtctgaatggccaagtcagacacctttttgattgctctttggttgtcttttcagagcaaagagataaaggaggaaaatctgtgatgcagaaacactagttgaaaatatacagaattaaatgtcaccacaaaagcagatgttaacataagcccaaatatgctttttagccaagatgtgaaggttgaaaaaaataattcagagcagagggaaggatgatttaaaccaataaatatagccctattccccctctttacttcttttctgtctttagcaatcagaagatgaaatgtaattttccttttcatttttaagccttgaaacatccaggcacctcctcattatttgtatgtttgctgtgatttgtgaattttgtatatatttacatagctctgtttatgccaacagcatcagcttaccacttggaaaatctattgaatgactatttgggctgtggggagggtaaacttttaaaaagtaagatccaagtatttcttcatcaagcagtttttaaaaggaaaacgataataatcagtaggctccatggaagcctttgccttaatagctatgtgccaaatacttttatcttgtgtgacagtcatgtcagagtgaaatctctcaggaaaagtgtaactagtagttacaaagtaaataaaggatttcattttaaggtgaaaaaaaaaaaaaaaaaa

SEQ ID NO: 4985 - DNA, 2018 bp, Homo sapiens; identical to SEQ ID NO: 1870

SEQ ID NO: 4986 - DNA, 1866 bp, Homo sapiens
atcagcccaggatctgaccctggactggctcacactcagttgcctctggccagtgcagggctcagccagggatggcttctagctgacagtgggaggaattaattcatctgaccggaatattcttttctcttctgggctgttggtttttcaagtgcaacaaagattccatacagctccaaggaaggagccaagaaaaacattctgtgccaaagtgagatcctggaagtgaaaccccggaataaagctgaaaaacgggctccagttgggtgccaggaaatgcaggactggaatgtgacttgacttccggcagcgcgcaggtgctcccgggtcacctgctttgaggtccagcctcctgccctgcctcaggtgaccacatgaccactgtggactttgccctgaaaccttctgggaggagaagaggcctgaccttggcgctggggtccagtgggcattgctctggtccgaggctgctgctcttgacctctgctctgcggctgttttccattggagtagaggctcctcctgtcctgtcctgcctgtggagggaagcaaaccttcccctggaccagagagaggagaaagcggagacaggtagcaacgctgtggactggtgatgacaggctcttcagctccctgcaagtgaccgggcctggggaacagggcatggcacaggcacacaggaccccccagcccagggctgcccccagccagccccgtgtgttcaagctggttctcctgggaagtggctccgtgggtaagtccagcttggctcttcggtacgtgaagaacgacttcaagagtatcctgcctacggtgggctgattccttcctcaaggctcagcagtggctgaaggacctggaggaggagctgcacccaggagaagtcctggtgatgctggtgggcaacaagacggacctcagccaggagcgggaggtgaccttccaggaagggaaggagtttgccgacagccagaagttgctgttcatggaaacttcggccaaactgaaccaccaggtgtcggaggtgttcaatacagtggcccaagagctactgcagagaagcgacgaggagggccaggctctacggggggatgcagctgtggctctgaacaaggggcccgcgaggcaggccaaatgctgcgcccactaggtgcagccactcctgggggctgtggggaagacaccccctgcctgggccatggccagctctaggtggattctgattcactgtcaatgctgggttgctcccgagccctagatgttcctggaagttggccccctttatgaaaaccacttcccacagccagtgggaactgccagaggaagatctggcgtcacatggctcccaggaaagtgctgtgccctatccccactgataccatctgattccccgatgcctgtgcctgttccacctggacggtggccccctcagcctggcagcctctggacagagaggaaggaaggattggaaaagtccccgcagcacagcgacggtgggaagatgccttacgtctgatcttgatgggggcactggcctggagcctgggcccacctgcttctggggggttggggagcaggccagatggaggtggtggtgccaggaagaaatggagcgatgactgactgtggggtgggcccaggatttccacatcttggtgaagttgcccctgggaagggcagctgggggcagtggcgccagttcccttccatggtctcccggctggcaatgtggtgaagctgagtttctgtccaatgagcaggaagattctgagacatttcgcctgagatataagttgtactgcgtatgcagtttttcctccaaaaattaaattgcttttgacaatctgaaaaaaaaaaaaaaaaaaa

SEQ ID NO: 4987 - DNA, 3213 bp, Homo sapiens
aacagctgcagccggcgctgggcccgcctggaatgcgggaacaggctgcacaccaggacttttatggaaacttgctgctggagacggcggcggcggcggcggcagcggcagccagaggactcccagcggctggagcagaagtgttagcggccagagctcccagacccctacccacagccaggcgggacgcgcacagtccctccacgcggaaagaagtaccttcgccggtcaccggctcctgcagggtgcaaatatatacagagcttcataatcagcccaagaccacatagagcaaacatgaatgatatttcccaaaaggctgagattaaagaaatgcttgcttctgatgatgaggaagatgtatcttctaaagtagaaaaggcttatgttccaaaattaacaggaactgtgaagggtagatttgctgaaatggagaaacaaagacaagaggaacaaaggaagagaacggaggaggaacgaaaacgcagaattgagcaggatatgttagaaaagaggaaaatacagcgtgaattagcaaaaagggctgaacagattgaggacataaacaatacgggaactgaatcagcatcagaggaaggagatgattcactacttataactgtggtacctgtcaaatcatataaaacatctggaaaaatgaaaaagaattttgaggatctagaaaaagaacgtgaagagaaagaaaggatcaagtacgaggaagataaaagaataagatatgaagaacaacgaccatctctcaaggaagcaaagtgtctttcattagttatggatgatgaaatagaaagtgaagcaaaaaaagaatcactttctcccggaaaattgaaactaacttttgaagaactggagcgacaaagacaagaaaaccgaaagaagcaagctgaagaggaagcaagaaaacgtttagaagaagagaagcgtgcttttgaagaagcaaggcggcaaatggtaaatgaagatgaggaaaaccaagacacagcaaaaatttttaaagggtaccgccctggtaaactcaaactcagttttgaagaaatggaaaggcaaagaagagaagatgaaaaaaggaaagcagaagaagaagccagaaggagaatagaggaagaaaagaaggcgtttgctgaagcaaggagaaatatggtagtagatgatgactccccagagatgtataagacaatctctcaagaatttcttacaccgggaaaactggaaattaattttgaagaattattaaaacaaaaaatggaagaagaaaaacgacgaacagaggaggaacggaagcataagctagaaatggagaaacaagaatttgaacaactgagacaggaaatgggagaggaagaggaagaaaatgaaacctttggattgagcagagaatatgaagaactgatcaaattaaaaaggagtggctctattcaagctaaaaacctaaaaagcaagtttgaaaaaattggacagttgtctgaaaaagaaatacagaaaaaaatagaagaagagcgagcaagaaggagagcaattgaccttgaaattaaagagcgagaagctgaaaattttcatgaggaagatgatgttgatgttaggcctgcaagaaaaagcgaggctccatttactcacaaagtgaatatgaaagctagatttgaacaaatggctaaggcaagagaagaagaagaacaaagaagaattgaagaacaaaagttactacgcatgcagtttgaacaaagggaaattgatgcagcactacaaaagaaaagagaagaggaggaggaggaagaaggtagcatcatgaatggctccactgctgaagatgaagagcaaaccagatcaggagctccatggttcaagaagcctcttaaaaacacatcagttgtagacagtgagccagtcagatttacggttaaagtaacaggagaacccaaaccagaaattacatggtggtttgaaggagaaatactgcaggatggagaagactatcaatatattgaaaggggagaaacttactgcctttacttaccagaaactttcccagaagatggaggagagtatatgtgtaaagcagtcaacaataaaggatctgcagctagtacctgtattcttaccattgaaagtaagaattaatcactctttttatcttttattctattaatttttttttccttaaaatcacttttcttcttctcttttttagctgatgactactagctcccctcccctctccctggaactttctctttcactccaactttcttactacatccatcttttctgtggcggggccaaaaaaggaaaccaggagtgccactatgctgacttcttattccttttcataacagtcttcaaagcacagctcatctaaagaatgcctacttcttttccaaataagcatcagatttatcgcctattatgcagtaacagtcaataaaatgtacttatgggggggaattactcaattattctatcagaacctattataaagactgtatttcccatagacgtttacagcaactatgtttaaaaaacaaaaacaaaaaaaaaacacacaaacctaagtagaatacattattttgcatgaaggaatgtcatttctgagctttttacacctaaaattaggctgaaatagctgagataattaatttggaacctatcaatttgagtggactttttctttagtagtacaccattttggttgttgtagtttcaaagtctttctgaagcagatatattgggattggagcggggtggggaaaactgtcactcctttcagaggaaaaggggaggagcatggagaaaaacaaaaattaaaggacttaaagaatggctatacagtgttgagtgttgaggatattaaacatgttatttttcaaacgtatgtaatatatattaaatttataaagcaaatttatgttgtgatcttgcctgaacaaattatattttaatgaaaaaactttctattaatagttcacgcaagagaaaacactttcaacatagtcgaaggcttcaagatctaagtgtatcagacttagggaaaaagtggcacaaccttcgatttaaaattctagtctttaaaatgagtttgtaaataattagctattacgttctattaagttgttttatattttaattttctggaagacaattttattttacaacgtgaacccaaataaagtaacttctgtatttaaaaaaaaaaaaaaaaaa

SEQ ID NO: 4988 - DNA, 2085 bp, Homo sapiens
gtcctttctagacagccccctcctccaggctcagggacctgtctggctgtgagctcccaggaggtcccaggggtgtgacctccctccctccctccctccctcttcccttcaccccaggccagcccagggccagctataaagctggcccagcctggctctcagcacacccagctgcctgagaccctccttcaacctccctagaggacagccccactctgcctcctgctcccccagggcagcaccatgtggcccctgtggctctgctgggcactctgggtgctgcccctggctggccccggggcggccctgaccgaggagcagctcctgggcagcctgctgcggcagctgcagctcagcgaggtgcccgtactggacagggccgacatggagaagctggtcatccccgcccacgtgagggcccagtatgtagtcctgctgcggcgcagccacggggaccgctcccgcggaaagaggttcagccagagcttccgagaggtggccggcaggttcctggcgtcggaggccgcgctgcacaggcacgggcggctgtccccgcgcagcgcccaggcccgggtgaccgtcgagtggctgcgcgtccgcgacgacggctccaaccgcacctccctcatcgactccaggctggtgtccgtccacgagagcggctggaaggccttcgacgtgaccgaggccgtgaacttctggcagcagctgagccggccccggcagccgctgctgctacaggtgtcggtgcagagggagcatctgggcccgctggcgtccggcgcccacaagctggtccgctttgcctcgcagggggcgccagccgggcttggggagccccagctggagctgcacaccctggacctcagggactatggagctcagggcgactgtgaccctgaagcaccaatgaccgagggcacccgctgctgccgccaggagatgtacattgacctgcaggggatgaagtgggccaagaactgggtgctggagcccccgggcttcctggcttacgagtgtgtgggcacctgccagcagcccccggaggccctggccttcaattggccatttctggggccgcgacagtgtatcgcctcggagactgcctcgctgcccatgatcgtcagcatcaaggagggaggcaggaccaggccccaggtggtcagcctgcccaacatgagggtgcagaagtgcagctgtgcctcggatggggcgctcgtgccaaggaggctccagccataggcgcctggtgtatccattgagccctctaactgaacgtgtgcatagaggtggtcttaatgtaggtcttaactttatacttagcaagttactccatcccaatttagtgctcctgtgtgaccttcgccctgtgtccttccatttcctgtctttcccgtccatcacccatcctaagcacttacgtgagtaaataatgcagctcagatgctgagctctagtaggaaatgctggcatgctgattacaagatacagctgagcaatgcacacattttcagctgggagtttctgttctctggcaaattcttcactgagtctggaacaataataccctatgattagaactggggaaacagaactgaattgctgtgttatatgaggaattaaaaccttcaaatctctatttcccccaaatactgacccattctggacttttgtaaacatacctaggcccctgttcccctgagagggtgctaagaggaaggatgaagggcttcaggctgggggcagtggacagggaattgggatacctggattctggttctgacagggccacaagctaggatctctaacaaacgcagaaggctttggctcgtcatttcctcttaaaaaggaggagctgggcttcagctctaagaacttcattgccctggggatcagacagcccctacctacccctgcccactcctctggagactgagccttgcccgtgcatatttaggtcatttcccacactgtcttagagaacttgtcaccagaaaccacatgtatttgcatgttttttgttaatttagctaaagcaattgaatgtagatactcagaagaaataaaaaatgatgtttcactctg

SEQ ID NO: 4989 - DNA, 2187 bp, Homo sapiens; identical to SEQ ID NO: 1507

SEQ ID NO: 4990 - DNA, 6210 bp, Homo sapiens; identical to SEQ ID NO: 1952

SEQ ID NO: 4991 - DNA, 4320 bp, Homo sapiens; identical to SEQ ID NO: 545

SEQ ID NO: 4992 - DNA, 2074 bp, Homo sapiens; identical to SEQ ID NO: 2294

SEQ ID NO: 4993 - DNA, 4184 bp, Homo sapiens
agtcttcggggaggagctgcattacacacaggcttcggaggcttccgtggagaagcttggaggtaatggctgtcgtaaatgctagttattttcagagagttctcgaagatttggaataaagccgagccccagaaagacaggtcaaccacagaagtgctgagccaggtaaagaccctgctggacaagcagctggagtgagaatcaagacagctggaccacaggaccagacccagcagtatccatgtaacacataggttaatatcagagaagcacatgacctgggcaatctgcatgtgatgccaaccaagccttggaaagacagtgcaaccacagaagtgccgagctgggtaaaggccctgctggacaagcagttggagtgagaatcaagacagccggaccacaggaccagacccaccaggatccacatgacagtggtatcttccggtatcatcctattcaaacaacgtgttcaagcatccttggaaaattgaggtggagaacaggccacacaagctgtaaaccctttgtagtcataagacgaaagaggatttgttaagagtattgttttgggtagaacttgcattagcagtgacaaagatagccacctcaacctttggtaataacccttggcacacaaatataaaccataatggagtctgagtatgtcctatgcaactggaaagaccagttgtggccagcaaaagttttgtccagatctgaaacttcatcaaacagtaagaggaaaaaggcattttctctagaagttcaaatactctcactagatgaaaaaattaaattggacagcacagaaacaaagatcctaaataaatctcaaattgaagccattgctgcctcattaggactacagtcagaggacagtgctccacctacagaggaaactgcctatggaagatcactaaaagtggcactgggtattctgaatgagagaacaaatttgagtcaagcaagcacttcagatgaagaggagatcactatgctgtctcaaaatgtaccacaaaaacagtccgattcaccccctcataaaaaataccggaaggatgaaggtgacttaccagggtgtcttgaggaaagggaaaactcagcatgcttgttagcatcttcagagagtgatgattccctgtatgatgataaatcacaagcacccacaatggtcgatactattccaagtgaagtggaaacaaagtcattacaaaactctagctggtgcgagactttcccttcactttcggaagataatgatgaaaaagagaacaagaataagattgatatctcagcagttatgtctgtgcattctgcagtcaaagaggaaagtgcatgtgttaaagatgaaaagtttgctccacctttgtcacctttgtcatcagatatgctcattatgcccaaagctttgaaagaagagagcgaggatacctgcctagagaccctggctgttccctctgaatgctctgctttctcagagaatattgaggatcctggagagggtccctcaaatccatgcttagataccagccagaatcaaccttccatggaatcagagatgggggctgcagcatgccctgggagttgttcaagggaatgcgaggtttcatttagtgcctctaaccctgtctgggattattcacatcttatgagtagtgaaagaaattttcagagactggattttgaagaacttgaggaagaaggtcaagcctctgacaagtcattgcttccaagtcgcattaatctttctctattagatgatgatgaggaagacgaagaacttccacgcttcattttacattatgagacacatccgtttgaaacaggaatgatagtctggtttaaatatcagaaatatccattttggccagcagtgataaaaagtatcagacgaaaagagaggaaagcaagtgtgctttttgttgaggcaaacatgaattctgaaaagaagggcattagagtaaattttagaagattaaagaaatttgattgtaaagagaaacaaatgctagtggacaaagccagggaggattatagtgagagtattgactggtgcatctcactaatttgtgactacagagttagaataggttgtggttctttcacgggctctttgcttgagtattatgctgctgatattagttacccagttaggaaagaaacaaaacaggatactttcaggaacaaatttccaaagctgcataatgaagatgccagggaaccgatggctgtaacttcccagaccaagaaaatgtccttccaaaaaattctccctgaccggatgaaggctgctcgggaccgagccaacaagaacctggtggacttcattgtgaatgcaaagggaacagagaaccatcttctggccattgtaaatggcacaaaaggatccagatggctgaaatcatttttgaatgcaaataggttcacaccctgtattgaaacatactttgaggatgaagatcagttggatgaagtggtgaaatatttacaagaagtctgcaatcaaatagatcaaataatgccaacttggataaaagatgataaaattaaatttatcctagaagttcttctgccagaagcaattatttgttcaatttctgctgttgatgggttagattacgaggcagctgaagcaaagtatctaaaaggaccatgtctaggctacagggaaagagaattatttgatgcaaaaataatatatgaaaagagacgaaaagcaccaacaaatgaagctcactaaatgtgctgaaagttgaaaccatgacagggagctctcatagatactagttgaaaaaagtctctgaacaattctctctaatacatattttctgcaaatgggagcatggataatgtgttcacttttttttgagatctctaggatctgtggttataattacatctttatttccttttcttgcgcttcttcaaagttaattttgtcaacatatttcagcagttctactttcccgtacattttttagaaagcataattcctaaatgattttgaagggaaagtactattttgttttatgacacttttgagtctatgctgtattgttaaatatattgtgcacaattattttaatgttaaaattgcactggtgttagatattaacgaagatgattggaaaaaagtctgaaagatacatcatttctatattccttgcttaatttttataaaatattgggttttcccttaagatagttgaagtatttttcttgccatgcctatttatttttgcaaaaaaattatctgctatatagaaccaaagatagattcgctttgctatatattataactatacttgcttttgcaataaaacaacttgtaattcaaaaatgaagattatctgcatatagtatttatgtgtgtgaataacatcttggcatgcagaaaataattttggctgctttgaacaggattgttcattctacacttccctgaaattccatttttgggagtgtctatccttcaatggctgaatagttccttaaatcagacaagctcctggctatcttcataaccagcagtgagtagatcttcttaatatagctgtctgaccacatgtggaaggcagctagacttattgtatttacagcctggccactctagacatatgaatccaggctgactgcttaagtgcccatctcgtttgatataaactgtagaaaaggcaagcactttgttctgagtcttttatctccaaatacatagttgtctcaaaccaagcaagctttatcaaaatggcttatttgcagaatagttccaatgatataaatgccaactggcaagtcattccaaactgcttgaaggagtagatgaaccagaatctgagaatttggaaataggtcacagaaaaagcctccatttggctaaatatgacaattatctgagtatggttaaatacatacaattaaatgtctgaagccaatgagttgtttattctaacttgaaatatatttttgtgagaataaatgttagaaaagttagtttattttggaaacctgccgtgaaaggaaattctaaaggcttaacatgaaactgtctgcatttctacctgttagacaatggttgctcttgggctcttgttatacagtcatatggctacacgtttatgtaaagtttgcaaaagtttggtgttttgatttataataaaactgttatattattcaaaaaaaaaaaa

SEQ ID NO: 4994 - DNA, 1599 bp, Homo sapiens; identical to SEQ ID NO: 804

SEQ ID NO: 4995 - DNA, 520 bp, Homo sapiens; identical to SEQ ID NO: 706

SEQ ID NO: 4996 - DNA, 3282 bp, Homo sapiens; identical to SEQ ID NO: 1770

SEQ ID NO: 4997 - DNA, 3337 bp, Homo sapiens
agtacgaagacgaccgggctctcaagatggcggccccatgcggaaacagctccagggagcagccatgttgcttcctgaacaaagcctctgaagatgcggaacgggcaaaaccgcccagtacggaacggcgcagcctcgggagcccggtgtggtgctcgcggacaggaagcaggagagtttgccaatagggatgtgacagcggttcccattaagcggtgatggtggttttgggacctgataatcgagctgggagtcagaggcgggatgtgtgcggtgaaggatgttttgatacccccatataaaataatctgtctgtcatgggagcccccacgtcctctgaaatagttcagctctgtctgcatgacttgtcctgggactgaggaaaatttaccaggtacaagaggagtaaagaatgatccctcctccacatggtgcctgctgagacttcttcatctggccttttggaagagcaaaaaatgatgaagtcccaggggttagtatcattcaaggatgtggctgtggatttcacccaggaggagtggcagcaacttgacccttctcagaggaccctgtacagggatgtgatgctggagaactacagccacctggtctcaatggggtatccagtttccaaaccagatgtcatctccaagttggaacaaggagaagagccatggatcataaagggagacatatcaaattggatctatccagatgaatatcaggcagatgggagacaagacaggaagagtaaccttcacaactcccagtcatgtattttggggacagtttccttccatcataagatactgaaaggagtcacaagggatggttcattgtgctccattttaaaagtctgtcaaggtgatggtcagctgcagagatttctagagaatcaagacaaactcttcaggcaggtcacatttgttaacagcaaaacagtgactgaggcatcagggcataaatataatccactggggaaaatatttcaagagtgcatagaaacagatatatcaatacagagattccataaatatgatgcttttaaaaagaacttaaaaccaaatattgacctaccgagttgttataagagcaattcaagaaaaaaacctgatcagagttttggaggtggaaaatcatctagccagagtgagcccaattctaatcttgagaagattcacaatggagtaataccttttgatgataatcagtgtggaaacgtttttagaaatacacaatcccttattcaatatcagaatgtggaaactaaagagaaaagctgtgtatgtgttacatgtggaaaagcctttgctaagaagtcacaactcattgtacatcaaagaattcatactggaaagaaaccatatgattgtggtgcatgcggaaaagccttcagtgagaagtttcatcttgttgtacatcagagaactcatactggggagaaaccttatgattgttctgaatgtggaaaagccttctctcagaaatcgtcccttattatacatcagagagttcacactggggaaaaaccctatgaatgtagtgaatgcgggaaagccttctcccagaaatcacccctcattatacatcagagaatacatactggggaaaaaccctatgaatgtagagagtgtgggaaggccttttcccagaagtcacagctgattatacaccacagagctcatactggagagaagccgtatgagtgtaccgaatgtgggaaagccttctgtgagaagtcccacctcattatacataaaagaattcacactggtgagaaaccctacaaatgtgctcaatgtgaggaagccttcagcaggaagacagaactcattacacatcagttagttcatactggggaaaaaccttatgaatgtactgaatgtggaaagacattctcccgcaagtcacagctcatcatacatcagagaacacatactggagaaaaaccctataaatgtagtgaatgtggcaaagccttctgccagaagtcacatctcattggacatcagagaattcacacaggagaaaaaccttatatatgtactgaatgtgggaaagccttctctcagaagtcccaccttccgggacaccagcgaattcatacaggagagaaaccttacatatgtgctgaatgtggaaaggccttttctcagaagtcagaccttgttttacatcagaggattcatactggggaaagaccctatcaatgtgctatatgtgggaaggccttcatccagaagtcacaactaactgtacaccagagaattcacacagtggtaaaatcataatgaactggccacagaaaagccttagtattagctcaagccttaataattactagaaacccaattaatttgataagcttggggacaacatcccaatagataaaaatttttaagggaatttgtttctagtttggtgatgcctaacttttccagcaaagatgatggaaaatagttatataaatgaagaacatttttaatatggcatgtaaagcttttaaagttatgaactcagtgatcagcacagcaagttaagcatacagaatattgtcaagttgcatattccttatactacaaaatgataatcagccattgtgaaactgctaatattagcttgtcataattatggccataaactaatttttctataaaagacgtggaagaaagcttaagtaaacaataaaataaaacctatacactattttaagaaggggcttgagcatgacccctaaagctacatgtaaagttcttgtacaaaaaatggaatgataggttgatcagattcagtaaagttgatctgtatgcattttcccatctcaagcatataagttgacctgcatctctggaaggaccttgagattgatgcattttgagcaggtctcccttttactcttcccaactgggaacttggagctgaaaaacattggcactgaggccagatggccttgggtttaatcctggctcagtgcctcacagattgtgtgactttaggcaaacatacttctcctagctgagtattttttatcagtaagtacaaatacaatgcagagctcattttcagttaatattagtactttttaaatctttactctctatcttgaagcattagatgttaagactaatgtgtaaaaaccacgtctgagcttgcttttccctctggacactctgcttttgattgcctatccctataagtggctcattttactgtcttctgatcctggtggccttatttttgctatgttaaggttgtgttttttaatacttggatttattttcatatacttacataaaccgtggtgattgcacataaagaccctgaaaaaaaaaaaaaa

SEQ ID NO: 4998 - DNA, 3240 bp, Homo sapiens
agtacgaagacgaccgggctctcaagatggcggccccatgcggaaacagctccagggagcagccatgttgcttcctgaacaaagcctctgaagatgcggaacgggcaaaaccgcccagtacggaacggcgcagcctcgggagcccggtgtggtgctcgcggacaggaagcaggagagtttgccaatagggatgtgacagcggttcccattaagcggtgatggtggttttgggacctgataatcgagctgggagtcagaggcgggatgtgtgcggtgaaggatgttttgatacccccatataaaataatctgtctgtcatgggagcccccacgtcctctgaaatagttcagctctgtctgcatgacttgtcctgggactgaggaaaatttaccaggggttagtatcattcaaggatgtggctgtggatttcacccaggaggagtggcagcaacttgacccttctcagaggaccctgtacagggatgtgatgctggagaactacagccacctggtctcaatggggtatccagtttccaaaccagatgtcatctccaagttggaacaaggagaagagccatggatcataaagggagacatatcaaattggatctatccagatgaatatcaggcagatgggagacaagacaggaagagtaaccttcacaactcccagtcatgtattttggggacagtttccttccatcataagatactgaaaggagtcacaagggatggttcattgtgctccattttaaaagtctgtcaaggtgatggtcagctgcagagatttctagagaatcaagacaaactcttcaggcaggtcacatttgttaacagcaaaacagtgactgaggcatcagggcataaatataatccactggggaaaatatttcaagagtgcatagaaacagatatatcaatacagagattccataaatatgatgcttttaaaaagaacttaaaaccaaatattgacctaccgagttgttataagagcaattcaagaaaaaaacctgatcagagttttggaggtggaaaatcatctagccagagtgagcccaattctaatcttgagaagattcacaatggagtaataccttttgatgataatcagtgtggaaacgtttttagaaatacacaatcccttattcaatatcagaatgtggaaactaaagagaaaagctgtgtatgtgttacatgtggaaaagcctttgctaagaagtcacaactcattgtacatcaaagaattcatactggaaagaaaccatatgattgtggtgcatgcggaaaagccttcagtgagaagtttcatcttgttgtacatcagagaactcatactggggagaaaccttatgattgttctgaatgtggaaaagccttctctcagaaatcgtcccttattatacatcagagagttcacactggggaaaaaccctatgaatgtagtgaatgcgggaaagccttctcccagaaatcacccctcattatacatcagagaatacatactggggaaaaaccctatgaatgtagagagtgtgggaaggccttttcccagaagtcacagctgattatacaccacagagctcatactggagagaagccgtatgagtgtaccgaatgtgggaaagccttctgtgagaagtcccacctcattatacataaaagaattcacactggtgagaaaccctacaaatgtgctcaatgtgaggaagccttcagcaggaagacagaactcattacacatcagttagttcatactggggaaaaaccttatgaatgtactgaatgtggaaagacattctcccgcaagtcacagctcatcatacatcagagaacacatactggagaaaaaccctataaatgtagtgaatgtggcaaagccttctgccagaagtcacatctcattggacatcagagaattcacacaggagaaaaaccttatatatgtactgaatgtgggaaagccttctctcagaagtcccaccttccgggacaccagcgaattcatacaggagagaaaccttacatatgtgctgaatgtggaaaggccttttctcagaagtcagaccttgttttacatcagaggattcatactggggaaagaccctatcaatgtgctatatgtgggaaggccttcatccagaagtcacaactaactgtacaccagagaattcacacagtggtaaaatcataatgaactggccacagaaaagccttagtattagctcaagccttaataattactagaaacccaattaatttgataagcttggggacaacatcccaatagataaaaatttttaagggaatttgtttctagtttggtgatgcctaacttttccagcaaagatgatggaaaatagttatataaatgaagaacatttttaatatggcatgtaaagcttttaaagttatgaactcagtgatcagcacagcaagttaagcatacagaatattgtcaagttgcatattccttatactacaaaatgataatcagccattgtgaaactgctaatattagcttgtcataattatggccataaactaatttttctataaaagacgtggaagaaagcttaagtaaacaataaaataaaacctatacactattttaagaaggggcttgagcatgacccctaaagctacatgtaaagttcttgtacaaaaaatggaatgataggttgatcagattcagtaaagttgatctgtatgcattttcccatctcaagcatataagttgacctgcatctctggaaggaccttgagattgatgcattttgagcaggtctcccttttactcttcccaactgggaacttggagctgaaaaacattggcactgaggccagatggccttgggtttaatcctggctcagtgcctcacagattgtgtgactttaggcaaacatacttctcctagctgagtattttttatcagtaagtacaaatacaatgcagagctcattttcagttaatattagtactttttaaatctttactctctatcttgaagcattagatgttaagactaatgtgtaaaaaccacgtctgagcttgcttttccctctggacactctgcttttgattgcctatccctataagtggctcattttactgtcttctgatcctggtggccttatttttgctatgttaaggttgtgttttttaatacttggatttattttcatatacttacataaaccgtggtgattgcacataaagaccctgaaaaaaaaaaaaaa

SEQ ID NO: 4999 - DNA, 2723 bp, Homo sapiens; identical to SEQ ID NO: 721

SEQ ID NO: 5000 - DNA, 3212 bp, Homo sapiens
taaagcacagcccagggaaacctcctcacagttttcatccagccacgggccagcatgtctgggggcaaatacgtagactcggaggtaggcatccgtgggggggcgccggctcgggcgtgcggggagtgtccgcttctgctatctgcctctccaaatatcccgactgctgccctggccccagccctctctccacttcggagcactcctctggcgttggcaccgctgaggaatgggcctgggcggggaggtgaagagaagccaggaatgttttatgttttcctaatggagagggggcctagggagcccctgagctaggaggacacggaaaaggggattggggtcctgagattgggtctgttgggcccaggacgcgttttctggatgggtctaggatgctcccttgtcgcgggacccccgcggtccggccctgcctgctgggggttcgaagaggtggagtgcagggtggaggtgttatttacccgagtcctggggacagtccccgggactctccgccaggcgcccagaccggcaggtcccgcaggcggcgcgcggtgtgtttgcactttccaaagttcttgaaccatctcaagaactccttctgcatcttggcgtctggcaggggtgttccgagagaggtagacctcccctccccaaactgccaccatcacttccaacgccctccacgcgctggagctctgcccgggtgtggaaacctcgtcttccaacacgtagctgcccttcagccacccgcccgcagcctgggagtgccctgagggtgggtcgggggagctgcgcagggacatctctacaccgttcccatccgggaacagggcaacatctacaagcccaacaacaaggccatggcagacgagctgagcgagaagcaagtgtacgacgcgcacaccaaggagatcgacctggtcaaccgcgaccctaaacacctcaacgatgacgtggtcaagattgactttgaagatgtgattgcagaaccagaagggacacacagttttgacggcatttggaaggccagcttcaccaccttcactgtgacgaaatactggttttaccgcttgctgtctgccctctttggcatcccgatggcactcatctggggcatttacttcgccattctctctttcctgcacatctgggcagttgtaccatgcattaagagcttcctgattgagattcagtgcatcagccgtgtctattccatctacgtccacaccgtctgtgacccactctttgaagctgttgggaaaatattcagcaatgtccgcatcaacttgcagaaagaaatataaatgacatttcaaggatagaagtatacctgattttttttccttttaattttcctggtgccaatttcaagttccaagttgctaatacagcaacaatttatgaattgaattatcttggttgaaaataaaaagatcactttctcagttttcataagtattatgtctcttctgagctatttcatctatttttggcagtctgaatttttaaaacccatttaaatttttttccttacctttttatttgcatgtggatcaaccatcgctttattggctgagatatgaacatattgttgaaaggtaatttgagagaaatatgaagaactgaggaggaaaaaaaaaaaaaagaaaagaaccaacaacctcaactgcctactccaaaatgttggtcattttatgttaagggaagaattccagggtatggccatggagtgtacaagtatgtgggcagattttcagcaaactcttttcccactgtttaaggagttagtggattactgccattcacttcataatccagtaggatccagtgatccttacaagttagaaaacataatcttctgccttctcatgatccaactaatgccttactcttcttgaaattttaacctatgatattttctgtgcctgaatatttgttatgtagataacaagacctcagtgccttcctgtttttcacattttccttttcaaatagggtctaactcagcaactcgctttaggtcagcagcctccctgaagaccaaaattagaatatccatgacctagttttccatgcgtgtttctgactctgagctacagagtctggtgaagctcacttctgggcttcatctggcaacatctttatccgtagtgggtatggttgacactagcccaatgaaatgaattaaagtggaccaatagggctgagctctctgtgggctggcagtcctggaagccagctttccctgcctctcatcaactgaatgaggtcagcatgtctattcagcttcgtttattttcaagaataatcacgctttcctgaatccaaactaatccatcaccggggtggtttagtggctcaacattgtgttcccatttcagctgatcagtgggcctccaaggaggggctgtaaaatggaggccattgtgtgagcctatcagagttgctgcaaacctgacccctgctcagtaaagcacttgcaaccgtctgttatgctgtgacacatggcccctccccctgccaggagctttggacctaatccaagcatccctttgcccagaaagaagatgggggaggaggcagtaataaaaagattgaagtattttgctggaataagttcaaattcttctgaactcaaactgaggaatttcacctgtaaacctgagtcgtacagaaagctgcctggtatatccaaaagctttttattcctcctgctcatattgtgattctgcctttggggacttttcttaaaccttcagttatgatttttttttcatacacttattggaactctgcttgatttttgcctcttccagtcttcctgacactttaattaccaacctgttacctactttgactttttgcatttaaaacagacactggcatggatatagttttacttttaaactgtgtacataactgaaaatgtgctatactgcatactttttaaatgtaaagatatttttatctttatatgaagaaaatcacttaggaaatggctttgtgattcaatctgtaaactgtgtattccaagacatgtctgttctacatagatgcttagtccctcatgcaaatcaattactggtccaaaagattgctgaaattttatatgcttactgatatattttacaattttttatcatgcatgtcctgtaaaggttacaagcctgcacaataaaaatgtttaacggttaaacagtcaaaaaaaaaaa

SEQ ID NO: 5001 - DNA, 2647 bp, Homo sapiens
agagtacagaggggtgtggtgtcctctgcgagatcctcttaaaaagctggctacgcgcaggcggtttctgtgcacggagccgtagctgtcggagcggttagttcgatttcgagctcgaggtttcccccgccgccaggctgacttctcatcgcttgtttttctttttgcatttttcctcccaccgccgttgccgccctccccgtcctggccgtccgccctccgccctctgcagggacatctctacaccgttcccatccgggaacagggcaacatctacaagcccaacaacaaggccatggcagacgagctgagcgagaagcaagtgtacgacgcgcacaccaaggagatcgacctggtcaaccgcgaccctaaacacctcaacgatgacgtggtcaagattgactttgaagatgtgattgcagaaccagaagggacacacagttttgacggcatttggaaggccagcttcaccaccttcactgtgacgaaatactggttttaccgcttgctgtctgccctctttggcatcccgatggcactcatctggggcatttacttcgccattctctctttcctgcacatctgggcagttgtaccatgcattaagagcttcctgattgagattcagtgcatcagccgtgtctattccatctacgtccacaccgtctgtgacccactctttgaagctgttgggaaaatattcagcaatgtccgcatcaacttgcagaaagaaatataaatgacatttcaaggatagaagtatacctgattttttttccttttaattttcctggtgccaatttcaagttccaagttgctaatacagcaacaatttatgaattgaattatcttggttgaaaataaaaagatcactttctcagttttcataagtattatgtctcttctgagctatttcatctatttttggcagtctgaatttttaaaacccatttaaatttttttccttacctttttatttgcatgtggatcaaccatcgctttattggctgagatatgaacatattgttgaaaggtaatttgagagaaatatgaagaactgaggaggaaaaaaaaaaaaaagaaaagaaccaacaacctcaactgcctactccaaaatgttggtcattttatgttaagggaagaattccagggtatggccatggagtgtacaagtatgtgggcagattttcagcaaactcttttcccactgtttaaggagttagtggattactgccattcacttcataatccagtaggatccagtgatccttacaagttagaaaacataatcttctgccttctcatgatccaactaatgccttactcttcttgaaattttaacctatgatattttctgtgcctgaatatttgttatgtagataacaagacctcagtgccttcctgtttttcacattttccttttcaaatagggtctaactcagcaactcgctttaggtcagcagcctccctgaagaccaaaattagaatatccatgacctagttttccatgcgtgtttctgactctgagctacagagtctggtgaagctcacttctgggcttcatctggcaacatctttatccgtagtgggtatggttgacactagcccaatgaaatgaattaaagtggaccaatagggctgagctctctgtgggctggcagtcctggaagccagctttccctgcctctcatcaactgaatgaggtcagcatgtctattcagcttcgtttattttcaagaataatcacgctttcctgaatccaaactaatccatcaccggggtggtttagtggctcaacattgtgttcccatttcagctgatcagtgggcctccaaggaggggctgtaaaatggaggccattgtgtgagcctatcagagttgctgcaaacctgacccctgctcagtaaagcacttgcaaccgtctgttatgctgtgacacatggcccctccccctgccaggagctttggacctaatccaagcatccctttgcccagaaagaagatgggggaggaggcagtaataaaaagattgaagtattttgctggaataagttcaaattcttctgaactcaaactgaggaatttcacctgtaaacctgagtcgtacagaaagctgcctggtatatccaaaagctttttattcctcctgctcatattgtgattctgcctttggggacttttcttaaaccttcagttatgatttttttttcatacacttattggaactctgcttgatttttgcctcttccagtcttcctgacactttaattaccaacctgttacctactttgactttttgcatttaaaacagacactggcatggatatagttttacttttaaactgtgtacataactgaaaatgtgctatactgcatactttttaaatgtaaagatatttttatctttatatgaagaaaatcacttaggaaatggctttgtgattcaatctgtaaactgtgtattccaagacatgtctgttctacatagatgcttagtccctcatgcaaatcaattactggtccaaaagattgctgaaattttatatgcttactgatatattttacaattttttatcatgcatgtcctgtaaaggttacaagcctgcacaataaaaatgtttaacggttaaacagtcaaaaaaaaaaa

SEQ ID NO: 5002 - DNA, 2446 bp, Homo sapiens
ttctgtgcacggagccgtagctgtcggagcgggacatctctacaccgttcccatccgggaacagggcaacatctacaagcccaacaacaaggccatggcagacgagctgagcgagaagcaagtgtacgacgcgcacaccaaggagatcgacctggtcaaccgcgaccctaaacacctcaacgatgacgtggtcaagattgactttgaagatgtgattgcagaaccagaagggacacacagttttgacggcatttggaaggccagcttcaccaccttcactgtgacgaaatactggttttaccgcttgctgtctgccctctttggcatcccgatggcactcatctggggcatttacttcgccattctctctttcctgcacatctgggcagttgtaccatgcattaagagcttcctgattgagattcagtgcatcagccgtgtctattccatctacgtccacaccgtctgtgacccactctttgaagctgttgggaaaatattcagcaatgtccgcatcaacttgcagaaagaaatataaatgacatttcaaggatagaagtatacctgattttttttccttttaattttcctggtgccaatttcaagttccaagttgctaatacagcaacaatttatgaattgaattatcttggttgaaaataaaaagatcactttctcagttttcataagtattatgtctcttctgagctatttcatctatttttggcagtctgaatttttaaaacccatttaaatttttttccttacctttttatttgcatgtggatcaaccatcgctttattggctgagatatgaacatattgttgaaaggtaatttgagagaaatatgaagaactgaggaggaaaaaaaaaaaaaagaaaagaaccaacaacctcaactgcctactccaaaatgttggtcattttatgttaagggaagaattccagggtatggccatggagtgtacaagtatgtgggcagattttcagcaaactcttttcccactgtttaaggagttagtggattactgccattcacttcataatccagtaggatccagtgatccttacaagttagaaaacataatcttctgccttctcatgatccaactaatgccttactcttcttgaaattttaacctatgatattttctgtgcctgaatatttgttatgtagataacaagacctcagtgccttcctgtttttcacattttccttttcaaatagggtctaactcagcaactcgctttaggtcagcagcctccctgaagaccaaaattagaatatccatgacctagttttccatgcgtgtttctgactctgagctacagagtctggtgaagctcacttctgggcttcatctggcaacatctttatccgtagtgggtatggttgacactagcccaatgaaatgaattaaagtggaccaatagggctgagctctctgtgggctggcagtcctggaagccagctttccctgcctctcatcaactgaatgaggtcagcatgtctattcagcttcgtttattttcaagaataatcacgctttcctgaatccaaactaatccatcaccggggtggtttagtggctcaacattgtgttcccatttcagctgatcagtgggcctccaaggaggggctgtaaaatggaggccattgtgtgagcctatcagagttgctgcaaacctgacccctgctcagtaaagcacttgcaaccgtctgttatgctgtgacacatggcccctccccctgccaggagctttggacctaatccaagcatccctttgcccagaaagaagatgggggaggaggcagtaataaaaagattgaagtattttgctggaataagttcaaattcttctgaactcaaactgaggaatttcacctgtaaacctgagtcgtacagaaagctgcctggtatatccaaaagctttttattcctcctgctcatattgtgattctgcctttggggacttttcttaaaccttcagttatgatttttttttcatacacttattggaactctgcttgatttttgcctcttccagtcttcctgacactttaattaccaacctgttacctactttgactttttgcatttaaaacagacactggcatggatatagttttacttttaaactgtgtacataactgaaaatgtgctatactgcatactttttaaatgtaaagatatttttatctttatatgaagaaaatcacttaggaaatggctttgtgattcaatctgtaaactgtgtattccaagacatgtctgttctacatagatgcttagtccctcatgcaaatcaattactggtccaaaagattgctgaaattttatatgcttactgatatattttacaattttttatcatgcatgtcctgtaaaggttacaagcctgcacaataaaaatgtttaacggttaaacagtcaaaaaaaaaaa

SEQ ID NO: 5003 - DNA, 524 bp, Homo sapiens
gccgcactttcactctccgtcagccgcattgcccgctcggcgtccggcccccgacccgcgctcgtccgcccgcccgcccgcccgcccgcgccatgaacgccaaggtcgtggtcgtgctggtcctcgtgctgaccgcgctctgcctcagcgacgggaagcccgtcagcctgagctacagatgcccatgccgattcttcgaaagccatgttgccagagccaacgtcaagcatctcaaaattctcaacactccaaactgtgcccttcagattgtagcccggctgaagaacaacaacagacaagtgtgcattgacccgaagctaaagtggattcaggagtacctggagaaagctttaaacaaggggcgcagagaagaaaaagtggggaaaaaagaaaagataggaaaaaagaagcgacagaagaagagaaaggctgcccagaaaaggaaaaactagttatctgccacctcgagatggaccacagttcacttgctctcggcgctttgtaaatttgctcgatcctcctcc

SEQ ID NO: 5004 - DNA, 2149 bp, Homo sapiens; identical to SEQ ID NO: 1458

SEQ ID NO: 5005 - DNA, 2064 bp, Homo sapiens
atctccactcccctcccaccaggcacgaggacatccccatccccacgccactcgcaccgggtccgcggggaaccccctatctctaccttccccgacgcggctcccacaagacccccatctctgcgccgggcccctccacgtgcggggtctcaggtttgaggtggtcccctccaagtttaaagagaagctggacaaagcctccttcgctactccgtatgggtacgccatggagaccgccaagcagaaggccctggaggtggccaaccggctgtaccagaaagacctgcgggcccccgacgtggtcattggagcggacacgatcgtgacagtcggggggctgattctggagaagccggtggacaagcaggacgcctacaggatgctgtcccggttgagtgggagagaacacagcgtgttcacaggtgtcgcgatcgtccactgctccagcaaagaccatcagctggacaccagggtctcggaattctacgaggaaacgaaggtgaagttctcggagctgtccgaggagctgctctgggaatacgtccacagcggggagcccatggacaaagctggcggctacgggatccaggccctgggcggcatgctggtggagtccgtacacggggactttctgaacgtggtgggattcccgctgaaccacttctgcaagcagctggtgaagctctactacccgccccgtccggaggacctgcggcggagtgtcaagcacgactccatcccggccgcggacaccttcgaagacctcagtgacgtggaggggggcggctcggagcccactcagagggacgcgggcagccgcgatgagaaggccgaggcgggagaggcgggacaggccacggcagaggctgagtgtcacaggactcgggagaccctgcctccgttcccgacacgcctcctggagctgattgagggctttatgctatccaagggcctgctcaccgcttgcaaactgaaggtgttcgatttgttaaaagatgaagcaccccagaaggctgcggatattgccagcaaagtggacgcctctgcgtgtggaatggagaggcttctggacatctgtgctgccatggggctcctggagaagacagagcaaggttacagtaacacagagacagcgaacgtctacctggcatcggatggcgaatactctctgcacggcttcatcatgcacaataatgacctcacatggaacctctttacatacctggagtttgccatccgagagggaacaaaccagcaccacagggcgttggggaagaaggcggaagatctgttccaggatgcgtactaccagagcccggagacgcggctgaggttcatgcgggccatgcacggcatgacgaagctgactgcgtgccaggtggccacggccttcaatctgtcccgcttctcctccgcctgcgacgtgggaggctgcacgggtgcactggcccgagagctggcccgtgagtaccctcgtatgcaggtgactgtgtttgacctcccagacattatcgagctggccgcccacttccaaccccccggaccgcaggcagtgcagatccacttcgcagcaggtgactttttcagggaccccctccccagcgctgagctgtacgtcctgtgccggatcctgcatgactggccagacgacaaagtccacaagttactcagcagggtcgccgagagctgcaagccaggggccggcctgctgctggtggagacgctcctggatgaggagaagagggtggcgcagcgcgccctgatgcagtcactgaacatgctggtgcagactgaaggcaaggagcggagcctgggcgagtatcagtgcttgctggagctgcacggcttccaccaggtgcaggtggtgcacttggggggtgtcctggatgccatcttggccaccaaagtggccccctgaagcccaggcagcatgttcattatagggatgtcctcccccaggctgcaggtggaccgcccggtccccaagtaccataggacagtcacataggagcgtgtagtcgtgactgaataaagaaagcaaaagcctgaaaaaaaaaaaaaaaa

SEQ ID NO: 5006 - DNA, 2101 bp, Homo sapiens
gtggcctcgcggaggcgggcgggggcgtggcctcgcggaggcgggactctggccgcctgttttttttgcagccgcgctgcgcgcaccgcgggctccgggctcagaagtgcggacgcccggctcccggcgtggacgccatggtgctgtgcccggtgattgggaagctgctgcacaagcgcgtggtgctggccagcgcctccccacgccgtcaggagatcctcagcaacgcgggtctcaggtttgaggtggtcccctccaagtttaaagagaagctggacaaagcctccttcgctactccgtatgggtacgccatggagaccgccaagcagaaggccctggaggtggccaaccggctgtaccagacagtcggggggctgattctggagaagccggtggacaagcaggacgcctacaggatgctgtcccggttgagtgggagagaacacagcgtgttcacaggtgtcgcgatcgtccactgctccagcaaagaccatcagctggacaccagggtctcggaattctacgaggaaacgaaggtgaagttctcggagctgtccgaggagctgctctgggaatacgtccacagcggggagcccatggacaaagctggcggctacgggatccaggccctgggcggcatgctggtggagtccgtacacggggactttctgaacgtggtgggattcccgctgaaccacttctgcaagcagctggtgaagctctactacccgccccgtccggaggacctgcggcggagtgtcaagcacgactccatcccggccgcggacaccttcgaagacctcagtgacgtggaggggggcggctcggagcccactcagagggacgcgggcagccgcgatgagaaggccgaggcgggagaggcgggacaggccacggcagaggctgagtgtcacaggactcgggagaccctgcctccgttcccgacacgcctcctggagctgattgagggctttatgctatccaagggcctgctcaccgcttgcaaactgaaggtgttcgatttgttaaaagatgaagcaccccagaaggctgcggatattgccagcaaagtggacgcctctgcgtgtggaatggagaggcttctggacatctgtgctgccatggggctcctggagaagacagagcaaggttacagtaacacagagacagcgaacgtctacctggcatcggatggcgaatactctctgcacggcttcatcatgcacaataatgacctcacatggaacctctttacatacctggagtttgccatccgagagggaacaaaccagcaccacagggcgttggggaagaaggcggaagatctgttccaggatgcgtactaccagagcccggagacgcggctgaggttcatgcgggccatgcacggcatgacgaagctgactgcgtgccaggtggccacggccttcaatctgtcccgcttctcctccgcctgcgacgtgggaggctgcacgggtgcactggcccgagagctggcccgtgagtaccctcgtatgcaggtgactgtgtttgacctcccagacattatcgagctggccgcccacttccaaccccccggaccgcaggcagtgcagatccacttcgcagcaggtgactttttcagggaccccctccccagcgctgagctgtacgtcctgtgccggatcctgcatgactggccagacgacaaagtccacaagttactcagcagggtcgccgagagctgcaagccaggggccggcctgctgctggtggagacgctcctggatgaggagaagagggtggcgcagcgcgccctgatgcagtcactgaacatgctggtgcagactgaaggcaaggagcggagcctgggcgagtatcagtgcttgctggagctgcacggcttccaccaggtgcaggtggtgcacttggggggtgtcctggatgccatcttggccaccaaagtggccccctgaagcccaggcagcatgttcattatagggatgtcctcccccaggctgcaggtggaccgcccggtccccaagtaccataggacagtcacataggagcgtgtagtcgtgactgaataaagaaagcaaaagcctgaaaaaaaaaaaaaaaa

SEQ ID NO: 5007 - DNA, 82027 bp, Homo sapiens
gagcagtcgtgcattcccagcctcgcctcgggtgtagggattgcatagaaaagcaaaactacacagtcttgactgtgtagttttgtttttaggattagaggctcaccgattcatgtcggagatggtcagaaaaaccaactctccataggacgtcgtttcagaagcaaccttgggcttagtcccaccctttttaggcactcttgagaaatcagagtgcctagaaagatgacaactcaagcaccgacgtttacgcagccgttacaaagcgttgtggtactggagggtagtaccgcaacctttgaggctcacattagtggttttccagttcctgaggtgagctggtttagggatggccaggtgatttccacttccactctgcccggcgtgcagatctcctttagcgatggccgcgctaaactgacgatccccgccgtgactaaagccaacagtggacgatattccctgaaagccaccaatggatctggacaagcgactagtactgctgagcttctcgtgaaagctgagacagcaccacccaacttcgttcaacgactgcagagcatgaccgtgagacaaggaagccaagtgagactccaagtgagagtgactggaatccctacacctgtggtgaagttctaccgggatggagccgaaatccagagctcccttgatttccaaatttcacaagaaggcgacctctacagcttactgattgcagaagcataccctgaggactcagggacctattcagtaaatgccaccaatagcgttggaagagctacttcgactgctgaattactggttcaaggtgaagaagaagtacctgctaaaaagacaaagacaattgtttcgactgctcagatctcagaatcaagacaaacccgaattgaaaagaagattgaagcccactttgatgccagatcaattgcaacagttgagatggtcatagatggtgccgctgggcaacagctgccacataaaacacctcccaggattcctccgaagccaaagtcaagatccccaacaccaccgtctattgctgccaaagcacagctggctcggcagcagtccccatcgcccataagacactccccttccccggtcagacacgtgcgggcaccgaccccatctccggtcaggtccgtgtctccagcagcaagaatctccacatcccccatcaggtctgttaggtctccattgctcatgcgtaagactcaggcatccaccgtggccacaggtcctgaagtgcctcccccttggaagcaagagggctacgtggcctcctcatctgaggctgagatgagagagacaacgctgacaacctctactcagatcaggacagaagagagatgggaagggagatacggtgtccaggagcaagtgaccatcagtggtgctgcgggtgctgccgccagtgtgtcggccagtgctagctacgcagcagaggctgttgccactggtgctaaagaggtgaaacaagatgctgacaaaagtgcagctgttgcgactgttgttgctgccgttgatatggccagagtgagagaaccagtgatcagcgctgtagagcagactgctcagaggacaaccacgactgctgtgcacatccaacctgctcaagaacaggtaagaaaggaagcggagaagactgctgtaactaaggtagtagtggccgccgataaagccaaggaacaagaattaaaatcaagaaccaaagaagtaattaccacaaagcaagagcagatgcacgtaactcatgagcagataagaaaagaaactgaaaaaacatttgtaccaaaggtagtaatttccgcagctaaagccaaagaacaagaaactagaatttctgaagaaattactaagaaacagaaacaagtaactcaagaagcaataatgaaggaaactaggaaaacagttgtacctaaagtcatagttgccacacccaaagtcaaagaacaagatttagtatcaagaggtagagaaggcattactaccaaaagagaacaagtgcaaataactcaggagaagatgagaaaggaagccgagaaaactgccttgtctacaatagcagttgctactgctaaagccaaagaacaagaaacaatactgagaactagagaaactatggctactagacaagaacaaatccaagttacccatggaaaggtggacgttggaaaaaaggctgaagctgtagcaacagttgttgctgcagtagaccaggcccgagtcagagagcccagagagcctgggcatcttgaagaatcctatgctcagcagaccactttggagtacggatataaggaacgcatttccgccgcaaaggtagctgagcctccccaacgtccagcctcagaaccccacgttgtccctaaagcagtcaagcctagagtaatccaggctccttctgagactcatatcaaaactactgatcaaaagggaatgcacatatcatcacagatcaagaaaactacagatctaacaacggaaagattagtccatgtggataaacgcccccgcacagctagccctcactttactgtttcaaaaatttctgttcctaagacagaacatggatatgaggcatcaatagccggtagtgctattgccacattacaaaaagagttgtcagccacatcttctgctcagaagatcaccaaatcggtgaaggctcctactgtgaagcccagtgagactagagtaagggcagagcccacacccttgccacagttccccttcgctgacacaccagatacttacaagagtgaagctggcgttgaggtgaaaaaggaagtaggggtgagcatcactggcaccaccgtccgtgaagagcgctttgaagtactgcacggacgcgaagccaaggtaacagaaacagcaagagtaccagcacctgttgaaattcctgttactccaccaactttggtctcgggcttaaaaaatgtgactgtcatagaaggtgaatctgtcaccttggagtgccacatctctggatacccatccccgacagtgacatggtacagggaagactaccaaatcgaaagttccattgacttccagataaccttccagagtggaattgctcgtcttatgattcgcgaagcatttgcggaagacagcgggcgatttacttgcagtgctgtaaatgaggctggaaccgtcagcacatcctgctatctggctgtgcaggtgtcagaagaatttgaaaaggaaaccacagccgtgactgagaaatttactacagaagagaaacgctttgttgagtcaagagatgtggttatgactgatactagcctcacagaggaacaagcagggcctggagaacctgccgcgccttactttattacaaaaccagtggtccagaaactggtggaaggtgggagcgtggtgtttggatgccaagttggcggcaacccaaagccccatgtatactggaaaaaatctggtgttcctctaaccactggatacagatacaaagtgagttacaacaaacaaaccggtgaatgcaagctggtgatttctatgacttttgctgatgatgctggagaatacactattgttgttcgcaataagcatggagaaacttctgcatctgcttccttgcttgaagaagctgattatgagttactgatgaagtcccagcaagaaatgctttatcagacacaagtgactgcatttgttcaagaacctaaagttggagaaacagcacctggatttgtatactctgagtatgaaaaagagtatgaaaaagaacaagccttaattaggaagaaaatggccaaagatactgtagtggtcagaacttatgtagaagatcaggaattccatatttcttcctttgaagagagacttattaaagaaattgaatatagaataataaagactacattagaagaacttcttgaagaagatggagaagaaaagatggcagttgacatttctgaatctgaagctgttgaatcaggatttgattcaagaatcaagaattatagaattcttgaggggatgggtgtcacttttcattgcaagatgtctggatatccattaccaaagattgcttggtacaaagatggcaagcgcatcaaacatggagaaagataccaaatggactttctacaagatggcagagctagtctgcgtatacctgttgttcttccagaagatgaaggaatctacactgcatttgccagcaatattaaaggaaatgcaatttgctcagggaaattgtatgtggagcctgctgcaccacttggagctccgacttacattcccacactagagccagtgagcagaatcagatctctctctccacgttcagtgagcaggtctcctatacgcatgtctcctgcacggatgtcacctgcaaggatgtctcctgcacggatgtcccctgcaagaatgtcccctggacgtaggctggaggagacagatgagtcacaacttgagagactatataaaccagtctttgtgttaaaacctgtttctttcaaatgtttagaagggcaaactgccagatttgacttaaaggttgttggtagacctatgccagagacgttctggtttcatgatggccagcaaattgtcaatgactatacccataaagtagtcattaaagaagatggtactcaatcactaattattgtccctgccacacccagtgattctggggaatggactgtggttgcccaaaacagggcaggcagatcttcaatttcagtgattttaactgtggaagctgtggaacatcaggtaaaaccgatgtttgtagaaaaactgaaaaatgtcaatataaaggaaggttcccgacttgaaatgaaagtcagagctacgggtaaccccaaccctgacattgtatggttgaaaaacagtgacatcattgtgcctcataaatatcccaaaatcagaattgaaggaaccaagggagaagctgcccttaaaatcgattccactgtcagccaagattctgcctggtatactgcgactgctattaataaagctggcagagacactacaagatgcaaagtaaatgttgaagttgagtttgcagagcctgagccagagagaaagttaatcatcccacgggggacatatagagcaaaggagattgcagccccagaactggagcccctccatttgcgatatggccaagagcaatgggaagaaggtgatctctatgacaaagagaaacaacagaaaccatttttcaagaaaaaactcacttccttaagacttaagcgctttgggcctgcccactttgaatgcaggctaacacccattggtgacccaacgatggtggtggagtggctccatgatggaaagccacttgaagcagccaacaggctccgtatgatcaatgaatttgggtactgcagccttgattatggcgttgcatattctagagacagtggtatcattacttgcagagccactaacaaatatggaacagatcacacatctgctacccttattgttaaagatgagaaaagtcttgtggaagaatcccaattgcctgaggggaggaaaggcttacagagaattgaagaattagagagaatggctcatgaaggtgcacttacaggtgtaacaacagatcagaaagaaaagcaaaagccagacattgtcttgtacccagagccagttagagtacttgaaggggagactgcaaggttccgctgcagggtaacaggctaccctcagcccaaagtcaactggtacctcaatggacagctcatccgcaaaagcaaaaggttcagagttcgctatgatggtatccattacctggacatcgtggactgcaaatcatatgacacaggtgaagtgaaggtcaccgcggaaaatcctgaaggtgtgatagagcataaagtgaagcttgagattcaacagagggaagattttaggtctgtccttaggagagctcctgaaccaaggcctgagtttcacgtacatgaaccaggaaagcttcagtttgaagtacaaaaagtggatagacctgttgacaccactgaaaccaaagaagttgtgaagttgaaaagggctgaaagaattacccatgaaaaagtgcctgaagagtcggaagagctgcgcagtaaattcaagcgcagaacagaagagggctattatgaagccattaccgctgtggagctcaagtctcgaaagaaggatgaatcctatgaggaactcctcaggaagacaaaagatgaacttctccactggaccaaagagttaactgaagaggaaaagaaagctcttgccgaagaaggcaaaatcacgattccaacttttaaacctgacaagattgaactaagtcctagtatggaggctccaaaaatcttcgaaagaatccagagccaaacagtgggccaaggatctgatgcacacttccgggtcagagtcgtggggaaaccagaccccgaatgtgaatggtacaaaaatggtgtcaaaattgaacggtctgaccggatctactggtactggcccgaagacaatgtttgtgaattggtcataagagatgtgactgctgaggactctgccagcatcatggtaaaagccatcaacatagctggagaaacctccagtcacgcattcttacttgtccaagccaagcaattgatcactttcacacaggaattacaagatgttgttgctaaggaaaaagacactatggcaacctttgaatgtgaaacttcagaaccatttgtcaaagtgaaatggtataaagatggtatggaggttcatgagggagataaatacaggatgcactctgacagaaaggttcacttcctctccatactgaccattgatacgtctgatgctgaagattacagctgtgtacttgtggaagatgaaaatgtcaaaacgactgctaaacttattgttgaaggtgcagttgttgagtttgtgaaagaacttcaggacatagaagttccagaatcatattcaggagaattagagtgcattgtatccccagaaaatatagaaggaaaatggtatcataatgatgtggagcttaaatccaatggcaaatatacaattacatctcgtcgtggacgtcagaacctcacggtcaaggatgtaaccaaggaggaccagggagaatacagctttgtcatcgacgggaaaaagacaacctgtaaattaaagatgaaaccccgccccattgctatcctacaaggacttagtgaccaaaaagtctgtgagggtgacattgttcagcttgaagttaaagtctccttggaaagtgtggaaggcgtctggatgaaagacggccaagaagtgcagcccagtgacagggttcacattgtgatagacaaacaatctcatatgctgctcattgaagacatgactaaggaagatgctggaaattactctttcaccattccagcccttggcctctccaccagtgggcgtgtctctgtctatagtgtggacgtgataacacctctaaaagatgttaatgtgattgaaggcaccaaggctgtgcttgaatgtaaggtgtcagtccctgatgtgacttctgttaagtggtacttaaatgatgaacaaatcaagcctgatgaccgtgtacaggccattgtgaaaggtactaaacagcgactagtcattaaccgaactcatgcttcagacgaaggaccttacaagctgatagttggcagagttgaaaccaactgtaatctctctgtagaaaaaattaaaattatcagaggtcttcgtgaccttacctgtacagaaactcaaaatgtggtgtttgaggttgagctgtcccactctggaattgatgtcctgtggaattttaaggacaaggaaatcaagcccagttctaaatataaaattgaagcacatggaaaaatatataaattgacagttctaaatatgatgaaagatgatgaaggaaaatacacattttacgcgggagaaaatatgacatctggaaaacttactgtggcaggtggggccatctccaagccactcacagatcagaccgtagctgaatcccaggaagctgtgtttgaatgtgaagttgccaacccagattccaaaggcgaatggttgagggatggcaaacacctaccactgactaacaacatcagaagtgagtctgatggccacaaaaggagacttatcattgctgccaccaaattagatgacattggagaatatacctacaaggtggccacctccaaaacatctgccaaactcaaagttgaagctgtcaaaattaagaagactctgaagaacctcacagtgacagaaacacaggatgctgttttcactgtcgagcttacacaccctaatgtcaaaggtgtccagtggatcaaaaatggagttgtgctggaatccaatgaaaagtatgctatctctgtcaaaggaacaatttactctctgaggattaaaaactgtgccatcgtggatgagtctgtttatggcttcaggcttggaaggcttggagccagtgccagactgcacgtggagactgtcaagatcattaaaaagccaaaggatgtgacagccttggaaaatgccactgttgcctttgaagttagtgtttcccatgacactgttccagtaaaatggttccataagagtgtggaaattaagccaagtgacaaacacagactggtctcagaaaggaaagtccacaagctgatgctgcagaacatctccccctcagatgctggggaatacacagctgtggtcgggcaattggaatgcaaagcaaaactgtttgtggagacattacatattacaaaaaccatgaaaaatatcgaggtgcctgagaccaaaactgcctcttttgagtgtgaggtgtcccacttcaatgtcccttccatgtggctgaagaatggtgtggaaattgagatgagtgaaaagttcaagatagttgtgcagggaaaactccatcagctgatcatcatgaacaccagcacagaggactcggcagaatacacatttgtctgtggcaatgaccaagtcagtgccaccctgacagtcaccccaatcatgattacttccatgctgaaagacatcaacgctgaagaaaaagacactattacttttgaggtgacagtgaactatgaaggcatctcttacaaatggttaaagaatggtgtggaaatcaaatcaactgacaagtgccagatgagaaccaaaaagctcacacactcactgaacatcaggaatgttcactttggggatgctgctgactacacctttgtggctggaaaagcaacatcaacagccacactttatgtggaagctcgtcatatagaatttaggaaacacattaaggacattaaggtactggagaagaagcgagccatgtttgaatgtgaagtttctgaacctgacatcactgtacagtggatgaaagatgaccaggaactgcagatcacagacagaataaagattcagaaggagaaatatgtccaccgccttctgatcccatccacccggatgtctgatgctgggaagtacacagtggtggcaggaggcaacgtgtcaactgcaaaactctttgtagaaggcagagatgttcgcatccgaagtattaaaaaggaggttcaggtcattgagaaacagcgtgctgttgttgaatttgaggtcaatgaagacgatgttgatgcccactggtataaagatggcattgaaatcaatttccaagttcaagaacgacacaaatatgtagtggaaagaagaatccaccgaatgtttatctctgagaccagacagagcgatgcaggagaatacacctttgtggcaggaaggaacaggagttctgtcactctctatgtcaatgctcctgaaccgccccaagttctgcaggagctccagcctgtcactgtgcagtctggcaagcctgcccgcttctgtgccgtgatatccggaagaccacagcccaaaatttcctggtacaaggaagagcagctgctttccactggcttcaagtgcaaatttcttcatgatgggcaagaatacacgcttttgctaattgaagccttcccagaggatgcggcagtctatacctgtgaagccaagaatgactatggtgttgccacaacatcagcttcactctcagtggaagttccagaagttgtgtctcctgatcaggaaatgcctgtttatccacctgccatcatcaccccgcttcaggacactgtcacttctgaagggcagccagcccgttttcaatgccgggtttctggaacagatctaaaagtgtcgtggtacagcaaagacaagaaaatcaagccatctcggttctttagaatgactcaatttgaagacacttatcaactggaaattgccgaagcttatccagaagatgaaggaacttacacgtttgttgctagtaatgctgtaggccaagtatcaagcacagccaacctgagtctggaagctcctgaatcaattttgcatgagaggattgaacaagagattgagatggaaatgaaagagttttctagttcttttctgtctgccgaggaagaaggacttcatagcgccgaacttcaattatctaaaataaatgaaacacttgaacttttgtctgaatctccagtttacccaactaaatttgattccgaaaaggaaggcactggcccaattttcatcaaagaagtgtcaaatgctgatataagcatgggggatgtggctacactgtctgtaactgtcattggcatccccaaacctaaaattcagtggttctttaatggagtgctattaaccccttctgctgactacaaatttgtttttgacggtgatgatcatagcctgatcattctgttcaccaaattggaggatgagggagagtatacatgtatggccagtaatgactatggaaagacaatatgtagtgcctatctaaaaattaattccaaaggagagggtcacaaagacactgaaacagaatcagcagtggcaaaatctctggaaaagctgggaggtccttgtcctcctcacttccttaaggagttaaaaccaattcgctgtgctcaagggcttcctgccatctttgagtacacagtggttggagagcctgcccctactgttacatggttcaaagaaaacaagcagctttgcaccagtgtttattacactatcattcataaccctaatggctctggaactttcattgtcaatgaccctcagagggaagacagtggcctctatatctgtaaagcagagaatatgttgggtgagtccacctgtgcagcagagctgcttgtgcttctggaagacacagacatgactgataccccctgcaaagcaaagtccacaccagaggctcctgaggattttccacagacacccttaaagggtcccgcagttgaagcacttgactcagagcaggaaattgcaacgtttgtaaaagacaccattttgaaagctgctttaattacagaagaaaaccagcaactatcttatgagcatattgctaaagccaatgaattgagcagtcagcttcctttgggagctcaggaattgcaatccattttggagcaagacaagctcactcctgaaagcaccagggaatttctttgcatcaatggcagtattcactttcagcctctcaaggaaccatctcccaacctacagctgcagattgtacagtcccagaaaaccttctccaaagaaggtattctaatgcctgaagagcctgagacacaggcagttctatcagataccgagaaaatcttcccaagtgccatgtccatagaacaaattaattcattaacagttgagcctctgaaaactttattagctgaacctgaagggaattatccacagtcttcaatagaacctccaatgcattcttatctaacctctgtggctgaggaagtactttcaccaaaagaaaagacagtatctgacaccaacagagagcaaagagtgactcttcaaaagcaagaggcacaaagtgcgctcatcttgagtcagagcttagctgagggacacgtggagagtctccagagtcctgatgtcatgatctctcaggtaaactatgagcccctagtcccttcagaacactcatgcacagaaggaggtaaaattttgatagaaagtgcaaatccactggaaaatgcagggcaagattctgcggtcagaattgaggaaggcaagtccttaagatttccactagcacttgaagaaaagcaggtactgctcaaagaagagcattctgacaacgtggtgatgcccccagaccaaatcattgagtctaaaagagagcccgtggcaataaagaaagtgcaggaggtacagggaagggaccttctttctaaggaaagcttgctttctggtattccagaagagcagagattaaacctgaaaattcaaatctgccgggctttgcaagcagccgtggccagcgagcagccaggtcttttctctgagtggctaagaaatattgaaaaggtggaggtcgaggctgtaaacatcacccaagagcccagacacatcatgtgcatgtaccttgttacttcggcaaagtctgtaacagaagaagtaaccatcattattgaagatgttgatcctcaaatggctaacctgaaaatggaacttagggatgctttgtgtgctattatatatgaggaaatagacatcctaacagctgagggtcctagaattcagcaaggagccaaaacaagtttgcaagaagaaatggattctttttcaggttcacagaaggttgaacccattactgaaccagaagttgaatctaaatatctgatctcaactgaagaggtcagttattttaacgtgcaaagtagggttaaatatttggatgccacacctgtcactaaaggggttgcttcagctgttgtctctgacgaaaaacaagatgagagtctgaaaccatcagaggaaaaagaggagtcttcctctgaaagtggtactgaggaggttgctacagtaaagatacaggaagctgagggtggcttaatcaaagaggatggccccatgatacatacacctttagtggacactgtttctgaggaaggtgatattgtacacctcacaacatccataacaaatgctaaagaggtgaattggtattttgagaataaactggtgccttcagatgaaaagttcaagtgtttacaagatcaaaatacatatacgctagtcatcgacaaagtaaataccgaagaccatcaaggagagtatgtctgtgaggccttgaatgacagcggaaaaacagcaacttcagccaaactcactgtagtaaaaagagctgccccagtgatcaagaggaaaatcgaacccctggaagtagcactgggccacctagccaaattcacctgtgagatccaaagtgctcccaatgtccggttccagtggtttaaagctggccgagaaatttatgagagtgacaagtgttctattcgatcttcaaagtatatctccagccttgaaatcctgagaacccaggtggttgactgcggcgagtatacatgcaaagcttccaatgagtatggcagtgtcagctgtacagccacactaactgtgacagtgcctggaggtgaaaagaaagttcgcaaattacttccggaacgtaaacctgaaccaaaggaagaagttgttctgaaaagcgttctaagaaaaagacctgaagaagaagaacctaaagtagaacctaaaaaactagaaaaagttaaaaaacctgcagtaccagaaccaccacctccaaaacctgttgaagaggttgaagtacctactgttacaaaaagggaaaggaagattcctgaaccaacaaaagtgcctgaaatcaagccagcaatacctctccctgcacctgaaccgaaaccaaagcccgaagcagaagtgaaaacaatcaaaccacctcctgtggaacctgaaccaacccccatcgctgccccagtaacagtgccagtggttggaaagaaagcagaagccaaagcacctaaggaagaggctgccaagccaaaaggtcctatcaaaggtgtacccaaaaagactccttcaccaatagaagccgaaaggagaaagttaaggccaggaagtggtggagagaaacctcctgatgaagccccgttcacctaccagctaaaggctgtgccactgaagtttgtgaaagaaatcaaagacatcatcttgacagaatcagagttcgttggctcttcagcaatctttgaatgtttggtctccccttccactgcaattacaacctggatgaaagacggtagcaatatccgtgagagtcccaagcacaggtttattgcagatggtaaagacagaaagctgcacatcattgatgttcaactttccgatgctggtgaatacacctgtgttttacgtttgggaaacaaagaaaagacctccacggctaaacttgttgtagaagaacttcctgtgcgttttgtaaaaacactggaagaggaagtcacagtggtcaaaggacagccattgtacttgagctgcgagttaaacaaagagcgtgacgtggtctggaggaaggatggcaagattgtggtggagaaacctggccgaattgtgccaggcgtcattggcttgatgcgggctctgaccatcaacgatgcagatgacacagatgctggaacatacacagttactgtggaaaacgccaacaacctggagtgttcatcttgcgtaaaagtagtagaagtcattagagattggctggtgaaacctatacgagaccagcatgtgaaacccaaggggacagctatttttgcctgtgatatagcaaaagatactccaaacattaagtggttcaaaggatatgatgaaatccctgcggaaccaaatgataagactgaaatactgagagatggaaatcatctgtacctcaaaattaagaatgctatgccagaagatattgctgagtatgcagtggaaattgaaggaaaaagataccctgcaaagctgacacttggagagcgtgaagttgaactgcttaaaccaatagaggacgttaccatttatgagaaagaaagtgcaagctttgatgcagaaatctcagaggcagacattcctggacaatggaaactgaaaggagaacttctaaggccctcacctacttgtgaaatcaaagcagaaggtggaaaacgcttcttaactttgcacaaagtcaaactggaccaagctggtgaagtcctctaccaggcccttaatgcaattacaactgccattttgacagtaaaagaaatcgaacttgactttgctgtgcccctgaaggatgtcactgttccagaaaggcgacaggctcgattcgaatgtgtcctcacccgagaggcaaatgttatatggtccaaaggacctgatataattaagtcatctgacaaatttgatatcatcgctgatggaaagaaacatattcttgttattaatgattctcaatttgatgatgaaggggtctatactgctgaggtggagggcaagaagacctcagctcggttgtttgtcacaggtataagactgaaattcatgtcacctcttgaagatcaaacagtaaaagaaggtgaaacagcaacttttgtttgtgaactttctcatgaaaaaatgcatgtagtctggttcaaaaatgatgccaaactccatacaagcagaacagtactcatctcttctgagggcaagactcacaaattggaaatgaaagaagtgacattggatgatatatctcagataaaagctcaagtcaaggagctgagctccacagcacagctgaaggtcttagaggccgatccctacttcactgtgaaattacatgacaaaactgcagtggagaaggatgagattactttgaagtgtgaagtgagcaaagatgtaccagtgaaatggttcaaagatggtgaagagattgtcccttcacccaaatattctatcaaggcagatggcctgcgccgcatcttaaaaatcaaaaaggcggaccttaaagataaaggcgaatatgtgtgtgactgtggcacagacaagaccaaggcaaatgttactgttgaggctcgactaataaaagtggaaaagcctctgtacggagtagaggtgtttgttggtgaaacagcccactttgaaattgaactttctgaacctgatgttcacggccagtggaagctgaaaggacagcctttgacagcttcccctgactgtgaaatcattgaggatggaaagaagcatattctgatccttcataactgtcagctgggtatgacaggagaggtttccttccaggctgctaatgccaaatctgcagccaatctgaaagtgaaagaattgcctcttatcttcatcacacctctcagtgatgttaaagtcttcgagaaagatgaggctaagtttgagtgtgaagtatccagggagcccaaaacattccgttggctaaaaggaacccaggaaatcacaggtgatgacagatttgagcttataaaggatggcactaagcattcaatggtgatcaagtcagctgcttttgaagatgaagcaaaatacatgtttgaagctgaagataagcacacaagtggcaaactgatcattgaaggaatccggctcaaattcctcacccctctcaaagatgtaactgccaaagagaaggaaagtgctgtatttactgtggagttatctcatgataacatccgagttaaatggttcaagaatgaccagcgcctacacaccaccaggtcggtctcaatgcaagacgaagggaaaactcattcgatcacattcaaagacctgtctattgatgacacctcccaaattagagtagaagctatggggatgagttcagaagctaaactcactgtgcttgagggagacccatattttacaggaaaacttcaagattatactggtgtagagaaagatgaagttattctacagtgtgaaattagcaaagcagatgcaccagtgaaatggtttaaggatgggaaggaaataaagccatccaaaaatgctgttattaaggcagatggcaagaaacgcatgctaatcctaaagaaagccttgaaatcagatattggacagtacacctgtgactgtgggacagataagacctcaggaaaacttgacattgaggatcgggaaattaaactggtgcgacccctgcacagtgtggaggtgatggagactgagacagcacgctttgaaaccgaaatctctgaagatgatatccacgccaactggaaactcaagggagaggccctactccaaacacctgattgtgaaattaaggaagaaggcaaaatacactcccttgttttgcacaactgtcgcctggaccagacgggtggggtggatttccaagctgccaatgttaaatctagtgcccacctccgagttaagccacgagtaattggtcttctgaggcctttaaaggatgtcaccgtgactgcaggggaaacagccaccttcgactgcgagctctcctacgaagatatcccagtggaatggtatctcaaagggaagaaactagagcccagcgataaggtggtcccacgttcagaaggaaaagttcatacacttactctgagggatgtaaagttagaagatgctggggaagtccaactaacagcaaaagatttcaaaactcacgccaacctctttgtgaaagaacccccagttgaattcactaagcctcttgaggaccagacggtcgaagagggagccactgcagtgctggagtgtgaagtctccagagaaaatgctaaggtgaaatggttcaaaaatgggacagaaatcctcaaaagcaagaagtatgaaattgttgctgatggcagggtcagaaaacttgttatacatgactgtaccccagaggatattaaaacatacacttgtgatgctaaggattttaagacttcctgtaacctgaatgtcgtgcctcctcatgtggaattcttaagaccactcaccgaccttcaagttagagaaaaagaaatggctcgatttgagtgtgaactttcccgagaaaatgctaaggttaagtggtttaaagatggtgctgaaattaaaaagggcaaaaaatatgacatcatatccaagggagcagtgcgcattcttgtcatcaacaaatgtctactggatgatgaagctgaatattcctgtgaagtaaggacagcgagaacttctggcatgctgacagttctggaagaagaagctgtctttaccaaaaatcttgccaacattgaagttagtgaaacagacactataaaactggtttgtgaagtctccaaacctggcgcagaagtgatttggtataaaggggatgaggagatcattgaaacaggaagatatgaaatactgactgaaggacggaagagaatcctggtcattcagaacgctcaccttgaggatgctggcaactacaactgtcgactcccaagctctcgaaccgatggcaaagtcaaagtacatgaactggctgctgaatttatctcaaagcctcaaaaccttgaaatacttgaaggagaaaaggctgaatttgtctgctctatatcaaaagaaagctttccagtccagtggaagagggatgataagacacttgaatctggagataaatatgacgttattgctgatggtaaaaagagggtcctagttgtgaaagatgccacattacaagatatgggcacttacgttgtcatggtaggggccgccagagcagcagctcacttgacagtcattgaaaaactcaggatcgtagttcctcttaaggacacccgggtgaaggaacaacaggaagttgtcttcaactgtgaagtcaatactgaaggtgccaaagccaaatggttcagaaatgaagaagctatatttgatagttcaaaatacatcattctccaaaaagacctagtctacaccctcagaattagagatgcacacttagatgaccaagccaactataatgtgtctttgaccaatcacagaggtgaaaatgttaaaagtgcagccaatctaatagtagaagaggaagaccttaggattgttgagcctcttaaagatattgaaacaatggagaagaaatctgtcacattctggtgcaaggtgaatcgtctcaatgtaacactgaagtggaccaaaaatggtgaagaagtgccttttgacaaccgtgtctcatacagagttgataagtacaagcacatgttaaccattaaagactgtggcttcccagatgaaggtgaatacattgtcactgctggacaagataaatctgttgctgagcttctcatcatagaagccccgacagaatttgtggaacacttggaagatcagacagtcactgagttcgatgacgctgtcttctcctgccagctctccagagagaaagccaatgtaaaatggtacagaaatgggagagaaatcaaagaaggcaaaaaatacaaatttgaaaaagatggaagtatacacagactcattataaaagattgcaggctggatgatgagtgtgaatatgcttgcggggtagaagacaggaagtctcgtgctagactttttgtggaagaaattcctgttgagatcatcaggcctccacaagatattcttgaagcccctggtgctgatgttgtctttttagcagaactcaataaagataaggtggaagtccaatggctaagaaataacatggttgttgtccagggtgataaacaccagatgatgagtgaaggaaagatacatcgactacagatttgtgatattaagccccgtgaccagggtgaatacagatttattgccaaagacaaagaagccagagctaagcttgaactggcagctgcaccaaaaatcaagacagctgaccaagaccttgtggttgatgttggcaagcctctgacaatggtggtgccatatgatgcctaccccaaagcagaagctgaatggtttaaagaaaatgaacctttatctacaaaaaccattgatactacggctgaacaaacttctttcagaattttagaagccaagaaaggagacaaagggaggtataaaattgtgcttcagaacaaacatggaaaagcagaaggattcatcaatttaaaagttattgatgttcctgggccagtacgtaacttagaagtgacagaaacatttgatggtgaagtgagccttgcttgggaagaacctttaactgatggtggaagcaaaatcataggttacgttgttgaaagacgtgacattaagagaaagacctgggttctggccacagaccgtgcagagagttgtgagtttactgtcactggtctacagaaaggaggagttgagtacctattccgtgtgagtgcaagaaacagagttggcactggtgagccagtagaaactgacaatcctgtagaagcaaggagtaaatatgatgttccaggccctcctttgaatgtaaccatcactgatgtgaatcgatttggtgtctcactgacatgggaaccaccagagtatgatggaggtgctgagatcacaaactacgtcattgaattaagagacaagacttctatcaggtgggatactgccatgactgtgagagctgaagacctgtctgcaactgttactgatgtggtagaaggacaggagtacagtttccgagtgagagcccaaaatcgaattggagttggaaaaccaagtgcagccacacccttcgtcaaagttgctgatccaattgagagaccaagtcctcctgtaaacctaacttcctcagatcagactcagtcatcagttcagctcaaatgggaacctcctctgaaagatggaggaagcccaatattaggctatataattgagcgatgcgaagaaggaaaagataattggattcgttgcaatatgaaacttgtccctgaactgacttacaaggttaccggattggaaaaaggaaataaatatttatatagagtatctgcagaaaataaagctggtgtttcagatccatctgaaattcttggtcctctcaccgctgacgatgcatttgttgaaccaacaatggatttaagtgcatttaaagatggtctggaagttattgtcccaaatcctatcacgatcctggttccaagtacaggctatccaaggccaactgcaacctggtgttttggagataaagtactagaaacaggggaccgggtgaaaatgaagaccttgtctgcctatgccgaacttgtcatttctccaagtgaacgttcagacaagggcatttatacactgaaattagaaaaccgtgtgaaaacaatttctggggaaattgatgtcaatgtaattgctcgcccaagtgcacccaaagaattgaaatttggtgatataaccaaggactcagtacatttgacttgggaaccacctgatgatgatggaggaagtccgttaactggatacgttgttgaaaaacgagaagtcagccggaaaacatggactaaagttatggactttgtgactgatctagaattcacagttcctgatcttgttcaaggaaaagagtacttatttaaagtttgtgctcgtaacaaatgtggccctggagaacctgcatatgttgatgaacctgtaaatatgtcaactcctgcaacggtacctgacccaccagagaatgttaaatggagagatcgaacagccaatagcatcttcttaacatgggatccacctaaaaatgatggtggttcacgcatcaaaggatatatagttgaaagatgtccacgtggttctgataaatgggttgcctgtggagaacctgttgcagaaacaaaaatggaagtgacaggtcttgaggaaggcaaatggtatgcctaccgcgtgaaggccttaaacaggcagggtgctagcaaaccaagcagacccacagaggaaatccaggctgtggacacacaagaggccccagaaatcttcctcgatgtgaagctccttgctggtctcactgtaaaagctgggaccaagattgaacttcctgccaccgtaaccggaaaacctgaacctaaaataacttggacaaaggctgatatgattctgaagcaggacaaaagaattaccattgaaaatgtccctaagaaatccacagtgactattgttgatagtaagagaagtgacactggcacatatatcattgaggctgtgaatgtgtgtggccgggccactgctgtggtggaagtgaacgtcttagataaacccggaccaccagctgcctttgacatcacagatgtaaccaatgagtcatgtcttctaacatggaacccaccacgcgatgatggtggatctaagatcacaaactatgttgtggagagacgagcaactgatagtgaagtgtggcacaagctctcatccaccgtcaaggatacaaacttcaaggccaccaaattaatccccaataaagagtacatcttcagagttgctgcagaaaacatgtatggtgttggtgaaccagttcaggcctctccaataacagccaaatatcagtttgatccacctggtcctccaactcgcctagaaccttctgatatcactaaagacgcagtgactctcacatggtgtgagccagatgatgatggtggcagcccaatcacaggatactgggttgaaagactggatcctgatacagataaatgggttagatgcaataagatgccagtaaaggacacaacatacagagtgaaaggtctcactaataagaaaaaatacagattccgtgtgttggctgaaaatcttgctggacctggaaaaccaagcaaatcaactgaaccaatcttaataaaggatcccatagatcctccatggccccctggaaaaccaactgtaaaagatgtaggcaaaacatcagtaaggttgaattggacaaaaccagaacatgatggaggtgcaaagattgagtcttatgtcattgaaatgctgaagactggaacagatgagtgggtcagagtggcggaaggggttcccaccactcagcacttgctcccagggctcatggaaggacaggaatactcattccgagttagagctgtgaataaggctggggaaagtgaacccagtgaacccagtgaccctgtgctttgccgggagaagctatatcctccatcaccaccacgctggcttgaagttattaatatcacaaaaaatacagcagacctaaaatggacagttcctgagaaagatggagggtcccccatcaccaactacattgtggaaaagagagacgtcaggcgaaaaggctggcaaacagtggataccactgtcaaggacaccaagtgcacagtcaccccactgactgagggctctttatatgtgttccgagttgctgcagaaaatgctataggacaaagcgactacaccgaaattgaggactctgtgctggccaaagacacctttaccactcctggaccaccctacgccctggcagtggttgatgtgacaaaacgacatgttgacctaaagtgggagccacctaaaaatgatggtggaagaccaatacagagatatgtcattgagaagaaagaaaggttaggtacccgttgggtgaaagctggaaagactgcaggacctgactgtaacttcagagtaactgatgtcatcgaaggaacagaggtccagtttcaggttcgggctgaaaatgaagctggagttggccacccaagtgaacccacagaaatcctatccattgaagatccaacaagtcctccctcaccaccccttgacctacatgtgactgatgctgggagaaaacacattgccattgcttggaagcctccagagaaaaatggtggaagtcctatcataggataccatgttgaaatgtgtccagtaggcactgagaaatggatgagagttaattctcgcccaataaaggacttgaaattcaaggttgaagaaggtgttgttcctgacaaagaatatgtcctgagagtgagagcagtcaatgctattggtgtcagcgagccatctgaaatctctgaaaatgtggttgccaaagacccagactgcaagccaacaattgacctggagactcatgacattattgttattgaaggtgaaaagttaagcattcctgttcccttcagagctgtcccagttccaactgttagttggcataaagatggcaaagaagttaaagcaagtgatagattaacaatgaagaatgatcacatctctgcacaccttgaagttcccaagagtgtccgtgcagatgccggaatttataccattacactggagaataagctcggctcagcaacagcctcaatcaatgtcaaagtcataggcctacctggaccatgcaaagatattaaagcaagtgacattaccaagagttcttgtaagttaacttgggaacctccagaatttgatggtggaaccccaattcttcattatgtcctggagcgcagagaagctgggaggagaacatatataccagtcatgtctggtgagaacaaactgtcatggactgtgaaggatctcataccaaatggtgaatacttcttccgtgttaaagcagtcaacaaggttggtggaggagaatatattgaactgaaaaatccagtcattgctcaagatccaaagcaaccccctgatccacctgtagatgtagaggttcataatcctacagcggaggcaatgactattacatggaagccacctttgtatgatggagggagcaagataatgggctacatcatagagaagattgctaagggtgaagaaaggtggaagagatgcaatgaacacctggtaccaatcctgacctatacagcaaaaggacttgaagaggggaaagagtaccaattccgtgtgcgagcagagaacgccgcgggtattagtgaaccttctcgggctactcctccaaccaaagctgtagatcccattgatgcccccaaagtcattctgagaacaagcctagaagtgaaacgaggtgatgaaatagcacttgatgcaagtatttctggatcaccttacccaactattacatggataaaggatgaaaatgttattgtaccagaggaaattaagaagcgtgcagcacccttggttaggagaaggaagggtgaagttcaagaagaagaaccatttgtcctgcctctgacacagcgtttgagtattgacaacagcaaaaagggagaatctcagctacgcgtccgagattctctccgacctgaccatggtctgtatatgatcaaagttgaaaatgaccacggtattgcaaaagctccttgtactgtcagtgtgttagatacaccgggaccaccaatcaactttgtatttgaagatatcagaaagacctcagtcctttgtaaatgggaaccaccccttgatgatggtggcagtgaaatcataaactacactttggaaaagaaagacaagacaaaacccgactcagaatggattgttgtcacttcaacacttagacattgcaaatattcagtaacaaaactgattgaaggaaaagagtacctcttccgtgtaagagctgaaaacagatttgggccaggtccaccatgtgtttcaaagccacttgtggctaaagatccatttggaccacctgatgcaccagataagcccattgtggaagatgttaccagcaacagtatgctagtgaaatggaatgaaccaaaagataatggaagccccattttgggttactggcttgaaaaacgtgaagttaacagtacacattggtctcgtgtcaacaaaagccttctgaatgccttgaaagccaatgtagatggcttattagaaggactcacctatgtcttcagagtatgtgctgaaaatgcagctggacctggaaagttcagtccaccttcagatcccaaaacagcacatgatccaatctctcctcctgggccacctatcccaagagtcactgacacaagctctacaactattgaactagaatgggaacccccagctttcaatggtggtggggaaattgttggctattttgttgataagcagttggttggcacaaatgaatggtcacgctgcacagagaagatgatcaaggtccgtcagtacaccgtcaaagaaatccgagagggtgctgattacaaacttcgggtgagtgctgtcaatgccgcaggggaaggaccgcctggagaaacacaacctgttactgtggctgaaccacaagagcctccagctgtggaactggatgtttctgtcaagggtggaatacaaataatggctgggaagactcttagaattccagctgtggtgactggtcgccctgtacctacaaaagtatggaccaaagaagaaggggagctggataaagaccgtgttgtaatagacaacgttggaaccaaatctgaactaattatcaaggatgcactgcgaaaagaccatggcagatatgtgattacagctacaaatagctgtggttccaaatttgcagcagccagggtagaagtttttgatgtccctggtccagttcttgacttaaaacctgttgtaacaaacagaaaaatgtgtctacttaactggtctgatccagaagatgatggaggaagtgaaataacaggctttatcattgaaagaaaagatgccaagatgcatacttggagacaaccaatagagactgagagatctaaatgtgacatcacaggtctgcttgagggacaagaatataagttccgtgttattgccaagaacaagtttggctgtggccctcctgttgaaataggaccaattcttgcagttgatccactaggtcctccaacatctccagagaggctcacatacactgaaaggacaaagtccactatcacacttgactggaaagagccccgcagtaatggtggcagtcccatccaaggatatatcattgaaaaacggcgtcatgacaaacctgactttgaaagagttaacaagcgactctgcccaaccacatcttttctggttgaaaatcttgatgaacaccaaatgtatgagttccgtgtcaaagctgtcaatgaaattggtgaaagtgaaccatccctacctcttaatgtagtcatacaagatgatgaagtgcctccaactattaagttgcgtctgagtgttcgaggagacactatcaaagttaaggcaggagagcctgtccacatccctgcagatgtgacaggccttccaatgcctaagattgaatggtccaaaaatgaaactgtaattgaaaaacccactgatgcacttcagataaccaaggaagaggtatcccgaagtgaggcaaaaactgagcttagcattcccaaagcggtccgggaggacaaaggcacttacacagttactgcttccaatcgccttggctcagtgttccgaaatgttcacgttgaagtatatgaccgcccatccccaccaagaaatcttgctgttactgacattaaagctgaatcttgctacttgacatgggatgcccctcttgataatggtggcagtgaaatcacccattatgttattgacaaacgtgatgcaagtaggaagaaagcagaatgggaggaagtcaccaacactgctgtagagaaaagatatgggatctggaaacttatccccaatggtcagtatgagttccgagtcagggcagtgaataaatatggaatcagtgatgagtgcaaatcagataaagtagtcattcaagatccttatcgccttcctggacctccaggaaaaccaaaagttttggcacgcaccaaaggatcaatgctagtgagctggactcctcctttggacaatggtggctctccaattactggctactggctggagaaaagagaagagggaagtccttattggtcacgtgttagccgagcaccaataaccaaagtgggattgaaaggcgtggaatttaatgttcctcgtttgcttgaaggcgttaaataccagttcagagccatggcaataaatgctgcaggaattggtcctcccagtgaaccatcagatccagaggttgcaggagatcccatatttccaccggggccaccttcttgcccagaagttaaagataaaacgaagtcaagcatctcactaggatggaaacctccagccaaagatggtggcagcccaatcaaaggatacattgtagaaatgcaagaagaaggtactactgactggaaaagagtaaatgaaccagacaaacttataactacctgtgaatgtgtggtgcctaatctgaaagagctcaggaagtacagattcagagtgaaagctgtcaatgaagctggtgaatctgaaccaagtgatacaactggggagatccctgccactgatattcaagaggaaccagaagttttcattgacattggagcacaggactgtctggtttgtaaagctggctcacagattaggattcctgctgtcatcaagggacgcccaacaccaaaatcatcttgggaatttgatggaaaggcaaagaaagcaatgaaggatggagttcatgacatacccgaagatgcacagctggagactgctgaaaactcctcagtaattattattccggagtgtaaacgatctcatacaggcaaatacagcatcacagccaagaataaagcaggacaaaagactgcaaattgcagagttaaagtcatggatgtaccaggcccacccaaagatctgaaagtcagtgatatcacaaggggtagttgcagactttcatggaagatgccagacgacgatggaggagacaggatcaaaggctatgttattgagaagaggactattgatggaaaagcctggaccaaagtcaatccagactgtggaagcaccacatttgtagtgcctgatctcctctctgaacagcaatatttcttccgtgtgcgagcagaaaaccgttttggtattggcccacctgtggaaaccattcagaggaccactgccagagatccgatatatcctcctgatcctcctattaaactcaagattggcctcatcacaaagaacacagtgcatctgtcatggaaacccccgaagaatgatgggggctcccctgttacccactatattgttgagtgccttgcatgggaccctactgggacaaagaaagaagcctggaggcagtgcaataagcgtgatgtggaagaactgcaatttactgttgaagacctagtagagggtggggaatatgaattccgagtcaaagctgtcaatgctgcaggagtcagcaagccttcagccactgttggccctgtgactgtcaaagaccagacatgcccaccatcaattgatctaaaagaattcatggaggttgaagaaggaaccaatgttaacattgtggccaaaattaaaggtgtgccattcccgacactaacctggtttaaagctcctccaaagaagcctgataacaaagaacctgttctctatgacacccatgtcaacaaactggtggtagatgatacttgcactttagttattccgcagtctcgcaggagtgacactggcttatataccatcacagctgtaaataatctgggaacagcatcaaaggagatgagactgaatgtcctgggtcgtcctggccctccagtgggacccataaaatttgaatctgtttcagcagatcaaatgacactatcttggtttccacctaaagatgatggtgggtctaagattacaaactatgtaattgagaaaagagaagctaacaggaagacatgggtccatgtctccagtgaacctaaggagtgcacgtacacgattcccaaattgctagaaggccatgaatatgtattccgaatcatggcccagaataaatatggcattggagaacctcttgacagtgaacctgaaacagcaagaaacctcttctctgtccctggagcaccagataaaccaacagttagcagcgtgactcgtaactccatgactgtcaactgggaagagccagaatatgatggaggctctcctgtgacagggtactggctggaaatgaaagacaccacttcaaagagatggaagagagttaaccgagatcctatcaaagccatgactttgggtgtttcttataaagtgactggtcttattgaaggttccgactatcaattccgggtatatgcaatcaatgctgctggcgtgggtccagcaagtctgccatcagacccagcgactgctagagatccaattgcccctcctggtcctccatttcccaaagtgacagattggactaaatcatctgcagatctggagtggtctcccccactaaaagatggtggatccaaagtaactggatacatcgttgaatataaagaagaaggaaaagaagaatgggaaaagggtaaagataaagaagtgagaggaacaaagcttgttgtgacaggattaaaggaaggagcattctacaaatttagagttagagcagtcaacattgctggcattggagaacctggagaggtcacagatgtcattgaaatgaaggacagacttgtttcacctgaccttcagctagatgccagtgtcagagatagaattgttgtccatgctggaggggtgatccgaatcattgcctatgtgtctggaaagcctcctccaaccgtcacctggaacatgaatgaaagaaccttacctcaagaagccaccattgagaccacagccattagctcatccatggtcatcaagaactgccagaggagccatcaaggcgtctattctcttcttgccaaaaatgaagccggagaaagaaagaagacaattattgttgatgtattagatgttccaggtcccgttggaacaccattcctagctcacaacctaaccaatgagtcctgcaaactgacatggttttctccagaagatgatggaggctctccaatcaccaattatgtcattgaaaagcgtgaatctgaccgcagagcatggaccccagtgacatatacagttacccgacaaaatgctactgtccagggtctcattcaaggaaaagcctactttttccgaattgcggctgaaaatagtattggcatgggtccatttgttgagacatcagaggcacttgttatcagagagccaataactgtaccagagcgtcctgaagacctggaagtcaaagaagttactaaaaatactgtaactttgacttggaatcctcctaagtatgatggtgggtcagaaattattaactatgtcctagaaagtcggctcattgggactgagaagttccacaaagttacaaatgacaacttgcttagcagaaaatacactgttaaaggcttaaaagaaggtgatacctatgagtaccgtgtcagtgctgtcaacattgttggacaaggcaaaccatcattttgcaccaaaccaattacttgcaaggatgagctggcacccccaacgcttcacctcgacttcagagataagctcacgattcgagttggtgaagcttttgccctcactggccgttactcaggcaaaccaaagcctaaggtttcctggttcaaagatgaagctgatgtgctggaagatgatcgcactcatataaagactacaccagcaacacttgctttagagaagatcaaggccaaacgttcagattccggcaaatactgtgtggttgtggagaacagtacaggctctaggaaaggtttctgtcaagttaatgttgttgaccgtcctggaccaccagtaggaccagttagttttgatgaggtgaccaaagattacatggttatctcttggaagcctcctttagatgatggaggcagtaaaatcaccaattatattattgagaagaaggaagtgggtaaagacgtctggatgccagtgacatctgcaagtgctaaaacaacatgcaaagtttctaaactacttgaaggaaaagattatattttccggatacatgctgaaaatctgtatggaataagtgatcctctggtgtctgattcaatgaaagccaaagatcgtttcagggttcctgatgcacctgatcagccaattgttacagaagttaccaaagactctgcattagtaacctggaataagccacatgatggaggaaaacccatcacaaactacatcctggaaaagagagaaactatgtctaaacgatgggctagagttaccaaagatcctattcatccatacactaaatttagggttcctgatcttctagaaggatgtcagtatgaattccgggtttctgcagaaaatgaaattggtattggagatccaagcccaccatccaaaccagtctttgctaaagatccaattgctaaaccaagtccacctgttaatcctgaagcaatagatacaacatgcaattcagtcgatctaacttggcagccaccacgtcatgatggtgggagcaagattctgggttatattgttgagtaccagaaagttggagatgaagagtggagaagagccaatcacacccctgagtcatgtcctgaaactaaatataaagtcaccggtcttcgggacggtcaaacctataagtttagagtgttagcagtcaatgcagctggtgaatcagatccagctcatgttccggagccagtcctagtaaaagacaggcttgaaccccctgagttgattcttgatgccaacatggcaagagaacaacacattaaagttggtgatactctaagacttagtgccatcatcaaaggagtgccattcccaaaagtaacttggaaaaaagaagacagagatgctccaactaaagcaagaattgatgtgactccagttggtagcaagcttgaaattcgtaatgctgcccatgaagatggtggaatttattctttaacagtggagaatccagctggttcaaaaactgtctcagtaaaagtacttgtattagataaacctgggccacctagagatctggaagtcagtgaaattaggaaagattcatgttaccttacttggaaagaaccactggatgatggtggttctgttattacaattatgtggttgagaggagagatgttgccagcgcccagtggtcacctctctcagctacatcaaagaaaaagagtcacttcgctaagcatctgaatgaaggcaaccagtacctcttccgagtagctgcggagaaccagtatggacgtggtccttttgttgaaacaccaaaaccaatcaaggctttggatcctctccatcccccagggccacccaaggacctgcaccatgtagatgttgacaagactgaagtctccctagtctggaataagccggatcgtgatggtggttctccaatcactggatatttggtagaatatcaagaagaaggcacccaggactggattaaatttaagactgtgacaaacttagagtgtgtggttactggactacaacaaggaaagacctatagattccgtgtaaaagctgaaaacattgtgggtcttggtctccctgacacaactatcccgatagaatgtcaagaaaaactagtgcctccatccgtggagctagatgtgaaattaattgaaggtcttgtggtaaaggctggaaccacagtcagattccctgctattataagaggtgtgcctgttcctactgcaaagtggacaaccgatgggagtgagattaaaaccgatgagcactacacagttgaaacagacaacttctcatcagtacttaccattaagaactgcttaaggagagacactggggaatatcaaatcacagtttccaatgcagccggtagcaaaacagtagccgtacatcttactgttcttgatgttcctgggccaccaacaggtcctattaatattctggatgttactcctgaacacatgactatctcatggcagccacctaaggatgatggaggaagccctgtgataaattatattgttgagaaacaagatacaaggaaagacacgtggggtgttgtctcttccggaagcagtaagacaaagctgaaaatcccacatctgcagaagggctgtgaatatgttttccgagttagagcagagaataagataggtgttggtcctccccttgactccacacctactgttgctaagcataaatttagtcctccgtctcctcctggtaaaccagtggttactgacattactgaaaatgcagcaacagtgtcttggaccctgccaaaatctgatggtggcagtccaataactggctactatatggaacgtcgagaagtaactggcaaatgggtgagggtcaacaaaacacctatcgctgacctgaagttcagagtgactggactctatgaaggaaatacatatgagtttagagtttttgctgaaaatcttgcaggactaagcaaaccatccccaagttctgatccaataaaagcttgccggcccatcaaaccacctggaccacctattaatcctaaactgaaagacaagagcagagaaacagctgatttggtgtggacaaagcctctcagtgatggtggtagccccattctaggatatgtagtggaatgtcagaaacctggcacagcacaatggaacaggattaataaagatgaactcattaggcaatgtgcctttagggtacctggactaattgaaggaaatgagtacagattccgtataaaggcagctaatattgtaggagagggtgagccaagagaactagcagaatctgtgattgcaaaagatatccttcatcctccagaagtagaacttgatgttacttgtcgtgatgttattaccgtgagagtaggccaaactatccgcattctagctcgagtcaaaggcagacctgaaccagacataacttggactaaggaaggcaaagtattggtccgagaaaagagggtggaccttattcaggatctacctcgtgttgagttacaaattaaagaagctgttagagctgatcatggcaagtatatcatctcagctaagaacagcagtggacatgcccaaggttcagccatcgttaacgtccttgacagacctgggccttgccagaatttgaaggttaccaatgtaaccaaagagaactgtacaatttcttgggaaaacccactagataatggtggctcagaaataacaaacttcatagtagaatatcgcaaaccaaaccagaaaggctggtcaattgttgcatcagatgtcactaaacgattaatcaaggccaaccttttagccaacaatgaatactatttccgagtttgtgcagagaataaagtaggtgttgggccaaccatcgaaacaaaaactcccattctggctattaaccctattgacagaccaggtgagcctgaaaaccttcacattgcagataaaggaaagacatttgtctatctaaagtggcggaggcctgactatgatggtggcagtccaaatctgtcatatcatgttgagagaaggcttaagggctccgatgactgggaaagagtgcataaaggaagcattaaagaaactcactacatggttgacagatgtgttgaaaaccagatttatgagttcagagtgcaaacaaagaatgaaggtggggaaagtgactgggtgaagacagaggaagttgttgtgaaagaagacttacaaaaaccagtacttgatctgaaattaagtggggtcctaactgtcaaagcaggggacaccattaggcttgaggcaggggttagaggcaaaccattcccagaagttgcatggaccaaggacaaagacgctacagacttaacaagatcaccaagggtcaagattgatacccgtgctgattcatctaaattttctcttactaaagcaaagcgaagtgatgggggtaaatatgtagttacggcaactaacacggctggcagttttgtggcctatgccactgtcaatgttttagataagcctggtcctgtgagaaatctgaaaattgttgatgtgtccagtgataggtgtactgtttgctgggatccaccagaagatgatggtggctgtgaaatccaaaattatattctagaaaaatgtgagacaaagcgaatggtttggtctacctattctgctactgtcttgacacctggtactacagtaacacgtctcatagaaggaaatgaatatattttcagagtccgtgcagaaaataaaataggcacagggcctccaacagaaagtaaaccagtcatagccaaaaccaagtatgataaacctggtcgccctgatcccccagaagtcactaaagtaagcaaagaagagatgactgtggtttggaatccacctgaatatgatggtggaaagtctataactggatactttttggagaaaaaggaaaagcattcaacacgatgggtccctgtcaacaagagtgcaatccctgagagacgtatgaaagtacagaatctcctcccagaccatgaatatcagttccgtgtcaaggcagaaaatgaaattggaattggagaaccaagcttgccttcaagaccggtggtggcaaaagaccccatagagccacctggtccaccaaccaatttcagagtggttgatacaaccaaacattccataactcttgggtggggaaaaccagtctatgatggtggtgcaccgatcattggatatgttgtggaaatgagaccaaaaatagcagatgcgtctcctgatgaaggctggaaacggtgtaatgctgcagcacagcttgtacgcaaggaattcactgttaccagcttggatgaaaaccaggaatatgagttcagggtgtgtgcccaaaaccaagttggtattgggcgccctgcagagctaaaggaagctatcaaacctaaagaaatactagaacctccggagattgatttggatgccagcatgaggaaactggtcatagtgagagcaggatgccctattcgtctctttgctatagtgagaggacgaccagcccctaaagtcacttggcgaaaagttggcattgataatgtggtcagaaaaggacaagttgatctggttgacactatggccttccttgtcatccccaattctacccgtgatgactcaggaaaatattccttaacacttgtgaacccagcaggagaaaaggctgtattcgtaaatgtcagagtattagacactcctgggcctgtgtctgatttaaaagtttcagatgtcactaaaacatcatgccatgtgtcctgggcccctcctgaaaacgacggtgggagccaagtgacacattatatcgtggagaaacgtgaggcagacagaaagacatggtcgaccgttaccccagaagttaagaaaacaagcttccatgtaaccaatcttgtccctgggaatgagtattacttcagagtaactgctgtcaacgaatatggccctggcgtcccaacagatgtcccaaaaccagtgcttgcatcagatcctctaagtgagccggatcccccaaggaaattagaagtgactgaaatgaccaagaacagtgccaccttagcctggttacctcccctacgtgatggaggtgctaaaatcgatggctacatcactagttacagagaagaagagcagcctgcagatcgctggacagagtactcagtggtaaaagatctgagccttgttgtcactggcctaaaggaaggaaagaaatacaaatttagagtagcggccagaaatgctgttggagtcagtttgccaagagaagctgaaggagtgtatgaagccaaagaacaactgttgccaccaaagatccttatgccagagcaaataactatcaaagctgggaaaaaactccgaattgaagcccatgtgtatggaaagcctcatcccacctgtaaatggaaaaaaggagaagatgaagttgtcacatccagccacctggcagtgcataaagcagacagctcttcaattctgatcataaaagatgtgactaggaaagacagtggttactacagcctcacagcagagaacagttctgggacagacactcagaaaatcaaagttgtagtcatggatgcccccggcccccctcagcctccatttgacatttctgatatagacgctgatgcttgctccctgtcatggcacatccctctggaggacggaggcagtaacatcaccaattatatagtggagaagtgtgatgtaagccgaggtgactgggtcacggctctagcttcagtcacaaaaacttcctgcagggttggaaagctgatcccaggccaggagtacatcttccgggtccgtgctgaaaaccgatttggcatttcagagcctctcacatctccaaagatggttgcgcagttcccatttggtgttcctagtgaaccaaagaatgcacgagtcaccaaagtcaacaaggactgtatttttgttgcttgggacagaccagatagtgatggagggagccccattattggttatctgattgaacgcaaggaaagaaacagtttgctgtgggtgaaagccaatgatactcttgtccggtcaactgaatatccttgtgctggccttgtagaaggtcttgagtattcattcagaatctatgccctaaacaaagctggatccagcccacccagcaaacccacagaatatgtaactgcaagaatgccagttgatcctcctgggaaacctgaggttattgatgtcaccaagagtactgtatctctgatctgggctcgtccaaagcatgatggaggcagtaaaattattggctatttcgtagaagcttgcaaacttcctggtgataaatgggtacggtgcaatactgcacctcaccagattccccaggaagagtacacagctactggcctagaagagaaagctcagtatcaatttagagctattgccaggaccgcggtaaacattagcccaccttctgaaccttctgatccagtgactatcctcgcagaaaatgtccctcccaggatagacctgagtgtggctatgaaatctttgcttactgtgaaagctggaactaatgtctgcttggatgctactgtttttggtaaaccgatgccaacagtttcttggaaaaaagatggcacactgctaaaaccagcagaaggcataaagatggccatgcagcggaatctgtgcaccttggagctattcagcgtgaaccggaaggactcaggagactataccattactgctgaaaattcaagtggttctaaatcagccaccattaagcttaaagtgttagataaaccgggtcctccagcatctgttaaaatcaacaaaatgtattcagatcgtgctatgctttcttgggaaccgcctcttgaagatggaggctcagaaatcaccaactatattgttgacaaacgtgaaacaagcaggcccaactgggctcaagtctctgcaactgtgcctatcaccagctgcagcgtggagaaacttatagagggccatgagtatcagttccgtatttgtgctgaaaataaatatggagtaggcgatccagtcttcactgaaccagcaattgccaaaaacccatatgacccaccaggacgctgtgatcctcctgttattagcaacataaccaaagatcacatgacagtcagctggaagccaccagcagatgatgggggctcacccatcactggctatttgcttgaaaagcgggaaacccaggctgttaactggactaaggtcaacagaaaacctattatagaaagaacattaaaagcaacaggtcttcaagaaggtaccgaatatgagttccgtgttacagctataaataaagctggaccaggcaaacccagtgacgcatccaaggccgcttatgctcgggaccctcagtatcctcctggcccaccggctttccctaaagtatatgatacaactcgcagctctgtgagtctatcttggggcaagccagcctatgacggcggcagccctatcattggttatctcgttgaagtaaaacgggctgactccgataactgggtgaggtgcaacttaccacagaatctacagaaaacccgctttgaggttactggcctgatggaagacacacaatatcaattccgtgtgtatgccgttaataagattggatacagtgaccccagtgatgtgccagataaacactatcccaaggacatcttaattccacctgagggagaacttgatgcggacttaaggaagacactcatattacgtgctggagttactatgagactatatgtaccagtaaaaggacgcccacctccaaagattacttggtctaaaccaaatgtcaatctaagagacaggattggactggacataaagtcaactgactttgacactttcttgcgctgtgaaaatgtgaacaaatatgatgcaggaaaatatatcttaaccctggagaacagctgtggtaaaaaggaatataccattgttgtgaaagtgcttgatactcctgggccacctgtcaatgtgactgttaaggaaatatccaaagactctgcttatgttacctgggagcctcccattattgatggcggaagccccatcataaactatgtggtacaaaaacgtgatgcagagaggaaatcctggtctacagtgacaactgagtgctccaaaacaagcttcagagtagctaatttggaggagggaaaatcctacttcttccgagtgtttgctgaaaatgagtatggcattggtgatcccggtgaaactcgtgatgctgtcaaagcttcccaaactcctggaccagttgtggacctgaaagtgaggtctgtatctaagtcatcctgtagcattggctggaaaaagcctcacagtgatggtggaagtcggattattggatatgtagttgatttcctgactgaagaaaataagtggcaacgagttatgaaatccttaagcctacagtactctgcaaaagatttgactgaagggaaggaatataccttcagagtgagtgctgagaatgaaaatggagaaggaaccccaagcgaaatcactgttgtggcaagggatgatgttgtggctcctgatcttgacttaaagggtctacctgatttgtgctacttggctaaagaaaacagcaacttccggcttaagatccccataaaaggcaagccagctccatcagtctcctggaagaaaggggaagatcctctagcaactgacactagagtcagtgttgagtcatctgcggttaacacaactcttatagtgtacgattgccaaaaatctgatgctggaaaatacacaatcacacttaagaatgttgctggcaccaaggaaggaactatctccataaaggttgttggcaagcctggcatccccactggaccaatcaaatttgatgaagtcacagcagaagccatgaccttaaagtgggctcctccaaaggatgatggaggttctgaaatcaccaactatatcctagagaagagggattctgtgaacaacaagtgggtgacgtgcgcctcagctgtccagaaaaccacctttagagtaaccagacttcatgagggcatggaatataccttcagggtcagtgccgaaaataaatatggtgtaggggaaggcctgaaatcggagccaattgttgcgagacatccatttgatgtgcctgatgctcccccacctcccaatattgtggatgtcagacacgattcagtatctctaacttggactgaccccaagaaaactggtggttctccaattacagggtatcatctcgagttcaaggaaagaaacagccttttgtggaagagagctaacaagactccgataaggatgagagactttaaagtgacaggattaactgaaggtcttgaatatgaattccgagttatggcaatcaatttagcaggtgtgggcaagccaagcctaccatcagagcctgttgtggcactggacccaattgatcctcctggaaaacctgaggttattaacataacaaggaattcagtgactctcatttggactgaacctaaatatgacggtggtcataagttaactggatatatagtggagaagcgagatctaccttcgaagtcttggatgaaagccaaccatgttaatgtcccagaatgtgcctttactgtaactgaccttgttgagggtggaaaatatgaattcagaattagagcaaagaatacagcaggtgctatcagtgctccatcagaaagtacagaaaccattatttgcaaggatgaatacgaggcaccaacaattgtccttgatcccacaataaaagatgggctaacaattaaagcaggggataccattgttttgaatgccattagcattcttggcaaaccccttccaaaatcaagttggtccaaggcaggaaaagacattagaccatcagatatcactcagataacttcaaccccaacatcttccatgcttactatcaagtatgccactagaaaagatgcgggtgaatataccatcactgctaccaatccttttggcacgaaggtggaacatgtgaaggtaacagtccttgatgtacctggtcccccaggtcctgttgaaatcagtaatgtttctgctgaaaaagcaacacttacatggacacctcccttggaagatggcggctcaccaattaagtcctatatacttgaaaagagagaaaccagccgacttttgtggacagtggtttctgaagatattcagtcttgcaggcatgtggcaaccaaacttatccaaggaaatgagtacatcttccgggtctcagctgtaaaccactatggcaaaggagaacctgtacagtctgaacctgtcaaaatggtagacagatttggtccccctggccctcctgaaaaaccagaggtatcaaatgtcactaagaacactgccactgtcagctggaaaaggccagtggatgatggtggcagcgaaattacaggatatcatgtagaaaggagagaaaagaaaagcctgcgatgggtgagagcaataaaaacaccagtttccgatctcaggtgcaaagtaacaggactgcaagaaggaagcacctacgaattccgtgtcagtgcagaaaacagagcaggaattggtccacccagtgaggcttcagattctgttctgatgaaagatgcagcatatcctccaggaccaccttcaaatccgcatgtcactgatactaccaagaaatctgcttctttggcatggggcaagcctcattatgatggtggacttgaaatcactggctatgtcgtggagcatcaaaaagtaggagacgaggcctggataaaagataccacaggaaccgccctcagaatcactcagttcgttgttcctgatcttcagactaaagaaaaatacaacttcagaatcagtgccatcaacgatgcaggtgttggggagccagcggtgattccagatgttgaaatcgtagaacgggagatggctcctgattttgaactagatgccgagcttcgaagaacacttgttgttagagcaggactcagtattaggatatttgtgccaattaaaggtcgtcctgctcctgaagtgacatggaccaaagataacatcaacctgaaaaaccgagccaacattgaaaatacggaatcatttactcttctgattatcccagaatgtaacagatatgataccggtaaatttgtcatgaccattgaaaacccggctgggaagaaaagtggctttgtgaacgtcagagtcttggacacgccaggcccagtcctcaacctgcggcctacagacatcacaaaggacagtgtcaccctgcactgggacctccctctgatagatggaggctcacgtataacaaactacattgtagagaaacgtgaagcaacacggaaatcttattccacagccaccactaagtgccataaatgcacatataaagttaccggcttgtctgaagggtgtgaatatttcttcagagtgatggcagagaatgaatatggaattggtgagccaacagaaactacagagcccgtaaaagcctctgaagcaccatctccaccagacagccttaacatcatggacataactaagagcaccgtcagcctggcatggcctaagcccaaacacgatggtggcagcaagatcactggctatgtgattgaagcccaaagaaaaggctctgaccagtggacccacatcacaaccgtgaaagggttagaatgtgttgtgaggaatctaactgaaggagaggaatataccttccaagtgatggcagtgaacagcgcggggagaagtgcccctagagaaagcagacccgtcattgtcaaggagcagacaatgcttccagagctggatctccgtggcatctatcagaaactggtcattgccaaagctggtgacaacatcaaagttgaaattccagtgctcggtcgaccgaagcccacagtgacatggaaaaaaggagaccaaattcttaaacagacacagagagttaattttgaaaccacagcgacttcaaccattttaaatatcaatgagtgtgtcagaagtgatagtgggccctatccattaacagcaaggaacattgtaggagaggttggtgatgtcatcaccattcaagtccatgatatcccagggccacctactggaccaatcaaatttgatgaagtttcatctgattttgtaaccttctcttgggacccacctgagaacgatggtggtgtaccaataagcaactatgtagtggaaatgcggcagactgacagtactacctgggttgagttagcaaccaccgttatacgtactacctataaagccacccgccttactactggattagagtatcagttccgtgtaaaagctcagaatagatatggagttggaccaggcatcacatcagcatgcatagttgccaactatccatttaaggttcctggacctcctggtacccctcaggtaactgcagttaccaaggattcaatgacaattagctggcatgagccactttctgatggtggaagccccattttaggatatcatgttgaaagaaaagaacgaaatggtattctctggcagactgtgagcaaagctttagtaccaggcaacattttcaaatcaagtggacttacagatggtattgcttatgagttccgggtgattgcagaaaacatggcaggcaaaagtaagccaagcaagccatcagaacctatgttggctctggatcccattgacccacctggaaaaccagtacctctaaatattacaagacacacagtaacacttaaatgggctaagcctgaatatactgggggctttaaaattaccagttatatcgttgaaaagagagaccttcctaatggacggtggctgaaggccaacttcagcaacattttggagaatgaatttacagtcagtggcctaacagaagatgctgcatatgaattccgtgtgatcgccaaaaatgctgcaggtgccatcagtccaccatctgagccatctgatgctatcacttgcagggatgatgttgaggcaccaaagataaaggtggatgttaaatttaaggacacggttatattaaaagcaggtgaagcattcagactggaagctgatgtttcaggccgcccacctccaacaatggaatggagcaaagatggaaaagagctggaaggcacagcaaagttagaaataaaaattgcagatttctctactaatctggtaaacaaagattcaacaagaagggatagtggtgcctatacccttacagcgactaatcctggtggctttgctaaacacattttcaatgtcaaagttcttgacagaccaggcccacctgaaggacctttggctgtaactgaagtgacatcagaaaagtgtgtactatcatggttccctccactggatgatggaggtgccaaaattgatcattacatagtacagaaacgtgaaaccagcagattggcatggacaaatgtagcctcagaagtccaagtaacaaagctaaaggtcactaaactcttgaaaggcaatgaatacatattccgtgtcatggctgtaaataaatatggagtgggagagccactggaatcagagcctgtgcttgcagtgaatccttatggaccccctgatccgcccaaaaaccctgaagtgacaactattactaaagattcgatggttgtctgctggggacatcctgattctgatggtggaagtgaaatcatcaattatattgtggaacggcgtgataaagctggccaacgctggattaaatgcaacaaaaaaactcttactgatttaagatataaagtgtctggactgacagaaggacatgaatatgagttcaggattatggctgaaaatgctgctggaattagtgcaccaagtcctaccagtccattttacaaggcttgtgacactgtgtttaaacctggaccaccaggtaacccacgtgttctggatacaagcagatcatccatttcaatcgcttggaataaacctatctatgatggtggttcagaaatcactgggtatatggttgagattgccctgccagaggaagatgaatggcagattgtcactccaccagcaggactcaaggcaacttcgtatactatcactggcctcacagagaatcaggaatataagatccgcatctatgccatgaattccgaaggacttggggaacctgcccttgttcctggaactccaaaggctgaagacagaatgctgcctccagaaattgaactggatgctgacctgcgcaaagttgttactataagggcctgctgcaccctgagactttttgttcccatcaaaggaaggcctgcacctgaggtgaagtgggcccgggaccatggagaatctttagataaagctagcatcgaatccacaagctcttacaccctgcttattgttggaaatgtaaacagatttgacagtggcaaatatatactaactgtagaaaatagttcaggcagcaagtctgcatttgtcaatgttagagttctcgatacaccaggccccccacaggatctgaaggtaaaagaggtcactaagacatctgtcacactcacatgggacccacctctccttgatggaggttcaaaaatcaagaactatattgttgaaaagcgggaatcaacaagaaaagcatattcaactgttgcaacaaactgccacaagacttcctggaaggtagaccagcttcaagaaggctgtagctactatttcagggttctcgcagaaaatgaatatggcattgggctgcctgctgaaaccgcagaatctgtgaaagcatcagaacgacctcttcctccaggaaaaataactttgatggatgtcacaagaaatagtgtgtcactctcttgggagaaaccagagcatgatggaggcagccgaattctaggctacattgtggagatgcagaccaaaggcagtgacaaatgggccacgtgtgccacagtcaaggtcactgaagccactatcactggattaattcagggtgaagaatactctttccgtgtttcagctcagaatgaaaagggcatcagtgatcctagacaactgagtgtgccagtgatcgccaaagatcttgtcattccaccagccttcaaactcctgttcaatactttcactgtactggcaggtgaagacctaaaagttgatgttccattcattggccgccctaccccagctgtaacctggcataaagataatgtaccactgaagcagacaactagagtaaatgcagagagcacagaaaataattcactactgacaataaaggacgcctgccgagaagatgttggccattatgtggttaaactgactaactcagctggtgaagctattgaaacccttaatgttatcgttcttgacaaaccagggcctccaactggaccagttaaaatggatgaagtgacagctgatagtattactctttcctggggcccacccaagtatgatggtggaagttctatcaataattacattgttgagaaacgggacacttccacaaccacctggcaaattgtatcagctacagttgcaaggacaacaataaaggcttgcagactgaagactggatgtgaatatcagtttagaattgcagctgaaaacagatatgggaagagtacctacctcaattcagagcctactgtagcccaatatccattcaaagttcctggtcctcctggcactccagttgtcacactgtcctccagggacagcatggaagtacaatggaatgagccaatcagtgatggaggaagtagagtcattggctatcatctagaacgcaaggaaagaaatagcatcctctgggttaagttgaataaaacacctattcctcaaaccaagtttaagacaactggccttgaagaaggtgttgaatatgaatttagagtctctgcagagaacatcgtgggcattggcaagccgagtaaagtatcagaatgttatgtggctcgtgacccatgtgatccaccaggacggccagaggcaatcattgtcacaaggaattctgtgactcttcagtggaagaaacccacctatgacggtggaagcaagatcactggttatattgttgagaagaaagaattacctgagggccgttggatgaaagccagttttacaaatattattgacactcattttgaagtaactggcctagttgaagatcacagatatgagttccgggttatagcccgaaatgccgcaggagtgtttagtgagccttcagaaagcacaggagcaataacagctagagatgaggtagatccaccacgaataagtatggatccaaaatacaaagacacaatcgtggttcatgctggtgaatcattcaaggttgatgcagatatttatggcaaaccaataccaaccattcagtggataaaaggtgatcaggagctttcaaacacagctcgattagaaataaagagcaccgactttgccaccagtctcagtgtaaaagatgcagtacgtgtcgacagtggaaattacatactgaaggccaaaaatgttgcaggagaaagatcagttactgtgaatgtcaaggttcttgacagaccagggccacctgaaggacctgttgttatctcaggagttacagcagaaaaatgcacactagcttggaaacccccacttcaggatggtgggagtgacatcataaattatattgtggaaaggagagaaaccagccgcttagtttggactgtggttgatgccaatgtgcagactctcagctgcaaggttactaagcttcttgaaggcaatgaatatactttccgtataatggcagtaaacaaatatggtgttggtgaacctcttgaatctgagccagtagttgccaagaatccatttgtagtaccagatgcaccaaaagctccagaagtcacaacagtgaccaaggactcaatgattgttgtatgggaaagaccagcatctgatggtggtagtgaaattcttggatatgttcttgagaaacgggataaagaaggcattagatggacaagatgccataagcgtctgattggagagttgcgcctgagagtaactggactcatagaaaatcacgattatgagttcagagtttctgctgagaatgctgctggacttagtgaaccaagccctccttctgcttaccaaaaggcttgtgatcctatttataaaccaggacccccaaacaaccccaaagtcatagacataaccagatcttcagtattcctttcttggagcaaaccaatatatgatggtggctgtgaaattcaaggatacattgttgaaaaatgtgatgtgagtgttggtgaatggacaatgtgcactccaccaacaggaattaataaaacaaacatagaagtagagaagctgttggaaaagcatgaatacaacttccgtatctgtgctattaataaagctggagttggagaacatgctgacgtccctggacctattatagttgaagaaaaattagaagcaccagacattgatcttgacctagaactaaggaaaatcataaatataagggcaggtggctccttaaggttatttgttcctataaaaggtcgtcctacaccagaagttaaatggggaaaggtggatggtgaaatccgagatgcagctataattgatgtcactagcagtttcacctctcttgttcttgacaatgtcaaccgatatgatagtggaaaatatacgcttacattagaaaacagcagtggaacaaagtctgcctttgttactgtgagagttctggacacgccaagtccacctgttaacctgaaagtcacagaaatcaccaaagactcagtatcaattacatgggaacctcctttgttggatgggggatccaaaataaaaaattacattgttgagaaacgtgaagccacaagaaaatcatatgctgctgttgtaactaactgccataagaattcttggaaaatcgatcagctccaagaaggttgcagttattactttagagtcacagctgagaatgagtatggtattggccttcctgcccagactgctgatccaattaaggttgcagaagtgccacaacctcctggaaaaataactgtggatgatgtcaccagaaacagtgtctctctgagttggacaaaacctgaacatgatggtggcagtaaaatcattcagtatattgtggaaatgcaagctaaacacagtgagaaatggtcagagtgtgctcgagtaaagtctcttcaggcagtaattaccaacctaactcaaggggaagaatatctttttagagttgttgctgtaaatgaaaaggggagaagtgatcctcggtcccttgcagttccaatagttgccaaagatctggtaattgagccagatgtaaaacctgcattcagtagttacagtgtacaggttggccaagatttgaaaatagaagtgccaatttctggacgtcctaagccaaccattacctggactaaagatggtctcccactgaagcagaccacaagaatcaatgttaccgattcactggatctcaccacactcagtattaaagaaactcataaggatgatggtggacaatatggaatcacagttgccaatgttgttggtcagaagacagcatccatcgaaattgtaactctagataaacctgatcctccaaaaggacctgttaaatttgatgacgtcagtgctgaaagtattacattatcttggaaccctccattatatacagggggctgccaaatcaccaactacattgttcagaaaagagatacaaccaccacagtatgggatgttgtttctgctactgttgctagaactacactcaaagtgaccaaactgaaaactggtacagaataccaatttagaatatttgccgaaaacagatatggacaaagctttgccttagagtctgatccaattgtagctcaatatccctacaaagaaccaggccctccaggtacaccatttgccacagccatttccaaagactccatggtcatacagtggcatgaaccagtcaacaatggtggaagccccgtcataggttaccacctggagagaaaagaaagaaacagtattttgtggacaaaggtcaacaaaactattattcatgacacccaattcaaagcacagaatcttgaagaaggcattgaatatgaattcagagtgtatgctgaaaatattgttggtgtaggcaaagcaagcaagaattctgaatgctatgtagccagagatccctgtgacccaccaggaaccccagaaccaataatggttaaaagaaatgaaatcactttacagtggaccaaacctgtgtatgatggtggaagtatgattacaggctacattgtagagaaacgtgatttgcctgatggtcgttggatgaaagctagctttacaaatgtcattgaaactcaatttactgtgtcaggtcttactgaagatcaaagatatgaattcagagtcattgcaaagaatgcagctggtgcaataagtaaaccctctgacagtactggaccaataactgccaaggatgaggttgaactcccaagaatttcaatggatccaaaattcagagacacaattgtggtaaatgctggagaaacattcagacttgaggctgatgtccatggaaagcccctacctaccattgagtggttaagaggagataaggaaattgaagaatctgctagatgtgaaataaagaacacagatttcaaggctttacttattgtaaaagatgcaattagaattgatggtgggcagtatattttaagagcttccaatgttgcaggttctaagtcattcccagtaaatgtaaaagtattagatagaccaggacctccagaagggccagtccaggttactggagtcacttctgaaaaatgctctttaacatggtctccaccacttcaagatggtggcagtgacatttctcactatgttgttgaaaagcgagaaaccagtcgacttgcctggactgttgttgcttcagaagttgtgaccaattctctgaaagttaccaaactcttagaaggtaatgaatatgttttccgtataatggctgtcaacaaatatggtgttggagagcctttggaatctgcaccagtactaatgaaaaatccatttgtgcttcctggaccaccaaaaagcttggaagtcacaaatattgccaaagactccatgaccgtctgttggaaccgtccagatagtgatggtggaagtgagattattggttacattgtagagaaaagagacagaagtggcattcgatggataaaatgtaataaacgccgcattacagatttgcgtctaagagtgacaggattaacagaagatcatgagtatgaattcagggtctctgcagaaaatgctgctggagttggggaaccaagtccagctacagtttattataaagcctgtgatcctgtgttcaaacctggcccacctaccaatgcacacattgtagacaccactaaaaattcaatcacacttgcctggggtaaacccatctatgatggcggcagtgagatcttgggatatgtagtagaaatctgtaaagcagatgaagaagaatggcaaatagttactccacagactggcctgagagtcactcgatttgaaatttcaaaactcactgaacaccaagagtataaaatacgagtctgtgccctcaacaaagttggtttaggtgaggctacatcagttcctggtactgtgaaaccagaagataaacttgaagcacctgaacttgaccttgactccgaattaagaaaaggaattgttgtaagagctggtggatctgccagaattcacattccattcaaaggtcgtccaacgcctgagatcacttggtctcgagaggaaggtgaattcacagataaggtccaaattgaaaagggagtaaactatacccaactatcaatagataactgtgatagaaatgatgctggaaaatacattcttaagttggaaaacagcagtggatcaaagtctgcttttgtaactgtgaaagttcttgacactccaggaccaccacagaatttggcagtcaaagaagtgagaaaagattctgccttcctggtatgggagccacccatcattgatggaggggcaaaggtcaagaactatgtgattgacaaacgtgagtcaaccagaaaagcgtatgctaatgtgagtagtaaatgcagcaaaacaagttttaaagtggaaaaccttacagaaggagccatttattacttcagagtcatggctgaaaatgaatttggagttggtgttccagtggaaactgttgatgccgtgaaagctgctgaacctccttccccaccaggaaaggttacactcactgatgtgtcccagaccagtgcatcacttatgtgggagaaacctgaacatgatggcggtagcagagtcctggggtacgttgttgaaatgcagcccaaaggaactgaaaaatggagcattgtggctgaatccaaagtctgtaatgcagttgttactggtttgagttctggacaagaatatcagttccgtgtcaaggcttataatgagaaaggaaaaagcgatccaagagtgttgggtgttcctgtcatagccaaggacttgactatacagcctagtttaaagttaccatttaacacatatagtatccaagctggagaagatcttaaaatagaaattccagttataggccgaccaagacctaacatttcttgggtcaaagatggtgagcctcttaaacagacaacaagagtaaacgttgaagaaacagctacctcaactgttttgcacattaaagaaggtaacaaagatgactttggaaaatacaccgtaacggcaacaaatagtgcaggcacagcaacagaaaatctcagtgttatcgttttagaaaagcctggacctccagttggcccagttcggtttgatgaagttagtgcagactttgtagtcatatcttgggaacctccagcctatactggtggctgccaaataagcaactacattgtagagaagcgagatacaaccaccaccacttggcacatggtatcagcaacagttgcaagaacaacaattaaaataaccaaactgaaaacaggcacggagtaccagtttagaatttttgctgaaaacaggtatggaaaaagtgccccactggattctaaggcagttattgtacaatatccatttaaagaacctggaccacctggaactccttttgtgacatcaatctcaaaagatcagatgcttgtgcaatggcatgagccagtgaatgatggaggcaccaaaattattggctaccatcttgaacagaaagaaaagaacagtattttatgggtcaagttaaataagacccccattcaggacaccaaattcaaaacaactgggcttgatgagggccttgagtatgagttcaaagtttctgctgaaaatattgttggcattggcaagcctagcaaagtgtcagaatgctttgttgctcgtgatccatgtgacccacctggtcgccctgaagccattgttattacaagaaacaatgtcacactgaaatggaagaaacctgcctatgatggtggtagcaaaataacaggttatattgtagaaaagaaagatctacctgatggccgctggatgaaagccagctttaccaacgtattagaaactgaatttacagtgagtggacttgtagaagaccaaagatatgaatttagagtaattgcaagaaatgcagctggaaactttagtgaaccatctgatagtagtggtgccattactgcaagagatgaaattgatgcaccaaatgcctctctggatccaaaatataaagatgtcatcgttgttcatgcaggagagacttttgttcttgaagccgacatccgtggcaaacctatacctgatgttgtttggtcaaaagatggaaaagaacttgaagaaacagctgctagaatggaaattaaatctactattcagaaaacaactcttgttgtcaaagactgtatacggactgatggaggacaatatattctgaaactcagcaatgttggtggtacaaagtctatacccatcactgtaaaggtacttgacaggccagggcctcctgaagggcctctgaaagttactggagttactgcggaaaaatgttacctggcatggaacccacctttgcaagatggtggtgctaatatttcacattacatcattgaaaagagggagacaagccgactctcttggacccaggtttcaactgaggtacaggcccttaactacaaagttactaaacttcttcctggtaatgagtacattttccgtgtcatggctgtgaataaatatggaattggagagcccttggaatctgggcctgttacggcctgtaatccttataagccaccaggtcctccctcaacacctgaagtctcagcaatcaccaaagattctatggtagtaacatgggcacgcccagtagacgacggaggtaccgaaattgagggctacattcttgaaaaacgagataaggaaggcgttagatggaccaagtgcaacaagaaaacattaacggatctgcggctcagggtaactggtcttaccgaaggccattcctatgaattcagagttgctgctgaaaatgcagctggtgtgggagaacctagtgagccatctgttttctaccgtgcgtgtgatgccttgtatccaccaggtcccccaagcaatccaaaagtgacggacacttccagatcttctgtctccctggcatggagtaagccaatttatgatggtggcgcacctgttaaaggctatgttgtagaggtcaaagaagctgctgcggatgaatggacaacctgcactccaccaacaggattacaaggaaagcagttcacagtgaccaagcttaaagaaaacactgaatataacttccgtatttgtgccatcaattctgaaggtgtaggtgaacctgcaactctacctggctcagtggttgctcaggagaggatagagccaccagaaatagaactcgatgctgatctcagaaaggtggtcgttctgcgtgcaagtgctactttacgcttatttgtcactatcaaaggtcgaccagaacccgaagttaaatgggaaaaggcagaaggcattctcactgacagggctcagatagaggtgaccagctcatttacaatgttggtgattgataatgttaccagatttgacagtggtcggtataatctgacattagaaaataatagtggctccaaaacagcttttgttaacgtcagagttcttgactcaccaagtgcccctgtgaatttgaccataagagaagtgaagaaagactcagtgacgttgtcctgggaaccaccacttattgatggtggagctaagattacaaactacattgtcgaaaaacgagaaactacaagaaaagcctatgctaccattacaaataattgcactaaaactactttcagaattgaaaatctacaagaaggatgttcttactacttccgagtcttggcttccaatgaatatgggattggtttgccagctgaaacaacagaacccgttaaagtgtctgaaccacccctcccacctggaagagtaactcttgttgatgtgacccgtaatacagctacaattaagtgggagaaaccagaaagtgatggtggcagcaaaattactggttatgtggttgaaatgcagactaaagggagtgaaaagtggagcacctgcacacaagttaagactctagaagcaactatatctggcttaactgcaggagaagagtatgtcttcagggtagctgcagttaacgaaaagggaagaagtgatccaagacaacttggagtgccagtaattgcaagggatattgaaataaagccttcagttgagcttcctttccatactttcaatgtaaaggctagagaacaacttaagattgatgtgccattcaaaggaagacctcaagctactgtgaactggagaaaagatggtcagactcttaaagagacaactagagtcaatgtttcttcttcaaagactgtaacatcactatctattaaggaagcttcaaaggaagatgttggaacttatgaattatgtgtttcaaacagtgctggatccataacagttcctattactataattgtccttgacagaccaggacctccaggtcctatacgtattgatgaggttagttgtgacagcataaccatttcttggaatcctccagaatatgatggtggctgccaaattagcaattacattgttgaaaagaaagaaaccacctctacaacatggcacatagtttcacaagcagttgcaagaacatccattaaaatagttcgcctgacaacaggaagtgagtatcagttccgtgtttgtgcagaaaaccgctatggaaagagctcctacagtgaatcttcagctgttgttgcagagtatccattcagtcccccaggtcctcctggtactcctaaagttgtgcatgccacaaaatctaccatgcttgtaacctggcaagtgccagttaatgatggaggaagtcgagtaattggctatcatcttgagtataaagaaagaagcagcattctttggtcaaaagcaaataaaatcctcattgctgatactcaaatgaaagtctccggccttgatgaaggactgatgtatgagtatcgtgtatatgctgaaaatattgctggaattggtaaatgcagtaaatcttgtgaaccagtccctgcaagagatccttgtgaccctcctggacaacctgaagtcacaaatatcacaagaaaatcagtgtcacttaaatggtctaaaccacattatgatggtggagctaagatcacaggatacattgttgaacgcagagaactaccagatggccggtggctgaagtgcaattatactaatatacaagaaacatactttgaagtaactgaacttactgaagatcagcgttatgaattccgggtttttgcaaggaatgctgctgactcagttagtgagccatctgaatccactgggcctattatagttaaagatgatgttgagcctccaagagttatgatggatgtcaagttccgagacgttattgttgtcaaagctggagaggtccttaagataaatgcagacattgcagggcgacctctgccagtaatttcctgggccaaggatggtatagaaattgaagaaagagcaagaacagaaatcatctcaacagacaatcatactttgttaacagttaaagactgtataagacgagacactgggcaatatgtactaacactgaagaatgttgccggcactcggtctgtggccgttaattgcaaagtacttgataagcctggtccaccagcaggaccacttgaaataaatggcctcactgctgagaaatgctctctttcctggggacgtccccaagaagatggtggtgcagatatcgactattacatcgtagaaaaacgtgaaacaagccaccttgcatggacaatatgtgaaggagagttacagatgacatcctgtaaagtaaccaagttactcaaaggcaatgaatatatatttagagtaactggtgttaataaatatggtgttggtgagcccctagagagtgtagctataaaggcactagatccatttacagttccaagtccacccacgtctttggaaattacttctgtgaccaaagaatctatgacactttgctggtcaagacccgagagtgatggaggtagtgaaatatctggatatataattgaaaggcgagagaaaaatagcctaagatgggtgcgtgtaaacaaaaaaccagtttatgatctaagagtgaaatcaacaggacttcgggaaggatgtgaatatgaatatcgtgtttatgcagaaaatgctgctggcctaagtcttccaagtgaaacctctcccttaattagggcagaagatccagtgttcctaccatctcctccatccaaacccaaaattgtggactcaggcaagacaactataactattgcctgggttaagccgctgtttgatggtggggccccgataactggatatactgtagaatacaaaaaatctgatgacactgactggaaaacttccattcagagcttacgagggacagaatatacaataagcggactaacaacaggagctgaatatgttttcagagtaaaatctgtcaataaggttggtgctagtgaccccagtgatagctctgaccctcagatagcaaaggaaagagaagaagaacctttatttgatattgacagtgaaatgaggaagaccttgattgtcaaggctggtgcctcatttaccatgactgtgcctttccgaggaagaccagtacccaatgtcttgtggagtaagccagacactgacctccgtactagagcttatgttgataccacagactctcgtacatcactgaccattgaaaatgccaacagaaatgactctggaaagtacacattaacaattcagaatgttttgagtgctgcttcactgaccttagttgtcaaagttttagataccccaggtcctccaaccaacattactgtgcaagatgtaaccaaagagtctgcagtgttatcctgggatgttcctgaaaacgatggtggagcaccagtgaagaattaccacatagaaaaacgtgaggccagcaagaaagcatgggtctctgtgaccaacaactgtaaccgcctctcctacaaagttaccaatttacaagaaggagctatctattacttcagagtctctggagaaaatgagtttggtgttggtataccagctgaaacaaaggaaggagtaaaaataacagaaaaaccaagcccacctgaaaaacttggagtaacaagtatatccaaagacagtgtttccctgacctggctgaagcctgaacatgatggcggaagcagaattgtacactatgtcgttgaagcactagaaaaaggacagaaaaactgggttaaatgtgcagtggcaaagtcaacccatcacgttgtttccggtctgagagagaattctgaatactttttccgagtgtttgctgaaaatcaagctggcctgagtgacccgagagagcttctgcttcctgttcttattaaggagcaactagaaccacctgaaattgatatgaagaatttcccaagtcacactgtatatgttagagctggttcaaaccttaaagttgacattccaatctctggaaaaccacttcccaaagtgaccttatcaagagatggtgtcccccttaaggcaaccatgagatttaataccgaaattactgctgagaacctgaccatcaatctcaaagaaagtgttacagctgacgctgggagatatgaaatcactgctgccaactccagtggtacaaccaaagctttcattaacattgttgtgctagacaggcctggtcctccaactggccctgttgttattagtgatataactgaagaaagtgtgactctcaaatgggagccacctaagtatgacggtggaagtcaagttaccaactacattctactcaaaagagaaacaagtactgcagtgtggactgaagtgtctgcaacagttgcaagaaccatgatgaaagtcatgaaactgaccacaggagaagaataccaattccgcatcaaggcagaaaaccgctttggcatcagtgatcatatagattcagcttgtgtgactgtcaaactaccatacacaacacctggaccaccatctacaccatgggtcactaatgttactcgagaaagcatcactgtgggctggcatgaaccagtgtcaaatggaggcagtgcagtcgtaggctatcacctggaaatgaaagacagaaacagtattttatggcaaaaagccaacaaactggtcatccgcacaactcacttcaaagtcacaacaatcagtgctggacttatttatgaattcagggtgtatgcagaaaatgctgctggagttggaaaacctagccatccttctgaaccagtcttggcaattgatgcttgtgaacccccaagaaatgttcgtatcactgatatttcaaagaactctgtcagcctttcatggcaacaaccagctttcgatggaggtagcaagattacaggctacattgttgagagacgtgaccttccagatggcagatggaccaaggccagcttcaccaatgttactgaaactcaattcatcatctctggcttgactcagaattcccagtatgaattccgtgtctttgctaggaatgctgttggttccattagcaatccatctgaggttgtagggcccattacttgcatcgattcttatggtggtcctgtaattgatttgcctctagaatatacagaagttgtcaaatacagagcaggtacatctgtgaagctcagagctggcatttctggcaaacctgcgcctactattgagtggtataaagatgataaagaattacaaaccaatgcactggtgtgtgttgaaaataccacggacctcgcatctatactcatcaaagatgccgatcgccttaatagtggatgctatgaattaaaactaaggaatgccatgggctcagcctcagccaccatcagagtacagatccttgacaaaccaggcccacctggtggaccaattgaatttaagactgtaactgctgagaagatcacccttctctggcggcctccagctgatgatggtggtgcaaaaatcactcactacattgtggaaaagcgtgagacaagccgcgttgtgtggtctatggtgtctgaacatttggaagagtgcatcattacaaccaccaaaattatcaaaggaaatgaatacatcttccgggtccgagccgtgaacaaatatggaattggcgagccactggaatctgattccgttgtagccaagaacgcatttgttacacctgggccaccaggcataccagaagtgacaaagattaccaagaattcgatgactgttgtatggagcaggccaattgcagatggcggtagtgatataagtggctatttccttgaaaaacgagacaagaagagcctaggatggtttaaagtactaaaagagactatccgtgacaccagacaaaaagtaacaggactcacagaaaacagtgactatcaatacagagtttgtgctgtaaacgctgctggacagggtccattttctgaaccatctgaattctacaaagctgctgatcctattgatcctccaggtccacctgctaagataagaatcgcagattcaaccaagtcatccatcacccttggctggagtaagcctgtctatgatgggggcagtgctgttactgggtatgttgtcgagataagacaaggagaggaagaggaatggactactgtctctaccaaaggagaggtcagaactacagaatatgtggtatccaacctgaaacctggagtcaattactacttccgggtatctgctgtaaactgtgctggacaaggagaacctatagaaatgaatgaacctgtacaagctaaagatatacttgaggcaccagagattgacctggatgtggctctcagaacttctgttattgccaaagctggtgaagatgtacaagtgttgattccctttaaaggcagacctccacctactgtcacatggagaaaagatgagaagaatcttggcagtgatgccagatacagcattgaaaacactgattcatcctcattactcaccattcctcaagttactcgcaatgatacaggaaaatatattctcacaatagaaaatggagttggtgaacctaagtcttcaactgtgagtgttaaagtgcttgacacaccagctgcctgccagaaactacaggttaaacatgtttctcgaggcacagtcactttgctctgggatcctcctctcattgatggaggatctccaataattaattatgtcattgaaaagagagatgccaccaagagaacatggtctgtcgtgtcacacaaatgttctagcacatccttcaagctaatagatttgtcggagaagactccattcttcttcagagttcttgcagaaaatgaaattggaattggggaaccctgtgaaactacagagccagtgaaggctgctgaagtaccagctcctatacgtgatctctcaatgaaagactcaacaaagacatctgtcatcctcagctggaccaaacctgactttgatggtggtagcgtcatcacagaatatgttgtagaaaggaaaggtaaaggtgaacagacgtggtcccacgctggcataagtaagacatgtgaaattgaggttagccaacttaaggagcagtcagtcctggagttcagagtgtttgccaaaaatgagaaaggactgagtgatcctgtcactattgggccaattacagtgaaagaacttattattacacctgaagttgacctgtcagatatccctggggcacaagtcactgtgagaattgggcacaatgtgcaccttgaattaccttataagggaaaacccaaaccatccatcagttggctgaaagatggcttgccactgaaagaaagtgaatttgttcgcttcagtaaaactgaaaacaaaattactttgagtattaagaatgccaagaaggagcatggaggaaaatacactgttattcttgataatgcagtgtgtagaattgcagtccccattacagtcatcacccttggcccaccatcaaagcccaaaggacccattcgatttgatgaaatcaaggctgatagtgtcatcctgtcatgggatgtacctgaagataatggaggaggagaaattacttgttacagcatcgagaagcgggaaacttcacaaactaactggaagatggtgtgttcaagtgttgccagaacgactttcaaagttcctaatctagtcaaagatgctgagtaccagtttagagtgagagcagaaaacagatacggagtcagccaaccacttgtctcaagcattattgtggcaaaacaccagttcaggattcctggtcccccaggaaagccagttatatacaatgtgacttctgatggcatgtcactaacttgggatgctccagtttatgatggtggttcagaagttactggattccatgttgaaaagaaagaaagaaatagcatcctctggcaaaaagttaatacatcaccaatctctggaagagaatatagagccactggactggtagaaggtctggattaccaattccgtgtatatgctgaaaattctgctggcctaagctcacctagtgacccaagcaaatttaccttagctgtttctccagtagacccacctggcactcctgactacattgatgtcacccgggaaaccatcacacttaaatggaacccaccattgcgtgatggaggcagtaagattgtgggctatagcattgagaaacggcaaggaaatgaacgctgggtgagatgcaactttactgacgtcagtgaatgtcagtacacagttacaggactcagtcctggggatcgctatgagttcagaataattgcaagaaatgctgttggaactataagcccgccctcacagtcttctggcattattatgacaagagatgaaaatgttccaccaatagtagagtttggccctgaatactttgatggtctcattattaagtccggagagagccttagaattaaagctttggtacaaggaagaccagtgcctcgagtaacttggttcaaagatggagtggaaatcgaaaagaggatgaatatggaaataaccgacgtacttggatccaccagcctatttgttagagatgctactcgggaccatcgtggtgtatacacagtggaagccaaaaatgcatctggttctgcaaaagcagaaattaaagtgaaagtacaagatacaccaggaaaagtagttgggccaataagattcaccaatattactggggagaagatgactctgtggtgggatgccccactcaatgacggttgtgctcccataacccactacatcattgaaaaacgggaaaccagcagacttgcctgggcactaattgaggataaatgtgaagcccaaagttacactgccattaaactaataaacggcaatgaataccaattccgtgtttctgcagttaacaagtttggtgttggcaggccacttgattctgatccagtggttgctcaaatacaatatactgttcctgatgcccctggcattccagaacctagcaacataacaggcaacagcattaccctgacatgggcaaggccagaatcagatggtggcagtgaaattcaacagtatatccttgaaagaagagaaaagaaaagcacaagatgggtaaaagtgatcagcaaacgaccaatctctgaaacaagattcaaagtcactggtctgacagaaggcaatgagtatgaattccatgtcatggctgaaaatgctgcaggagttggacctgcaagtggcatctcaagactcattaaatgtagagagcccgtcaacccaccaggtcctcccacagtggtcaaagtacagacacatcaaagacaactgtgagcttagaatggtccaaaccagtgtttgatggtggcatggaaataattgggtatattattgaaatgtgtaaggccgacttaggagactggcacaaggtgaatgcagaggcatgtgtgaaaacaagatatacagtcactgatctacaagcaggtgaagaatacaaattccgagttagtgctatcaatggtgctggaaaaggcgacagctgtgaagtgactggcacaattaaagcagttgaccggttaacagctcctgagttagacatagatgcaaacttcaaacagactcatgttgttagagctggggccagtattcgcctcttcattgcctaccaaggtagacctactcctacagctgtgtggagcaaaccagactctaaccttagccttcgggctgatatccatacaacagattccttcagcaccctcactgtggaaaactgcaacagaaatgatgcagggaaatatacccttactgtggaaaacaacagtggtagtaagtcaatcacattcaccgtgaaagtgctagacactccaggcccacctggcccaattaccttcaaagatgtgacccggggatctgctacattgatgtgggatgcccctcttcttgacggtggtgcccgaatccatcattatgtggtagagaaacgagaggcaagtcgccgtagttggcaggttatcagtgaaaaatgcactcgtcagatcttcaaggtcaatgacctggccgaaggtgttccgtactatttccgtgtttctgcagtaaatgagtatggtgttggtgagccctatgaaatgccagaaccaattgtagccacagaacagcctgctccacctaggagacttgatgttgttgatactagcaaatcctccgcagtcttagcttggcttaaacctgaccacgatggaggcagccggatcactggctacctgcttgaaatgagacaaaagggatctgacttctgggttgaagctggtcacaccaaacagctaactttcacagtagagcgtcttgttgagaaaactgaatatgaattccgtgtgaaggccaagaatgatgctggctatagtgaacccagagaagccttctcttctgtcatcattaaggagcctcaaatcgagcccactgctgacctcactggaattaccaatcagcttataacttgcaaagcaggaagcccatttaccattgacgtaccaatcagtggtcgtcctgcccccaaagtaacatggaaactggaagaaatgagacttaaagagacagatcgagtgagcattacaacaacaaaagacagaaccacactgactgtaaaggacagcatgagaggtgactctggaagatacttcttgaccctggaaaatacagctggtgttaaaacatttagcgtcacagttgtggtcattggaaggccaggtccagtaaccggccccattgaggtctcatctgtctcagctgaatcgtgtgtcctgtcatggggagaacctaaagatggaggaggcactgaaattactaattacatagttgaaaagcgtgaatcgggtacaacagcttggcagcttgtcaattccagtgtcaagcgcactcaaattaaagtcactcatctcacaaaatacatggaatattctttccgtgtcagttcagagaacagatttggtgtcagcaaacctctagaatcagcaccaataattgctgaacatccatttgtcccaccaagcgctcctaccagacctgaggtctaccatgtgtctgccaatgccatgtctattcgttgggaagaaccctaccacgatggtggcagtaaaatcattggctactgggttgagaagaaagaacgtaatacaattctttgggtgaaagaaaacaaagtgccatgcttagagtgcaactacaaagtaactggtttagtagaaggactggaatatcagttcagaacttatgcactcaatgctgcaggtgttagcaaggccagcgaagcttcaagacctataatggctcaaaatccagttgatgcaccaggcagaccagaggtgacagatgtcacaagatcaacagtatcactgatttggtctgccccagcgtatgatggaggcagcaaggttgtgggctacatcatagagcgtaagccagtcagtgaggtaggagatggtcgctggctgaagtgcaactacaccattgtatctgacaatttcttcaccgtgactgctctcagtgaaggagacacttatgagttccgtgtgttagccaagaatgcagcaggcgtaattagcaaagggtctgaatctacaggccctgtcacttgccgagatgaatacgctccacccaaagccgaactggatgcccgattacacggtgatctggttaccatcagagcaggttctgatcttgttctggatgctgcagttggtggcaaacctgaacccaaaattatctggaccaaaggagacaaggagctagatctctgtgaaaaagtctctttgcagtatactggcaaacgagcaactgctgtgatcaagttctgtgacagaagtgacagtggaaaatacactttaacagtgaaaaatgccagcgggaccaaggccgtgtctgtcatggtcaaagtgcttgattcccctggcccatgtggaaagctcaccgtcagcagagtaacacaggagaagtgcactttagcctggagccttccgcaggaagacggaggagcagaaatcactcactacatcgtggaaagacgcgagactagcaggctcaactgggtgattgttgaaggcgaatgcccaaccctatcctatgtcgttaccaggctcatcaagaacaatgagtacatattccgagtgagggcagtaaacaaatatggccctggtgtgcctgttgaatcagagccaattgtagccagaaactcattcactattccatcaccacccggcatacctgaagaagttgggactggcaaagagcatatcatcattcagtggacaaaacctgaatctgatggtggcaatgaaatcagcaactacctagtagacaaacgtgagaagaagagcctgcgctggacacgtgtcaacaaagactatgtggtgtatgataccaggctgaaggtgaccagcctgatggagggttgtgattaccagttccgggtgaccgcagtgaatgcagctggtaacagtgagcccagcgaagcttccaacttcatctcatgcagagaaccatcatatacccctggaccaccttctgctccaagagttgtggataccaccaaacacagcattagtttggcatggaccaaacccatgtacgatggtggtactgacattgtaggatatgttctggaaatgcaagagaaggacactgatcagtggtaccgagtgcataccaatgccacaataagaaatactgaattcactgtgccagaccttaaaatgggccagaaatattccttcagagttgctgccgtgaacgtgaagggtatgagcgaatacagcgaatcaattgctgaaattgagcccgtggaaagaatagaaataccagatcttgagcttgcagatgatctaaagaagactgtgaccatcagggctggggcctccttgcgcttgatggtgtctgtatctggaagaccacctcctgtcataacgtggagcaagcagggcattgaccttgcaagccgggcaattattgacaccactgagagctactcattgctaatagtggacaaagttaatcggtacgatgctggaaaatacacaattgaagctgaaaaccaatctggcaagaaatcagcaacagtccttgttaaagtctatgatactcctggtccctgtccttcagtgaaagttaaggaagtatcaagagattctgtgactataacttgggaaattcccacgattgatggtggagctccagtcaacaattacatcgttgagaagcgtgaagctgctatgagagcattcaaaacagtaactaccaaatgcagcaagacactttacagaatttctggacttgtagaaggaaccatgtactatttcagagtgctgccagaaaatatttatggcattggagaaccttgtgaaacatctgatgcagtactggtctcagaagtgcctttggtgcctgcaaagctagaagtggtcgatgtcaccaaatccactgttacccttgcctgggaaaaaccactctacgatggtggtagccgactcactggatatgttctcgaggcctgcaaagctggcacagagagatggatgaaggttgtcaccttaaaacccacagtcctagagcacactgttacttccttaaatgaaggtgaacaatacttatttagaataagggcacaaaatgagaaaggtgtgtcagaaccaagagagactgtcacagccgtgactgtacaagacctcagagtgttgccaacaatcgatctttctacaatgcctcagaagaccatccatgtcccagctggcagaccagtagagctggtgatacctattgctggccgtccacctcctgctgcttcctggttctttgctggttctaaactgagagaatcagagcgtgtcacagttgaaactcacactaaagtagctaaattaaccatccgtgaaaccactatcagagatactggagaatacacacttgaattgaagaatgttaccggaactacttcagaaaccattaaagttatcattcttgacaagcctggtccaccaacaggacctattaagattgatgaaattgatgctacatcaattaccatttcctgggaaccacctgaattggacggtggtgctccactgagtggttatgtggtagaacaacgtgacgctcatcgtccaggatggctgcccgtttctgaatcagtgactaggtccacgtttaagtttaccagactcaccgaaggaaatgagtatgtgttccgtgtggctgcaacaaaccgcttcgggattggctcttacttgcagtctgaggtcatagagtgtcgcagcagcatccgtattcctggacccccagaaacattacagatatttgatgtttcccgtgatggcatgacacttacttggtacccaccagaggatgacggtggctcccaagtgactggatatattgtggagcgcaaagaagtgagagcagatcgatgggtccgtgtaaataaagtacctgtgacaatgacacggtaccgctccactggccttactgaaggcttagaatatgaacaccgtgtcacagccattaatgcaagagggtctgggaaaccaagtcgtccttccaaacccatcgttgccatggatccaattgctcctccaggaaagccacaaaacccaagagttactgatacaacaaggacatcagtctccctggcctggagtgttccagaagatgaaggaggatctaaagtcacaggctacttgattgaaatgcaaaaagtagatcaacatgaatggaccaagtgtaacaccactccaaccaagattcgagagtatactctaacacacctacctcagggtgcagaatacaggttccgcgtcctagcttgtaatgctggtggacctggtgagcctgctgaggtaccaggaacagtcaaagtcactgaaatgcttgaatatcctgattatgaacttgatgaaagataccaagaaggtatctttgtaaggcaaggtggcgtcatcagacttaccataccaatcaaaggaaaaccattcccaatatgtaaatggaccaaggaaggccaggatattagtaagcgtgccatgattgcaacatctgaaacacacactgagcttgtgatcaaagaagcagacaggggtgattctggcacttatgacctggttctggaaaataaatgtggcaagaaggctgtctacatcaaggtcagggtgataggaagtcccaacagtccagaagggccactggaatatgatgacatccaagtccgctctgtgagggtcagctggagacctcctgctgatgatggtggtgctgacatcttaggctacatcctcgagagacgagaagtgcctaaagccgcctggtataccattgattccagagtccgaggtacatctctggtggtaaaaggcctcaaagagaatgtagaataccatttccgtgtttcagcagaaaaccagtttggcataagcaaacccttgaaatctgaggaaccagtcacaccaaaaacaccattgaatcctccagaacctccaagcaatcctccagaagtactcgatgtaaccaagagttctgttagcttgtcctggtcccggcccaaagatgatggtggttctagagtcacaggctactacatcgaacgcaaagagacatccactgacaagtgggtcagacacaacaagactcagatcaccaccacaatgtacactgtcacagggcttgttcccgatgctgagtatcagttccgcatcatcgcacagaatgatgttggcctgagtgagaccagccctgcttctgaaccagttgtttgcaaagatccatttgataaaccaagccaaccaggagaacttgagattctttcaatatccaaagatagtgtcactctacagtgggagaaacctgaatgtgatggtggtaaagaaattcttggatactgggttgaatatagacagtctggagacagtgcctggaagaagagcaataaggaacgtattaaggacaagcaattcacaataggaggtttgctggaagctactgagtatgaattcagggtttttgctgagaatgagactgggctgagcagacctcgcagaactgctatgtctataaagactaaactcacatctggagaggccccaggaatacgcaaagaaatgaaggatgttaccacaaaattgggtgaagctgctcaactctcatgccagattgttggaaggcctcttcctgacattaaatggtacagatttggtaaagagctcatacaaagccggaaatacaaaatgtcttcagatggacgcacacacactcttacagtaatgacagaggaacaggaagatgaaggtgtttatacctgcatagccaccaatgaggttggagaagtagaaaccagtagtaagcttctcctgcaagcaacaccgcagttccatcctggttacccactgaaagagaaatattatggagctgtgggttccacacttcggcttcatgttatgtacattggtcgtccagtacctgccatgacttggttccatggtcagaaacttttgcaaaactcagaaaacattactattgaaaacactgagcactatactcatcttgtcatgaagaatgtccaacgtaagactcatgctgggaaatacaaagtccagctcagcaatgtttttggaacagttgatgccatccttgatgtggaaatacaagataaaccagacaaacctacaggaccaattgtgatcgaagctctattgaagaactccgcagtgatcagctggaaaccacccgcagatgacggaggctcctggatcaccaactatgtggtggaaaaatgtgaggccaaggagggggctgaatggcaattggtgtcttcagccatctcagtgacaacctgtagaattgtgaacctcacagaaaatgctggctattacttccgggtttcagctcagaacactttcggcatcagtgaccctctagaagtgtcctcagttgtgatcattaagagtccatttgaaaagccaggtgctcctggcaaaccaactattactgctgtcacaaaagattcttgtgttgtggcctggaagccacctgccagtgatggaggtgcaaagattagaaattactaccttgagaagcgtgagaagaagcagaataaatggatttctgtgacaacagaagaaattcgagaaactgtcttttcagtgaaaaaccttattgaaggtcttgaatacgagtttcgtgtgaaatgtgaaaatctaggtggggaaagtgaatggagtgaaatatcagaacccatcactcccaaatctgatgtcccaattcaggcaccacactttaaagaggaactgagaaatctaaatgtcagatatcagagcaatgctaccttggtctgcaaagtgactggtcatccaaaacctatcgtcaaatggtacagacaaggcaaagaaatcattgcagatggattaaaatataggattcaagaatttaagggtggctaccaccagctcatcattgcaagtgtcacagatgatgatgccacagtttaccaagtcagagctaccaaccaagggggatctgtgtctggcactgcctccttggaagtggaagttccagctaagatacacttacctaaaactcttgaaggcatgggagcagttcatgctctccgaggtgaagtggtcagcatcaagattcctttcagtggcaaaccagatcctgtgatcacctggcagaaaggacaagatctcattgacaataatggccactaccaagttattgtcacaagatccttcacatcacttgttttccccaatggggtagagagaaaagatgctggtttctatgtggtctgtgctaaaaacagatttggaattgatcagaagacagttgaactggatgtggctgatgttcctgacccacccagaggagtcaaagttagtgatgtctcacgagattctgtcaacttaacatggactgagccagcctctgatggtggcagcaaaatcaccaactacattgttgaaaaatgtgcaactactgcagaaagatggctccgtgtaggacaggcccgagaaacacgttataccgtgatcaacttatttggaaaaacaagttaccagttccgggtaatagctgaaaataaatttggtctgagcaagccttcagagccttcagaaccaaccataaccaaagaagataagaccagagctatgaactatgatgaagaggtagatgaaaccagggaagtctccatgactaaagcatctcactcttcaaccaaggaactctatgagaaatatatgattgctgaagatcttgggcgtggtgagtttggaattgtccatcgttgtgttgaaacatcctcaaagaagacatacatggccaaatttgttaaagtcaaagggactgatcaggttttggtaaagaaggaaatttccattctgaatattgctaggcatagaaacatcttacacctccatgaatcatttgaaagcatggaagaattagttatgatctttgagtttatatcaggacttgacatatttgagcgcattaacacaagtgcttttgaacttaatgaaagagaaattgtaagttatgttcaccaggtctgtgaagcacttcagtttttacacagtcataatattggacactttgacattagaccagaaaatatcatttaccaaaccagaagaagctctaccattaaaatcatagaatttggtcaagcccgtcagctgaaaccaggggacaacttcaggcttctattcactgccccagaatactatgcacctgaagtccaccagcatgatgttgtcagcacagccacagacatgtggtcacttggaacactggtatatgtgctattgagtggtatcaacccattcctggctgaaactaaccaacagatcattgagaatatcatgaatgctgaatatactttcgatgaggaagcattcaaagagattagcattgaagccatggattttgttgaccggttgttagtgaaagagaggaaatctcgcatgacagcatcggaggctctccagcacccatggttgaagcagaagatagaaagagtcagtactaaagttatcagaacattaaaacaccggcgttattaccacaccctgatcaagaaagacctcaacatggttgtgtcagcagcccggatctcctgtggtggtgcaattcgatctcagaagggagtgagtgttgctaaagttaaagtggcatccattgaaattggcccagtttctgggcagataatgcatgcagttggtgaagaaggaggacatgtcaaatatgtatgcaaaattgaaaattatgatcagtctacccaagtgacttggtactttggcgtccgacagctggagaacagtgagaaatacgaaatcacctacgaagatggagtggccatcctctatgtcaaagacattaccaaattagatgatggtacctacagatgcaaagtagtcaatgactatggtgaagacagttcttatgcagagctatttgttaaaggtgtgagagaagtctatgactattactgccgtagaaccatgaagaaaattaagcgcagaacagacacaatgagactcctggaaaggccaccagaatttaccctgcctctctataataagacagcttatgtaggtgaaaatgtccggtttggagtaactataactgtccacccagagcctcatgtaacatggtataaatcaggtcagaaaatcaaaccaggtgacaatgacaagaagtacacatttgagtcagacaagggtctttaccaattaacaatcaacagtgtcactacagatgatgacgctgaatatactgttgtggcaaggaacaaatatggtgaagacagctgtaaagcaaagctgacagtaaccctacacccacctccaacagatagtaccttaagacccatgttcaaaaggttactggcaaatgcagaatgccaagaaggccaaagtgtctgctttgagatcagagtgtctggcatccccccaccaacattaaaatgggagaaagatggtcagccactgtccctcgggcctaacattgaaattatccatgaaggcttggattattatgctctgcacatcagggacactttgcctgaagacacgggttattatagagtcacagccactaacacagctgggtccaccagctgccaggctcacctacaagtggaacgcctgaggtacaagaaacaggaattcaagagtaaggaggagcatgagcgacacgtacaaaaacaaattgacaaaaccctcagaatggctgaaattctttctggaactgaaagtgtaccactgacacaggtagctaaagaggctctgagagaagctgctgtcctttataaaccggctgtaagcaccaagactgtaaaaggggaattcagacttgagatagaagaaaagaaggaggagagaaaactccggatgccttatgatgtaccagagccacgcaagtataagcagactaccatagaagaagaccaacgcatcaagcagttcgtgcccatgtctgacatgaagtggtataaaaagatacgtgatcagtatgaaatgcctgggaaacttgacagagttgtacagaaacgacccaagcgcatccgcctttcaagatgggaacagttctatgtgatgcctcttccacgcattacagatcaatacagacctaaatggcgtattcctaaactgtcccaagatgatcttgagatagtgagaccagcccgccggcgtacaccttctcctgattatgacttttactaccgacctagaagacgttctcttggggacatctctgatgaagaattactcctccccattgatgactacttagcaatgaaaagaacagaggaagagaggctgcgtcttgaagaagagcttgagttaggtttttcagcttcacccccaagtcgaagccctccacactttgagctttctagcctacgttactcttcaccacaagctcatgtcaaggtggaggaaacaagaaaagacttcaggtattcaacctatcacatcccaacgaaggctgaagctagtacaagttatgcagaactgagggaacggcatgcccaggctgcgtacagacagccaaagcaacggcaaagaatcatggctgagagggaggatgaagagttgcttcgcccagttacgaccacccagcatctctcagaatacaaaagcgaacttgacttcatgtcaaaggaggaaaagtctagaaagaaatcaaggcgacaaagagaagtgacagaaataacagaaattgaggaagaatacgaaatctcaaaacatgctcaaagagaatcatcctcatctgcgtctagactactgagacgacggcgctccctgtctccaacttatattgagttaatgaggccagtgtctgagctgatccggtcacgtccacaaccggctgaggaatacgaagatgacacagaaagaaggtcacctactccagagagaactcgcccacgatcccccagccctgtgtctagtgagagatcactctcgagatttgagaggtctgcaagatttgatatcttttccaggtatgagtccatgaaagctgctttaaaaactcagaagacatcagaaaggaagtatgaagttttgagtcagcagcctttcacactggaccatgcccctcgaatcacactgagaatgcgctcgcacagggtaccatgtggccaaaatacacgttttattttaaatgttcagtctaagccaactgccgaggttaaatggtaccacaatggtgtggaactccaagaaagcagtaagattcattacaccaacacgagtggagtcctcaccctggaaattctggactgtcatactgatgacagtggaacctaccgtgctgtgtgcaccaactacaagggcgaagcttctgactatgcaacgttggacgtgacaggaggggattataccacctatgcttcccaacgcagagatgaagaggtccccagatctgttttccctgagctgacaagaacagaggcgtatgctgtttcatcatttaagaaaacatctgagatggaagcttcgtcttctgtcagggaagtgaaatcacagatgacggagacaagggaaagtctctcctcatatgaacactctgcatctgcagaaatgaaaagtgctgcattagaagaaaagtcactggaagaaaaatccacaaccagaaagatcaagacgactttggcagcaagaattctaacaaagccacggtccatgaccgtctacgagggcgagtctgcaaggttttcttgtgacaccgatggtgagccggtaccaactgtgacctggctgcgtaaaggacaagtgctaagtacttctgcccgccaccaagtgaccaccacaaagtacaaatcaacctttgagatctcttcagtccaggcttccgatgagggcaattacagcgtggtggtagaaaacagtgaagggaaacaagaagcagagttcactctgactattcaaaaggccagggtaactgaaaaggctgtgacatcaccaccaagagtcaaatccccagagcctcgggtgaaatccccagaagcagttaagtctccaaaacgagtgaaatctccagaaccttctcacccgaaagccgtatcacccacagagacaaaaccaacaccaacagagaaagttcagcacctcccagtctctgccccaccaaagattactcagttcctgaaagcagaagcttctaaagagattgcaaaactgacctgtgtggttgaaagcagtgtattaagggcaaaagaggtcacctggtataaagatggcaagaaactgaaggaaaatgggcatttccagtttcattattcagcagatggtacctatgagctcaaaatcaataacctcactgaatctgatcaaggagaatatgtttgtgagatttctggtgaaggtggaacgtctaaaaccaacttacaatttatggggcaagcctttaagagtatccatgagaaggtatcaaaaatatcagaaactaagaaatcagatcagaaaaccactgagtcaacagtaaccagaaaaactgaaccaaaagctcctgaaccaatttcctcaaaaccagtaattgttactgggttgcaggatacaactgtttcttcagacagtgttgctaaatttgcagttaaggctactggagaaccccggccaactgccatctggacaaaagatggaaaggccattacacaaggaggtaaatataaactctctgaagacaagggagggttcttcttagaaattcataagactgatacttctgacagtggactttatacttgtacagtaaaaaattcagctggatctgtgtcctctagctgcaaattaacaataaaagctataaaagatactgaggcacagaaagtctctacacaaaagacttctgaaattacacctcagaagaaagctgttgtccaagaggaaatttcccaaaaagccctaaggtctgaagaaattaagatgtcagaggcaaaatctcaagaaaagttagccctcaaagaggaagcttcaaaggttctgatttctgaagaagtcaagaaatcagcagcaacctccctggaaaaatccattgtccatgaggaaatcactaaaacatcacaggcatcagaagaagtcagaactcatgctgagattaaagcattttctactcagatgagcataaacgaaggtcaaagactggttttaaaagccaacattgctggtgccactgatgtgaaatgggtactgaatggcgtagagcttaccaactctgaggagtaccgatatggtgtctcaggcagcgatcagaccctaaccatcaagcaagccagtcacagagatgaaggaatcctcacctgcataagcaaaaccaaggaaggaatcgtcaagtgtcagtatgatttgacactgagcaaagaactctcagatgctccagccttcatctcacagcctagatctcaaaatattaatgaaggacaaaatgttctctttacttgtgaaatcagtggcgagccatcccctgaaatcgaatggtttaaaaacaacctgccaatttctatttcttcaaatgtcagcataagccgctccagaaatgtatactcccttgaaatccgaaatgcatcagtcagcgacagtggaaagtacacaattaaggccaaaaatttccgtggccagtgttcagctacagcttccttaatggtccttcctctagttgaagaaccttccagagaggtagtattgagaacaagtggtgacacaagcttgcaaggaagcttctcgtctcagtcagtccaaatgtctgcctccaagcaggaggcctccttcagcagtttcagcagcagcagtgctagcagcatgactgagatgaaatttgcaagcatgtctgcccaaagcatgtcctccatgcaagagtcctttgtagaaatgagttccagcagctttatgggaatatctaatatgacacaactggaaagctcaactagtaaaatgcttaaagcaggcataagaggaattccgcctaaaattgaagctcttccatctgatatcagcattgatgaaggcaaagttctaacagtagcctgtgctttcacgggtgagcctaccccagaagtaacatggtcctgtggtggaagaaaaatccacagtcaagaacaggggaggttccacattgaaaacacagatgacctgacaaccctgatcatcatggacgtacagaaacaagatggtggactttataccctgagtttagggaatgaatttggatctgactctgccactgtgaatatacatattcgatccatttaagagggcctgtgcccttatactctacactcattcttaacttttcgcaaacgtttcacacggactaatctttctgaactgtaaatatttaaagaaaaaaaagtagttttgtatcaacctaaatgagtcaaagttcaaaaatattcatttcaatcttttcataattgttgacctaagaatataatacatttgctagtgacatgtacatactgtatatagccggattaacggttataaagttttgtaccatttattttatgacattttacaatgtaagttttgaaactaactgttggtaggagaaagtttcttatggaacgaataccctgctcaacatttaatcaatctttgtgcctcaacatactgttgatgtctaagtatgcctcagtgggttgagaaaatccccattgaagatgtcctgtccacctaaaagagaatgatgctgtgcatatcacttgatatgtgcaccaatacctactgaatcagaaatgtaaggcattggtgatgtttgcatttaccctcctgtaagcaacactttaacgtcttacattttctctgatgatgtcacacaaaattatcatgacaaatattaccagagcaaagtgtaacggccaacactttgttcgctcattttacgctgtctctgacataaggagtgcctgaatagcttggaaaagtaacatctcctggccatcccttcatttaaccaagctattcaagtattcctatgccagagcagtgccaactcttggaggtcccagagtgcagccaatgcctttgtgtggtagttctaaattttaattgcacctgaaaaacctgggcacctaagcaatgagccacagcaaaaagtaaagaacaacaacaaaataaagctgttgttaaattttaaacaatattactaattgcccaaaatgtcaatttgatgtagttcttttcatgcaagtataaattcaattgttagttataattgttggacctccttgagatagtaacaacaaaataaagcaagctatctgcacctcaaaa

SEQ ID NO: 5008 - DNA, 101517 bp, Homo sapiens; identical to SEQ ID NO: 585

SEQ ID NO: 5009 - DNA, 17305 bp, Homo sapiens
gagcagtcgtgcattcccagcctcgcctcgggtgtagggattgcatagaaaagcaaaactacacagtcttgactgtgtagttttgtttttaggattagaggctcaccgattcatgtcggagatggtcagaaaaaccaactctccataggacgtcgtttcagaagcaaccttgggcttagtcccaccctttttaggcactcttgagaaatcagagtgcctagaaagatgacaactcaagcaccgacgtttacgcagccgttacaaagcgttgtggtactggagggtagtaccgcaacctttgaggctcacattagtggttttccagttcctgaggtgagctggtttagggatggccaggtgatttccacttccactctgcccggcgtgcagatctcctttagcgatggccgcgctaaactgacgatccccgccgtgactaaagccaacagtggacgatattccctgaaagccaccaatggatctggacaagcgactagtactgctgagcttctcgtgaaagctgagacagcaccacccaacttcgttcaacgactgcagagcatgaccgtgagacaaggaagccaagtgagactccaagtgagagtgactggaatccctacacctgtggtgaagttctaccgggatggagccgaaatccagagctcccttgatttccaaatttcacaagaaggcgacctctacagcttactgattgcagaagcataccctgaggactcagggacctattcagtaaatgccaccaatagcgttggaagagctacttcgactgctgaattactggttcaaggtgaagaagaagtacctgctaaaaagacaaagacaattgtttcgactgctcagatctcagaatcaagacaaacccgaattgaaaagaagattgaagcccactttgatgccagatcaattgcaacagttgagatggtcatagatggtgccgctgggcaacagctgccacataaaacacctcccaggattcctccgaagccaaagtcaagatccccaacaccaccgtctattgctgccaaagcacagctggctcggcagcagtccccatcgcccataagacactccccttccccggtcagacacgtgcgggcaccgaccccatctccggtcaggtccgtgtctccagcagcaagaatctccacatcccccatcaggtctgttaggtctccattgctcatgcgtaagactcaggcatccaccgtggccacaggtcctgaagtgcctcccccttggaagcaagagggctacgtggcctcctcatctgaggctgagatgagagagacaacgctgacaacctctactcagatcaggacagaagagagatgggaagggagatacggtgtccaggagcaagtgaccatcagtggtgctgcgggtgctgccgccagtgtgtcggccagtgctagctacgcagcagaggctgttgccactggtgctaaagaggtgaaacaagatgctgacaaaagtgcagctgttgcgactgttgttgctgccgttgatatggccagagtgagagaaccagtgatcagcgctgtagagcagactgctcagaggacaaccacgactgctgtgcacatccaacctgctcaagaacaggtaagaaaggaagcggagaagactgctgtaactaaggtagtagtggccgccgataaagccaaggaacaagaattaaaatcaagaaccaaagaagtaattaccacaaagcaagagcagatgcacgtaactcatgagcagataagaaaagaaactgaaaaaacatttgtaccaaaggtagtaatttccgcagctaaagccaaagaacaagaaactagaatttctgaagaaattactaagaaacagaaacaagtaactcaagaagcaataagacaggaaactgagataactgctgcatccatggtggtagttgccactgcaaagtccacaaaactagaaacagtcccgggagctcaagaagaaactaccacacaacaagatcaaatgcacctaagttatgaaaagataatgaaggaaactaggaaaacagttgtacctaaagtcatagttgccacacccaaagtcaaagaacaagatttagtatcaagaggtagagaaggcattactaccaaaagagaacaagtgcaaataactcaggagaagatgagaaaggaagccgagaaaactgccttgtctacaatagcagttgctactgctaaagccaaagaacaagaaacaatactgagaactagagaaactatggctactagacaagaacaaatccaagttacccatggaaaggtggacgttggaaaaaaggctgaagctgtagcaacagttgttgctgcagtagaccaggcccgagtcagagagcccagagagcctgggcatcttgaagaatcctatgctcagcagaccactttggagtacggatataaggaacgcatttccgccgcaaaggtagctgagcctccccaacgtccagcctcagaaccccacgttgtccctaaagcagtcaagcctagagtaatccaggctccttctgagactcatatcaaaactactgatcaaaagggaatgcacatatcatcacagatcaagaaaactacagatctaacaacggaaagattagtccatgtggataaacgcccccgcacagctagccctcactttactgtttcaaaaatttctgttcctaagacagaacatggatatgaggcatcaatagccggtagtgctattgccacattacaaaaagagttgtcagccacatcttctgctcagaagatcaccaaatcggtgaaggctcctactgtgaagcccagtgagactagagtaagggcagagcccacacccttgccacagttccccttcgctgacacaccagatacttacaagagtgaagctggcgttgaggtgaaaaaggaagtaggggtgagcatcactggcaccaccgtccgtgaagagcgctttgaagtactgcacggacgcgaagccaaggtaacagaaacagcaagagtaccagcacctgttgaaattcctgttactccaccaactttggtctcgggcttaaaaaatgtgactgtcatagaaggtgaatctgtcaccttggagtgccacatctctggatacccatccccgacagtgacatggtacagggaagactaccaaatcgaaagttccattgacttccagataaccttccagagtggaattgctcgtcttatgattcgcgaagcatttgcggaagacagcgggcgatttacttgcagtgctgtaaatgaggctggaaccgtcagcacatcctgctatctggctgtgcaggtgtcagaagaatttgaaaaggaaaccacagccgtgactgagaaatttactacagaagagaaacgctttgttgagtcaagagatgtggttatgactgatactagcctcacagaggaacaagcagggcctggagaacctgccgcgccttactttattacaaaaccagtggtccagaaactggtggaaggtgggagcgtggtgtttggatgccaagttggcggcaacccaaagccccatgtatactggaaaaaatctggtgttcctctaaccactggatacagatacaaagtgagttacaacaaacaaaccggtgaatgcaagctggtgatttctatgacttttgctgatgatgctggagaatacactattgttgttcgcaataagcatggagaaacttctgcatctgcttccttgcttgaagaagctgattatgagttactgatgaagtcccagcaagaaatgctttatcagacacaagtgactgcatttgttcaagaacctaaagttggagaaacagcacctggatttgtatactctgagtatgaaaaagagtatgaaaaagaacaagccttaattaggaagaaaatggccaaagatactgtagtggtcagaacttatgtagaagatcaggaattccatatttcttcctttgaagagagacttattaaagaaattgaatatagaataataaagactacattagaagaacttcttgaagaagatggagaagaaaagatggcagttgacatttctgaatctgaagctgttgaatcaggatttgattcaagaatcaagaattatagaattcttgaggggatgggtgtcacttttcattgcaagatgtctggatatccattaccaaagattgcttggtacaaagatggcaagcgcatcaaacatggagaaagataccaaatggactttctacaagatggcagagctagtctgcgtatacctgttgttcttccagaagatgaaggaatctacactgcatttgccagcaatattaaaggaaatgcaatttgctcagggaaattgtatgtggagcctgctgcaccacttggagctccgacttacattcccacactagagccagtgagcagaatcagatctctctctccacgttcagtgagcaggtctcctatacgcatgtctcctgcacggatgtcacctgcaaggatgtctcctgcacggatgtcccctgcaagaatgtcccctggacgtaggctggaggagacagatgagtcacaacttgagagactatataaaccagtctttgtgttaaaacctgtttctttcaaatgtttagaagggcaaactgccagatttgacttaaaggttgttggtagacctatgccagagacgttctggtttcatgatggccagcaaattgtcaatgactatacccataaagtagtcattaaagaagatggtactcaatcactaattattgtccctgccacacccagtgattctggggaatggactgtggttgcccaaaacagggcaggcagatcttcaatttcagtgattttaactgtggaagctgtggaacatcaggtaaaaccgatgtttgtagaaaaactgaaaaatgtcaatataaaggaaggttcccgacttgaaatgaaagtcagagctacgggtaaccccaaccctgacattgtatggttgaaaaacagtgacatcattgtgcctcataaatatcccaaaatcagaattgaaggaaccaagggagaagctgcccttaaaatcgattccactgtcagccaagattctgcctggtatactgcgactgctattaataaagctggcagagacactacaagatgcaaagtaaatgttgaagttgagtttgcagagcctgagccagagagaaagttaatcatcccacgggggacatatagagcaaaggagattgcagccccagaactggagcccctccatttgcgatatggccaagagcaatgggaagaaggtgatctctatgacaaagagaaacaacagaaaccatttttcaagaaaaaactcacttccttaagacttaagcgctttgggcctgcccactttgaatgcaggctaacacccattggtgacccaacgatggtggtggagtggctccatgatggaaagccacttgaagcagccaacaggctccgtatgatcaatgaatttgggtactgcagccttgattatggcgttgcatattctagagacagtggtatcattacttgcagagccactaacaaatatggaacagatcacacatctgctacccttattgttaaagatgagaaaagtcttgtggaagaatcccaattgcctgaggggaggaaaggcttacagagaattgaagaattagagagaatggctcatgaaggtgcacttacaggtgtaacaacagatcagaaagaaaagcaaaagccagacattgtcttgtacccagagccagttagagtacttgaaggggagactgcaaggttccgctgcagggtaacaggctaccctcagcccaaagtcaactggtacctcaatggacagctcatccgcaaaagcaaaaggttcagagttcgctatgatggtatccattacctggacatcgtggactgcaaatcatatgacacaggtgaagtgaaggtcaccgcggaaaatcctgaaggtgtgatagagcataaagtgaagcttgagattcaacagagggaagattttaggtctgtccttaggagagctcctgaaccaaggcctgagtttcacgtacatgaaccaggaaagcttcagtttgaagtacaaaaagtggatagacctgttgacaccactgaaaccaaagaagttgtgaagttgaaaagggctgaaagaattacccatgaaaaagtgcctgaagagtcggaagagctgcgcagtaaattcaagcgcagaacagaagagggctattatgaagccattaccgctgtggagctcaagtctcgaaagaaggatgaatcctatgaggaactcctcaggaagacaaaagatgaacttctccactggaccaaagagttaactgaagaggaaaagaaagctcttgccgaagaaggcaaaatcacgattccaacttttaaacctgacaagattgaactaagtcctagtatggaggctccaaaaatcttcgaaagaatccagagccaaacagtgggccaaggatctgatgcacacttccgggtcagagtcgtggggaaaccagaccccgaatgtgaatggtacaaaaatggtgtcaaaattgaacggtctgaccggatctactggtactggcccgaagacaatgtttgtgaattggtcataagagatgtgactgctgaggactctgccagcatcatggtaaaagccatcaacatagctggagaaacctccagtcacgcattcttacttgtccaagccaagcaattgatcactttcacacaggaattacaagatgttgttgctaaggaaaaagacactatggcaacctttgaatgtgaaacttcagaaccatttgtcaaagtgaaatggtataaagatggtatggaggttcatgagggagataaatacaggatgcactctgacagaaaggttcacttcctctccatactgaccattgatacgtctgatgctgaagattacagctgtgtacttgtggaagatgaaaatgtcaaaacgactgctaaacttattgttgaaggtgcagttgttgagtttgtgaaagaacttcaggacatagaagttccagaatcatattcaggagaattagagtgcattgtatccccagaaaatatagaaggaaaatggtatcataatgatgtggagcttaaatccaatggcaaatatacaattacatctcgtcgtggacgtcagaacctcacggtcaaggatgtaaccaaggaggaccagggagaatacagctttgtcatcgacgggaaaaagacaacctgtaaattaaagatgaaaccccgccccattgctatcctacaaggacttagtgaccaaaaagtctgtgagggtgacattgttcagcttgaagttaaagtctccttggaaagtgtggaaggcgtctggatgaaagacggccaagaagtgcagcccagtgacagggttcacattgtgatagacaaacaatctcatatgctgctcattgaagacatgactaaggaagatgctggaaattactctttcaccattccagcccttggcctctccaccagtgggcgtgtctctgtctatagtgtggacgtgataacacctctaaaagatgttaatgtgattgaaggcaccaaggctgtgcttgaatgtaaggtgtcagtccctgatgtgacttctgttaagtggtacttaaatgatgaacaaatcaagcctgatgaccgtgtacaggccattgtgaaaggtactaaacagcgactagtcattaaccgaactcatgcttcagacgaaggaccttacaagctgatagttggcagagttgaaaccaactgtaatctctctgtagaaaaaattaaaattatcagaggtcttcgtgaccttacctgtacagaaactcaaaatgtggtgtttgaggttgagctgtcccactctggaattgatgtcctgtggaattttaaggacaaggaaatcaagcccagttctaaatataaaattgaagcacatggaaaaatatataaattgacagttctaaatatgatgaaagatgatgaaggaaaatacacattttacgcgggagaaaatatgacatctggaaaacttactgtggcaggtggggccatctccaagccactcacagatcagaccgtagctgaatcccaggaagctgtgtttgaatgtgaagttgccaacccagattccaaaggcgaatggttgagggatggcaaacacctaccactgactaacaacatcagaagtgagtctgatggccacaaaaggagacttatcattgctgccaccaaattagatgacattggagaatatacctacaaggtggccacctccaaaacatctgccaaactcaaagttgaagctgtcaaaattaagaagactctgaagaacctcacagtgacagaaacacaggatgctgttttcactgtcgagcttacacaccctaatgtcaaaggtgtccagtggatcaaaaatggagttgtgctggaatccaatgaaaagtatgctatctctgtcaaaggaacaatttactctctgaggattaaaaactgtgccatcgtggatgagtctgtttatggcttcaggcttggaaggcttggagccagtgccagactgcacgtggagactgtcaagatcattaaaaagccaaaggatgtgacagccttggaaaatgccactgttgcctttgaagttagtgtttcccatgacactgttccagtaaaatggttccataagagtgtggaaattaagccaagtgacaaacacagactggtctcagaaaggaaagtccacaagctgatgctgcagaacatctccccctcagatgctggggaatacacagctgtggtcgggcaattggaatgcaaagcaaaactgtttgtggagacattacatattacaaaaaccatgaaaaatatcgaggtgcctgagaccaaaactgcctcttttgagtgtgaggtgtcccacttcaatgtcccttccatgtggctgaagaatggtgtggaaattgagatgagtgaaaagttcaagatagttgtgcagggaaaactccatcagctgatcatcatgaacaccagcacagaggactcggcagaatacacatttgtctgtggcaatgaccaagtcagtgccaccctgacagtcaccccaatcatgattacttccatgctgaaagacatcaacgctgaagaaaaagacactattacttttgaggtgacagtgaactatgaaggcatctcttacaaatggttaaagaatggtgtggaaatcaaatcaactgacaagtgccagatgagaaccaaaaagctcacacactcactgaacatcaggaatgttcactttggggatgctgctgactacacctttgtggctggaaaagcaacatcaacagccacactttatgtggaagctcgtcatatagaatttaggaaacacattaaggacattaaggtactggagaagaagcgagccatgtttgaatgtgaagtttctgaacctgacatcactgtacagtggatgaaagatgaccaggaactgcagatcacagacagaataaagattcagaaggagaaatatgtccaccgccttctgatcccatccacccggatgtctgatgctgggaagtacacagtggtggcaggaggcaacgtgtcaactgcaaaactctttgtagaaggcagagatgttcgcatccgaagtattaaaaaggaggttcaggtcattgagaaacagcgtgctgttgttgaatttgaggtcaatgaagacgatgttgatgcccactggtataaagatggcattgaaatcaatttccaagttcaagaacgacacaaatatgtagtggaaagaagaatccaccgaatgtttatctctgagaccagacagagcgatgcaggagaatacacctttgtggcaggaaggaacaggagttctgtcactctctatgtcaatgctcctgaaccgccccaagttctgcaggagctccagcctgtcactgtgcagtctggcaagcctgcccgcttctgtgccgtgatatccggaagaccacagcccaaaatttcctggtacaaggaagagcagctgctttccactggcttcaagtgcaaatttcttcatgatgggcaagaatacacgcttttgctaattgaagccttcccagaggatgcggcagtctatacctgtgaagccaagaatgactatggtgttgccacaacatcagcttcactctcagtggaagttccagaagttgtgtctcctgatcaggaaatgcctgtttatccacctgccatcatcaccccgcttcaggacactgtcacttctgaagggcagccagcccgttttcaatgccgggtttctggaacagatctaaaagtgtcgtggtacagcaaagacaagaaaatcaagccatctcggttctttagaatgactcaatttgaagacacttatcaactggaaattgccgaagcttatccagaagatgaaggaacttacacgtttgttgctagtaatgctgtaggccaagtatcaagcacagccaacctgagtctggaagctcctgaatcaattttgcatgagaggattgaacaagagattgagatggaaatgaaagaattattctctgagggggaatctgaacattcagaaagggatacacgtgacgccttttcagattctgaagacatagaccacaaatccatggctgctaaaagatatgcaagtagaatatcatctacaagctcctggcctgaatattttaagccttcttttacccagaaacttacatttaaatatgttttagagggtgaaccggttgtttttacatgtagattaattgcctgtccaactccagaaatgacttggtttcataacaatcggcccatcccaacaggtcttcgtcggattataaaagctgagagtgatttacaccatcactcttccagcttagagattaaaagggtccaagacagagattctggaagttataggttactagcaattaatagtgaagggtctgcagaatcaactgcatcattgcttgttatccaaaaagggcaagatgagaaatatttagaatttctgaaaagagcagaacggacacatgaaaatgtggaggctttagttgaaaggggagaagataggataaaggttgacctgaggtttactggctctccctttaacaaaaaacaagatgtggaacaaaagggaatgatgagaactatacattttaagacaatgagttctgccaagaaaacagattacatgtatgatgaagaatatttagaaagtaaatctgacataagaggttggcttaatgtaggtgaaagtttcctggacaaggagaccaaagtgaagttgcaacgtttaagggaggctagaaaaacattaatggagaaaaagaaattatctcttttagatacgtcttctgaaataagctcaagaactttgagaagtgaagctagtgataaagatattctgttctctagagaggacatgaaaatcagatctatgtctgatctagctgaaagttataaggtagatcattcagctgagagtattgtgcaaaatccacatgccctttctaatcaaatggatcaaaatatagaatctgaggaacttcccacaagctttcaaactattgttgatgaagaaattttccagactgaaataagaatgagccaagaagcactggtaaaggaaagtctaccaaaagaccatttatatggtgaaattctagtaaatgaaaatacccaagcaagaggacagctggaagaaattatggccaatactacaattggagagtcatccacatatatcactaatgtatgtgagaaggaggaagtatatgagactcctgaaaatgtgtctcaagctattacaccacatgccagcgaatcttttggtacacttgtaaatgttgaagaaagtgaagaaatagctagtgaaagaataaaaaaggatgatttgagagaattacaactctctgcttctacacgaattgatgaattcaaaaccgaacagaaggaagaaaacatgagattttttgaaaattcttttcgaaaacgcccacaacgttgcccaccttcatttcttcaagaaattgaatctcaagaagtttatgaaggtgacagttgtaattttgtgtgtcattttcaaggatatcctcaacctatagtgacgtggtataacaatgacatgccaatcccacgtaatcaaaactttatcattcattcgttggaaaactattcaatattaactctttcatctgttcatcatcagaatgaaggttctattacttgtgtgctatttaaccaatatggaacagtaaaaacaaccagtatgcttaaagtgaaagcaaaacaaaaacatgatgtcaaagcacataaagtcccagtgttccatgactacttggatgaggaagaagagttagcattggtgtttgaccaagcaaaaggcgcccatccatctatgagtcaagagggccaaacaaatcttcatttgttaaaaactaacccaccagttcctccctctggagacacagaattgctttcctttcctgtagaaattcaggtaacagcagctactcctatcccagaacaggataaagagtctaaagaagtgtttcaaactgaggagctggaacctaaagcaatgcctcaagatcaagttactcaatcaccaaaacacagatttgtatttttgtctgatattactaatgaaccaccaaaaatgttacaagaaatgccaaagcatgccaggtgtagagaaggggattccatcattcttgaatgtttaatatctggtgagccccagccagttgtaacatggtttcaaaatggagtccttttaaagcagaaccagaagtttcagtttgaagaagttaattgtagccaccaattatatattaaggatgttaattctcaagattctggaaaatataaatgtgttgctgaaaacaattcaggggcagttgaaagtgtttcagatctaacagtggagcctgtcacttatagagaaaatagtcaattcgaaaatattggtgaaatttatggaaaatattccagagatcagcaactgcaagaccagggagaatctgtaagggcacatttttatgattatccagctggtccctttactccctggacaaatgtaaaagaatattcagtaagggactattttcaaagccttgagactattgagcaaatagaccagaaagagcaggtgcgttgcataccttctagagaaaaaattcccagatttgtgcatggtgcttcaagaaccataaaaatcagcaagcccatcagggctgaattcatacaatgtcaggctgaagggaaagagagacatgtaagtgaaaaatcaaagctgcaccaagcagagggtactgtttatccatttgttgatgatttcagtgatgtcactattaagaaagaaataagaaataattttggaaaacttggtagatcagaaaaggaaaatgtacaagaatgtgcccaaagtgactatttaccaaatattcactctgagagaatttctgacagttacaatacaaaagattcatctgccattgtatatgaagaatcccttggtgaagagatacactacccggggaaaaaggtgaagcatagaattatcgaatttgaaaaattacatgtagaaaaaggagttctagaaaaaagacctaccagaacatcaattgttaatcctcctcaaaagaagattgatgacaaagccttttcattaaagcaaagagaatcaagatcaagcaatctaaatgcaaatatgtatcaggcagagaaaatgtctccaaatactgaatcagattcatctaacattgcaataaatttaaagctgctttcctctcaaactcataaagaatttgacgcacaagaaagggaacaacaggaaaaaataagtcttatagataaacctgcaatttctaaaagagctgaacatgaatcacctattacatttgacttaaagcagtttcacactcaaataaaacacacagatgtgaaattccaagaattagatagtggtcaaccagaagaagcttattttaaaatccaacatcctgctgacactgagaacattgtatttgatctaaaacaaatgtattctcatataggagatccagctctggagttccaagggcaagaaactagggaacagcaggaaatacattataaagaaaaaattcctagccctgaaacgttacaacctgacacacacaatatctctaaaagtgtgcaaaataatgtatttgccagtcaagaaatttcttccagtcaagagctttcaaatagaactatggtggagaaaagtagtattgatgaaaattccatttctttagaaaaagaagtccgacatgtacaggaacaaaacttagacattttaaaaactgatctttctcttaaatccttttctgaagaaatctatagtgaatcatgtgccctacttccaacctcatctgcagatatagaagaaactgatctttctgagaaaagttgtcctctagaaaatggaggcagaagttccatctcacatttgaaaaaagcagcaagtgaggaaaagcctttaggggttggtgaaatggaagaagaatgcactctagaaccagagttggcagcatttccaaagcaggatggtgggacacaggaatatacagatgccactttggaagaccacagaggtgatgttcaggaagctgacacactccatagacagctctccctgagtcagtgcttcccactcttgatgactgaagaacaacagaatccaggtgaacaaataagtacaaacattcatgcctctggagaagaaaaatgttatgaagaagttcaagttcagaatgaagcttctttctccactttagaaggagaaatgatagaaactagtttttctcaaaatattcctaaattagatgaggcacataccactgaggcagcagaatctgagacctccctaacacaatatttacttgctgctggaaagcgtgaggttcctgaaactaaagacaccagagaccaggcaaagcttgtccagagtgaatcaatcacttcaatggaggtggaagaagtaactttcaacactgtgtatgaatactacaaccagaaacaggaatcactaggtcgtccactttctcctgagtctgacatttccattggtgtgggaagtacaaccagtgaagaaatatctgagttagatcagttttataccccaccatcatctgttgaatattttgaatctccaaagtcccctgacttatattttaatccttcagatataactaaacaatcctcaatacattcaggaggtgagacagttgaaagatattccacacctttaggggaagttgctgaaagatattcaacaccttccgaaggtgaggtaggagaaagatactccacacccccaggggagacactagagagatactccacacctccaggagagactctagagagatactccacacccccaggagagactctagagagatattccacacccccaggagagactctggagagatactccacacccccaggagagactctagagcgatattccacacccccaggggaggcactagagagatattctattcctactggaggaccaaaccccactggtacttttaaaacatatccatcaaaaatagaaagggaagacggtacaccaaatgagcatttctacacacctacagaagagaggggttcagcttatgaaatatggcgttccgattcatttggtacacccaatgaagccattgagccaaaagacaatgaaatgcctccatcttttattgaacctctgaccaaaaggaaggtatatgaaaacacaacactaggcttcattgttgaagttgaaggtcttccagttcctggtgtgaaatggtatcgaaataaatctttactagagccagatgaaagaatcaaaatggaaagagtgggtaatgtgtgttcactggaaatttctaacattcaaaaaggagaagggggagagtacatgtgtcatgctgtaaacatcataggggaagcaaagagctttgcaaatgtagacataatgccccaggaagaaagagtggtggcactaccacctccagtaacacatcagcatgtcatggagtttgatttggaacacaccacatcatcaagaacaccttctcctcaagaaattgtcctggaagttgaattaagtgaaaaagacgttaaagaatttgagaagcaggtgaaaatagtgacagttcccgaatttactcctgaccataaaagtatgattgtgagtctagatgttcttccatttaattttgtagatccaaatatggattcaagggagggagaagacaaagaactaaaaattgatttagaagtatttgaaatgcctcctcgctttataatgcctatttgtgattttaaaattccagaaaattcagatgctgtattcaaatgttcagtcatagggatcccgactcccgaagttaagtggtataaagaatatatgtgtattgagccagataatattaaatacgtgattagcgaggagaagggaagtcacactcttaaaattcgaaatgtctgtctttctgatagtgcaacatacaggtgcagagctgtgaattgtgtaggagaggctatctgtcggggattcctcaccatgggagattctgaaatatttgctgtgatagcaaagaaaagcaaagtgactttaagcagtttaatggaagaattggtcttaaagagcaactacacagacagtttttttgaatttcaggtggtggaagggcctcccaggtttatcaaaggtatttctgactgttatgcaccaataggtacagcagcatattttcagtgcttagttcgtggctctccaagacccacggtttactggtacaaagatggaaaattagtccaaggaagaaggttcactgttgaggaaagtggcacagggttccataacctgtttataacaagcttagtaaagagtgatgaaggagagtataggtgtgtagctacaaacaaatcaggaatggctgagagctttgcagcactcaccttaacttaaaatgtaatgttttagtgcctcagtaattattagcattgatctgagtgctttcatattttccaaattatgtggatctaataaacttccaaacaggtccaccatatttgaattcattaccttggagacccctaaagaaataatctctatgtagaaatctcatctttgtaatacatgtaaatattttgttatctgaactgtggaatcatcacttgtgtcaatcatgctgtgtaatatcaaacacaattaaatctctccttggctacct

SEQ ID NO: 5010 - DNA, 82402 bp, Homo sapiens
gagcagtcgtgcattcccagcctcgcctcgggtgtagggattgcatagaaaagcaaaactacacagtcttgactgtgtagttttgtttttaggattagaggctcaccgattcatgtcggagatggtcagaaaaaccaactctccataggacgtcgtttcagaagcaaccttgggcttagtcccaccctttttaggcactcttgagaaatcagagtgcctagaaagatgacaactcaagcaccgacgtttacgcagccgttacaaagcgttgtggtactggagggtagtaccgcaacctttgaggctcacattagtggttttccagttcctgaggtgagctggtttagggatggccaggtgatttccacttccactctgcccggcgtgcagatctcctttagcgatggccgcgctaaactgacgatccccgccgtgactaaagccaacagtggacgatattccctgaaagccaccaatggatctggacaagcgactagtactgctgagcttctcgtgaaagctgagacagcaccacccaacttcgttcaacgactgcagagcatgaccgtgagacaaggaagccaagtgagactccaagtgagagtgactggaatccctacacctgtggtgaagttctaccgggatggagccgaaatccagagctcccttgatttccaaatttcacaagaaggcgacctctacagcttactgattgcagaagcataccctgaggactcagggacctattcagtaaatgccaccaatagcgttggaagagctacttcgactgctgaattactggttcaaggtgaagaagaagtacctgctaaaaagacaaagacaattgtttcgactgctcagatctcagaatcaagacaaacccgaattgaaaagaagattgaagcccactttgatgccagatcaattgcaacagttgagatggtcatagatggtgccgctgggcaacagctgccacataaaacacctcccaggattcctccgaagccaaagtcaagatccccaacaccaccgtctattgctgccaaagcacagctggctcggcagcagtccccatcgcccataagacactccccttccccggtcagacacgtgcgggcaccgaccccatctccggtcaggtccgtgtctccagcagcaagaatctccacatcccccatcaggtctgttaggtctccattgctcatgcgtaagactcaggcatccaccgtggccacaggtcctgaagtgcctcccccttggaagcaagagggctacgtggcctcctcatctgaggctgagatgagagagacaacgctgacaacctctactcagatcaggacagaagagagatgggaagggagatacggtgtccaggagcaagtgaccatcagtggtgctgcgggtgctgccgccagtgtgtcggccagtgctagctacgcagcagaggctgttgccactggtgctaaagaggtgaaacaagatgctgacaaaagtgcagctgttgcgactgttgttgctgccgttgatatggccagagtgagagaaccagtgatcagcgctgtagagcagactgctcagaggacaaccacgactgctgtgcacatccaacctgctcaagaacaggtaagaaaggaagcggagaagactgctgtaactaaggtagtagtggccgccgataaagccaaggaacaagaattaaaatcaagaaccaaagaagtaattaccacaaagcaagagcagatgcacgtaactcatgagcagataagaaaagaaactgaaaaaacatttgtaccaaaggtagtaatttccgcagctaaagccaaagaacaagaaactagaatttctgaagaaattactaagaaacagaaacaagtaactcaagaagcaataatgaaggaaactaggaaaacagttgtacctaaagtcatagttgccacacccaaagtcaaagaacaagatttagtatcaagaggtagagaaggcattactaccaaaagagaacaagtgcaaataactcaggagaagatgagaaaggaagccgagaaaactgccttgtctacaatagcagttgctactgctaaagccaaagaacaagaaacaatactgagaactagagaaactatggctactagacaagaacaaatccaagttacccatggaaaggtggacgttggaaaaaaggctgaagctgtagcaacagttgttgctgcagtagaccaggcccgagtcagagagcccagagagcctgggcatcttgaagaatcctatgctcagcagaccactttggagtacggatataaggaacgcatttccgccgcaaaggtagctgagcctccccaacgtccagcctcagaaccccacgttgtccctaaagcagtcaagcctagagtaatccaggctccttctgagactcatatcaaaactactgatcaaaagggaatgcacatatcatcacagatcaagaaaactacagatctaacaacggaaagattagtccatgtggataaacgcccccgcacagctagccctcactttactgtttcaaaaatttctgttcctaagacagaacatggatatgaggcatcaatagccggtagtgctattgccacattacaaaaagagttgtcagccacatcttctgctcagaagatcaccaaatcggtgaaggctcctactgtgaagcccagtgagactagagtaagggcagagcccacacccttgccacagttccccttcgctgacacaccagatacttacaagagtgaagctggcgttgaggtgaaaaaggaagtaggggtgagcatcactggcaccaccgtccgtgaagagcgctttgaagtactgcacggacgcgaagccaaggtaacagaaacagcaagagtaccagcacctgttgaaattcctgttactccaccaactttggtctcgggcttaaaaaatgtgactgtcatagaaggtgaatctgtcaccttggagtgccacatctctggatacccatccccgacagtgacatggtacagggaagactaccaaatcgaaagttccattgacttccagataaccttccagagtggaattgctcgtcttatgattcgcgaagcatttgcggaagacagcgggcgatttacttgcagtgctgtaaatgaggctggaaccgtcagcacatcctgctatctggctgtgcaggtgtcagaagaatttgaaaaggaaaccacagccgtgactgagaaatttactacagaagagaaacgctttgttgagtcaagagatgtggttatgactgatactagcctcacagaggaacaagcagggcctggagaacctgccgcgccttactttattacaaaaccagtggtccagaaactggtggaaggtgggagcgtggtgtttggatgccaagttggcggcaacccaaagccccatgtatactggaaaaaatctggtgttcctctaaccactggatacagatacaaagtgagttacaacaaacaaaccggtgaatgcaagctggtgatttctatgacttttgctgatgatgctggagaatacactattgttgttcgcaataagcatggagaaacttctgcatctgcttccttgcttgaagaagctgattatgagttactgatgaagtcccagcaagaaatgctttatcagacacaagtgactgcatttgttcaagaacctaaagttggagaaacagcacctggatttgtatactctgagtatgaaaaagagtatgaaaaagaacaagccttaattaggaagaaaatggccaaagatactgtagtggtcagaacttatgtagaagatcaggaattccatatttcttcctttgaagagagacttattaaagaaattgaatatagaataataaagactacattagaagaacttcttgaagaagatggagaagaaaagatggcagttgacatttctgaatctgaagctgttgaatcaggatttgattcaagaatcaagaattatagaattcttgaggggatgggtgtcacttttcattgcaagatgtctggatatccattaccaaagattgcttggtacaaagatggcaagcgcatcaaacatggagaaagataccaaatggactttctacaagatggcagagctagtctgcgtatacctgttgttcttccagaagatgaaggaatctacactgcatttgccagcaatattaaaggaaatgcaatttgctcagggaaattgtatgtggagcctgctgcaccacttggagctccgacttacattcccacactagagccagtgagcagaatcagatctctctctccacgttcagtgagcaggtctcctatacgcatgtctcctgcacggatgtcacctgcaaggatgtctcctgcacggatgtcccctgcaagaatgtcccctggacgtaggctggaggagacagatgagtcacaacttgagagactatataaaccagtctttgtgttaaaacctgtttctttcaaatgtttagaagggcaaactgccagatttgacttaaaggttgttggtagacctatgccagagacgttctggtttcatgatggccagcaaattgtcaatgactatacccataaagtagtcattaaagaagatggtactcaatcactaattattgtccctgccacacccagtgattctggggaatggactgtggttgcccaaaacagggcaggcagatcttcaatttcagtgattttaactgtggaagctgtggaacatcaggtaaaaccgatgtttgtagaaaaactgaaaaatgtcaatataaaggaaggttcccgacttgaaatgaaagtcagagctacgggtaaccccaaccctgacattgtatggttgaaaaacagtgacatcattgtgcctcataaatatcccaaaatcagaattgaaggaaccaagggagaagctgcccttaaaatcgattccactgtcagccaagattctgcctggtatactgcgactgctattaataaagctggcagagacactacaagatgcaaagtaaatgttgaagttgagtttgcagagcctgagccagagagaaagttaatcatcccacgggggacatatagagcaaaggagattgcagccccagaactggagcccctccatttgcgatatggccaagagcaatgggaagaaggtgatctctatgacaaagagaaacaacagaaaccatttttcaagaaaaaactcacttccttaagacttaagcgctttgggcctgcccactttgaatgcaggctaacacccattggtgacccaacgatggtggtggagtggctccatgatggaaagccacttgaagcagccaacaggctccgtatgatcaatgaatttgggtactgcagccttgattatggcgttgcatattctagagacagtggtatcattacttgcagagccactaacaaatatggaacagatcacacatctgctacccttattgttaaagatgagaaaagtcttgtggaagaatcccaattgcctgaggggaggaaaggcttacagagaattgaagaattagagagaatggctcatgaaggtgcacttacaggtgtaacaacagatcagaaagaaaagcaaaagccagacattgtcttgtacccagagccagttagagtacttgaaggggagactgcaaggttccgctgcagggtaacaggctaccctcagcccaaagtcaactggtacctcaatggacagctcatccgcaaaagcaaaaggttcagagttcgctatgatggtatccattacctggacatcgtggactgcaaatcatatgacacaggtgaagtgaaggtcaccgcggaaaatcctgaaggtgtgatagagcataaagtgaagcttgagattcaacagagggaagattttaggtctgtccttaggagagctcctgaaccaaggcctgagtttcacgtacatgaaccaggaaagcttcagtttgaagtacaaaaagtggatagacctgttgacaccactgaaaccaaagaagttgtgaagttgaaaagggctgaaagaattacccatgaaaaagtgcctgaagagtcggaagagctgcgcagtaaattcaagcgcagaacagaagagggctattatgaagccattaccgctgtggagctcaagtctcgaaagaaggatgaatcctatgaggaactcctcaggaagacaaaagatgaacttctccactggaccaaagagttaactgaagaggaaaagaaagctcttgccgaagaaggcaaaatcacgattccaacttttaaacctgacaagattgaactaagtcctagtatggaggctccaaaaatcttcgaaagaatccagagccaaacagtgggccaaggatctgatgcacacttccgggtcagagtcgtggggaaaccagaccccgaatgtgaatggtacaaaaatggtgtcaaaattgaacggtctgaccggatctactggtactggcccgaagacaatgtttgtgaattggtcataagagatgtgactgctgaggactctgccagcatcatggtaaaagccatcaacatagctggagaaacctccagtcacgcattcttacttgtccaagccaagcaattgatcactttcacacaggaattacaagatgttgttgctaaggaaaaagacactatggcaacctttgaatgtgaaacttcagaaccatttgtcaaagtgaaatggtataaagatggtatggaggttcatgagggagataaatacaggatgcactctgacagaaaggttcacttcctctccatactgaccattgatacgtctgatgctgaagattacagctgtgtacttgtggaagatgaaaatgtcaaaacgactgctaaacttattgttgaaggtgcagttgttgagtttgtgaaagaacttcaggacatagaagttccagaatcatattcaggagaattagagtgcattgtatccccagaaaatatagaaggaaaatggtatcataatgatgtggagcttaaatccaatggcaaatatacaattacatctcgtcgtggacgtcagaacctcacggtcaaggatgtaaccaaggaggaccagggagaatacagctttgtcatcgacgggaaaaagacaacctgtaaattaaagatgaaaccccgccccattgctatcctacaaggacttagtgaccaaaaagtctgtgagggtgacattgttcagcttgaagttaaagtctccttggaaagtgtggaaggcgtctggatgaaagacggccaagaagtgcagcccagtgacagggttcacattgtgatagacaaacaatctcatatgctgctcattgaagacatgactaaggaagatgctggaaattactctttcaccattccagcccttggcctctccaccagtgggcgtgtctctgtctatagtgtggacgtgataacacctctaaaagatgttaatgtgattgaaggcaccaaggctgtgcttgaatgtaaggtgtcagtccctgatgtgacttctgttaagtggtacttaaatgatgaacaaatcaagcctgatgaccgtgtacaggccattgtgaaaggtactaaacagcgactagtcattaaccgaactcatgcttcagacgaaggaccttacaagctgatagttggcagagttgaaaccaactgtaatctctctgtagaaaaaattaaaattatcagaggtcttcgtgaccttacctgtacagaaactcaaaatgtggtgtttgaggttgagctgtcccactctggaattgatgtcctgtggaattttaaggacaaggaaatcaagcccagttctaaatataaaattgaagcacatggaaaaatatataaattgacagttctaaatatgatgaaagatgatgaaggaaaatacacattttacgcgggagaaaatatgacatctggaaaacttactgtggcaggtggggccatctccaagccactcacagatcagaccgtagctgaatcccaggaagctgtgtttgaatgtgaagttgccaacccagattccaaaggcgaatggttgagggatggcaaacacctaccactgactaacaacatcagaagtgagtctgatggccacaaaaggagacttatcattgctgccaccaaattagatgacattggagaatatacctacaaggtggccacctccaaaacatctgccaaactcaaagttgaagctgtcaaaattaagaagactctgaagaacctcacagtgacagaaacacaggatgctgttttcactgtcgagcttacacaccctaatgtcaaaggtgtccagtggatcaaaaatggagttgtgctggaatccaatgaaaagtatgctatctctgtcaaaggaacaatttactctctgaggattaaaaactgtgccatcgtggatgagtctgtttatggcttcaggcttggaaggcttggagccagtgccagactgcacgtggagactgtcaagatcattaaaaagccaaaggatgtgacagccttggaaaatgccactgttgcctttgaagttagtgtttcccatgacactgttccagtaaaatggttccataagagtgtggaaattaagccaagtgacaaacacagactggtctcagaaaggaaagtccacaagctgatgctgcagaacatctccccctcagatgctggggaatacacagctgtggtcgggcaattggaatgcaaagcaaaactgtttgtggagacattacatattacaaaaaccatgaaaaatatcgaggtgcctgagaccaaaactgcctcttttgagtgtgaggtgtcccacttcaatgtcccttccatgtggctgaagaatggtgtggaaattgagatgagtgaaaagttcaagatagttgtgcagggaaaactccatcagctgatcatcatgaacaccagcacagaggactcggcagaatacacatttgtctgtggcaatgaccaagtcagtgccaccctgacagtcaccccaatcatgattacttccatgctgaaagacatcaacgctgaagaaaaagacactattacttttgaggtgacagtgaactatgaaggcatctcttacaaatggttaaagaatggtgtggaaatcaaatcaactgacaagtgccagatgagaaccaaaaagctcacacactcactgaacatcaggaatgttcactttggggatgctgctgactacacctttgtggctggaaaagcaacatcaacagccacactttatgtggaagctcgtcatatagaatttaggaaacacattaaggacattaaggtactggagaagaagcgagccatgtttgaatgtgaagtttctgaacctgacatcactgtacagtggatgaaagatgaccaggaactgcagatcacagacagaataaagattcagaaggagaaatatgtccaccgccttctgatcccatccacccggatgtctgatgctgggaagtacacagtggtggcaggaggcaacgtgtcaactgcaaaactctttgtagaaggcagagatgttcgcatccgaagtattaaaaaggaggttcaggtcattgagaaacagcgtgctgttgttgaatttgaggtcaatgaagacgatgttgatgcccactggtataaagatggcattgaaatcaatttccaagttcaagaacgacacaaatatgtagtggaaagaagaatccaccgaatgtttatctctgagaccagacagagcgatgcaggagaatacacctttgtggcaggaaggaacaggagttctgtcactctctatgtcaatgctcctgaaccgccccaagttctgcaggagctccagcctgtcactgtgcagtctggcaagcctgcccgcttctgtgccgtgatatccggaagaccacagcccaaaatttcctggtacaaggaagagcagctgctttccactggcttcaagtgcaaatttcttcatgatgggcaagaatacacgcttttgctaattgaagccttcccagaggatgcggcagtctatacctgtgaagccaagaatgactatggtgttgccacaacatcagcttcactctcagtggaagttccagaagttgtgtctcctgatcaggaaatgcctgtttatccacctgccatcatcaccccgcttcaggacactgtcacttctgaagggcagccagcccgttttcaatgccgggtttctggaacagatctaaaagtgtcgtggtacagcaaagacaagaaaatcaagccatctcggttctttagaatgactcaatttgaagacacttatcaactggaaattgccgaagcttatccagaagatgaaggaacttacacgtttgttgctagtaatgctgtaggccaagtatcaagcacagccaacctgagtctggaaggatttagcaaatttgaagaaaatacatcaaactcccaatggcatgtctctttatcagtttcatttaagaaggagccccttggccaaaagcccagcttcatccagcctctgtcaagcctcagggtgcacaacggggagacagtcagatttcatgcgagggtttctggcattcccaagccagaaatccaatggtttcataaccagcagctaattctaccaacaaaagatgtagttttccattttgaggagtccacaggcatggctttaatgcttatagttgatgcttactcagagcatgctgggcagtactcttgcaaagcagccaatagtgctggggaagccacttgtgcagctacactcacagtgactccaaaagctcctgaatcaattttgcatgagaggattgaacaagagattgagatggaaatgaaagagttttctagttcttttctgtctgccgaggaagaaggacttcatagcgccgaacttcaattatctaaaataaatgaaacacttgaacttttgtctgaatctccagtttacccaactaaatttgattccgaaaaggaaggcactggcccaattttcatcaaagaagtgtcaaatgctgatataagcatgggggatgtggctacactgtctgtaactgtcattggcatccccaaacctaaaattcagtggttctttaatggagtgctattaaccccttctgctgactacaaatttgtttttgacggtgatgatcatagcctgatcattctgttcaccaaattggaggatgagggagagtatacatgtatggccagtaatgactatggaaagacaatatgtagtgcctatctaaaaattaattccaaaggagagggtcacaaagacactgaaacagaatcagcagtggcaaaatctctggaaaagctgggaggtccttgtcctcctcacttccttaaggagttaaaaccaattcgctgtgctcaagggcttcctgccatctttgagtacacagtggttggagagcctgcccctactgttacatggttcaaagaaaacaagcagctttgcaccagtgtttattacactatcattcataaccctaatggctctggaactttcattgtcaatgaccctcagagggaagacagtggcctctatatctgtaaagcagagaatatgttgggtgagtccacctgtgcagcagagctgcttgtgcttctggaagacacagacatgactgataccccctgcaaagcaaagtccacaccagaggctcctgaggattttccacagacacccttaaagggtcccgcagttgaagcacttgactcagagcaggaaattgcaacgtttgtaaaagacaccattttgaaagctgctttaattacagaagaaaaccagcaactatcttatgagcatattgctaaagccaatgaattgagcagtcagcttcctttgggagctcaggaattgcaatccattttggagcaagacaagctcactcctgaaagcaccagggaatttctttgcatcaatggcagtattcactttcagcctctcaaggaaccatctcccaacctacagctgcagattgtacagtcccagaaaaccttctccaaagaaggtattctaatgcctgaagagcctgagacacaggcagttctatcagataccgagaaaatcttcccaagtgccatgtccatagaacaaattaattcattaacagttgagcctctgaaaactttattagctgaacctgaagggaattatccacagtcttcaatagaacctccaatgcattcttatctaacctctgtggctgaggaagtactttcaccaaaagaaaagacagtatctgacaccaacagagagcaaagagtgactcttcaaaagcaagaggcacaaagtgcgctcatcttgagtcagagcttagctgagggacacgtggagagtctccagagtcctgatgtcatgatctctcaggtaaactatgagcccctagtcccttcagaacactcatgcacagaaggaggtaaaattttgatagaaagtgcaaatccactggaaaatgcagggcaagattctgcggtcagaattgaggaaggcaagtccttaagatttccactagcacttgaagaaaagcaggtactgctcaaagaagagcattctgacaacgtggtgatgcccccagaccaaatcattgagtctaaaagagagcccgtggcaataaagaaagtgcaggaggtacagggaagggaccttctttctaaggaaagcttgctttctggtattccagaagagcagagattaaacctgaaaattcaaatctgccgggctttgcaagcagccgtggccagcgagcagccaggtcttttctctgagtggctaagaaatattgaaaaggtggaggtcgaggctgtaaacatcacccaagagcccagacacatcatgtgcatgtaccttgttacttcggcaaagtctgtaacagaagaagtaaccatcattattgaagatgttgatcctcaaatggctaacctgaaaatggaacttagggatgctttgtgtgctattatatatgaggaaatagacatcctaacagctgagggtcctagaattcagcaaggagccaaaacaagtttgcaagaagaaatggattctttttcaggttcacagaaggttgaacccattactgaaccagaagttgaatctaaatatctgatctcaactgaagaggtcagttattttaacgtgcaaagtagggttaaatatttggatgccacacctgtcactaaaggggttgcttcagctgttgtctctgacgaaaaacaagatgagagtctgaaaccatcagaggaaaaagaggagtcttcctctgaaagtggtactgaggaggttgctacagtaaagatacaggaagctgagggtggcttaatcaaagaggatggccccatgatacatacacctttagtggacactgtttctgaggaaggtgatattgtacacctcacaacatccataacaaatgctaaagaggtgaattggtattttgagaataaactggtgccttcagatgaaaagttcaagtgtttacaagatcaaaatacatatacgctagtcatcgacaaagtaaataccgaagaccatcaaggagagtatgtctgtgaggccttgaatgacagcggaaaaacagcaacttcagccaaactcactgtagtaaaaagagctgccccagtgatcaagaggaaaatcgaacccctggaagtagcactgggccacctagccaaattcacctgtgagatccaaagtgctcccaatgtccggttccagtggtttaaagctggccgagaaatttatgagagtgacaagtgttctattcgatcttcaaagtatatctccagccttgaaatcctgagaacccaggtggttgactgcggcgagtatacatgcaaagcttccaatgagtatggcagtgtcagctgtacagccacactaactgtgacagtgcctggaggtgaaaagaaagttcgcaaattacttccggaacgtaaacctgaaccaaaggaagaagttgttctgaaaagcgttctaagaaaaagacctgaagaagaagaacctaaagtagaacctaaaaaactagaaaaagttaaaaaacctgcagtaccagaaccaccacctccaaaacctgttgaagaggttgaagtacctactgttacaaaaagggaaaggaagattcctgaaccaacaaaagtgcctgaaatcaagccagcaatacctctccctgcacctgaaccgaaaccaaagcccgaagcagaagtgaaaacaatcaaaccacctcctgtggaacctgaaccaacccccatcgctgccccagtaacagtgccagtggttggaaagaaagcagaagccaaagcacctaaggaagaggctgccaagccaaaaggtcctatcaaaggtgtacccaaaaagactccttcaccaatagaagccgaaaggagaaagttaaggccaggaagtggtggagagaaacctcctgatgaagccccgttcacctaccagctaaaggctgtgccactgaagtttgtgaaagaaatcaaagacatcatcttgacagaatcagagttcgttggctcttcagcaatctttgaatgtttggtctccccttccactgcaattacaacctggatgaaagacggtagcaatatccgtgagagtcccaagcacaggtttattgcagatggtaaagacagaaagctgcacatcattgatgttcaactttccgatgctggtgaatacacctgtgttttacgtttgggaaacaaagaaaagacctccacggctaaacttgttgtagaagaacttcctgtgcgttttgtaaaaacactggaagaggaagtcacagtggtcaaaggacagccattgtacttgagctgcgagttaaacaaagagcgtgacgtggtctggaggaaggatggcaagattgtggtggagaaacctggccgaattgtgccaggcgtcattggcttgatgcgggctctgaccatcaacgatgcagatgacacagatgctggaacatacacagttactgtggaaaacgccaacaacctggagtgttcatcttgcgtaaaagtagtagaagtcattagagattggctggtgaaacctatacgagaccagcatgtgaaacccaaggggacagctatttttgcctgtgatatagcaaaagatactccaaacattaagtggttcaaaggatatgatgaaatccctgcggaaccaaatgataagactgaaatactgagagatggaaatcatctgtacctcaaaattaagaatgctatgccagaagatattgctgagtatgcagtggaaattgaaggaaaaagataccctgcaaagctgacacttggagagcgtgaagttgaactgcttaaaccaatagaggacgttaccatttatgagaaagaaagtgcaagctttgatgcagaaatctcagaggcagacattcctggacaatggaaactgaaaggagaacttctaaggccctcacctacttgtgaaatcaaagcagaaggtggaaaacgcttcttaactttgcacaaagtcaaactggaccaagctggtgaagtcctctaccaggcccttaatgcaattacaactgccattttgacagtaaaagaaatcgaacttgactttgctgtgcccctgaaggatgtcactgttccagaaaggcgacaggctcgattcgaatgtgtcctcacccgagaggcaaatgttatatggtccaaaggacctgatataattaagtcatctgacaaatttgatatcatcgctgatggaaagaaacatattcttgttattaatgattctcaatttgatgatgaaggggtctatactgctgaggtggagggcaagaagacctcagctcggttgtttgtcacaggtataagactgaaattcatgtcacctcttgaagatcaaacagtaaaagaaggtgaaacagcaacttttgtttgtgaactttctcatgaaaaaatgcatgtagtctggttcaaaaatgatgccaaactccatacaagcagaacagtactcatctcttctgagggcaagactcacaaattggaaatgaaagaagtgacattggatgatatatctcagataaaagctcaagtcaaggagctgagctccacagcacagctgaaggtcttagaggccgatccctacttcactgtgaaattacatgacaaaactgcagtggagaaggatgagattactttgaagtgtgaagtgagcaaagatgtaccagtgaaatggttcaaagatggtgaagagattgtcccttcacccaaatattctatcaaggcagatggcctgcgccgcatcttaaaaatcaaaaaggcggaccttaaagataaaggcgaatatgtgtgtgactgtggcacagacaagaccaaggcaaatgttactgttgaggctcgactaataaaagtggaaaagcctctgtacggagtagaggtgtttgttggtgaaacagcccactttgaaattgaactttctgaacctgatgttcacggccagtggaagctgaaaggacagcctttgacagcttcccctgactgtgaaatcattgaggatggaaagaagcatattctgatccttcataactgtcagctgggtatgacaggagaggtttccttccaggctgctaatgccaaatctgcagccaatctgaaagtgaaagaattgcctcttatcttcatcacacctctcagtgatgttaaagtcttcgagaaagatgaggctaagtttgagtgtgaagtatccagggagcccaaaacattccgttggctaaaaggaacccaggaaatcacaggtgatgacagatttgagcttataaaggatggcactaagcattcaatggtgatcaagtcagctgcttttgaagatgaagcaaaatacatgtttgaagctgaagataagcacacaagtggcaaactgatcattgaaggaatccggctcaaattcctcacccctctcaaagatgtaactgccaaagagaaggaaagtgctgtatttactgtggagttatctcatgataacatccgagttaaatggttcaagaatgaccagcgcctacacaccaccaggtcggtctcaatgcaagacgaagggaaaactcattcgatcacattcaaagacctgtctattgatgacacctcccaaattagagtagaagctatggggatgagttcagaagctaaactcactgtgcttgagggagacccatattttacaggaaaacttcaagattatactggtgtagagaaagatgaagttattctacagtgtgaaattagcaaagcagatgcaccagtgaaatggtttaaggatgggaaggaaataaagccatccaaaaatgctgttattaaggcagatggcaagaaacgcatgctaatcctaaagaaagccttgaaatcagatattggacagtacacctgtgactgtgggacagataagacctcaggaaaacttgacattgaggatcgggaaattaaactggtgcgacccctgcacagtgtggaggtgatggagactgagacagcacgctttgaaaccgaaatctctgaagatgatatccacgccaactggaaactcaagggagaggccctactccaaacacctgattgtgaaattaaggaagaaggcaaaatacactcccttgttttgcacaactgtcgcctggaccagacgggtggggtggatttccaagctgccaatgttaaatctagtgcccacctccgagttaagccacgagtaattggtcttctgaggcctttaaaggatgtcaccgtgactgcaggggaaacagccaccttcgactgcgagctctcctacgaagatatcccagtggaatggtatctcaaagggaagaaactagagcccagcgataaggtggtcccacgttcagaaggaaaagttcatacacttactctgagggatgtaaagttagaagatgctggggaagtccaactaacagcaaaagatttcaaaactcacgccaacctctttgtgaaagaacccccagttgaattcactaagcctcttgaggaccagacggtcgaagagggagccactgcagtgctggagtgtgaagtctccagagaaaatgctaaggtgaaatggttcaaaaatgggacagaaatcctcaaaagcaagaagtatgaaattgttgctgatggcagggtcagaaaacttgttatacatgactgtaccccagaggatattaaaacatacacttgtgatgctaaggattttaagacttcctgtaacctgaatgtcgtgcctcctcatgtggaattcttaagaccactcaccgaccttcaagttagagaaaaagaaatggctcgatttgagtgtgaactttcccgagaaaatgctaaggttaagtggtttaaagatggtgctgaaattaaaaagggcaaaaaatatgacatcatatccaagggagcagtgcgcattcttgtcatcaacaaatgtctactggatgatgaagctgaatattcctgtgaagtaaggacagcgagaacttctggcatgctgacagttctggaagaagaagctgtctttaccaaaaatcttgccaacattgaagttagtgaaacagacactataaaactggtttgtgaagtctccaaacctggcgcagaagtgatttggtataaaggggatgaggagatcattgaaacaggaagatatgaaatactgactgaaggacggaagagaatcctggtcattcagaacgctcaccttgaggatgctggcaactacaactgtcgactcccaagctctcgaaccgatggcaaagtcaaagtacatgaactggctgctgaatttatctcaaagcctcaaaaccttgaaatacttgaaggagaaaaggctgaatttgtctgctctatatcaaaagaaagctttccagtccagtggaagagggatgataagacacttgaatctggagataaatatgacgttattgctgatggtaaaaagagggtcctagttgtgaaagatgccacattacaagatatgggcacttacgttgtcatggtaggggccgccagagcagcagctcacttgacagtcattgaaaaactcaggatcgtagttcctcttaaggacacccgggtgaaggaacaacaggaagttgtcttcaactgtgaagtcaatactgaaggtgccaaagccaaatggttcagaaatgaagaagctatatttgatagttcaaaatacatcattctccaaaaagacctagtctacaccctcagaattagagatgcacacttagatgaccaagccaactataatgtgtctttgaccaatcacagaggtgaaaatgttaaaagtgcagccaatctaatagtagaagaggaagaccttaggattgttgagcctcttaaagatattgaaacaatggagaagaaatctgtcacattctggtgcaaggtgaatcgtctcaatgtaacactgaagtggaccaaaaatggtgaagaagtgccttttgacaaccgtgtctcatacagagttgataagtacaagcacatgttaaccattaaagactgtggcttcccagatgaaggtgaatacattgtcactgctggacaagataaatctgttgctgagcttctcatcatagaagccccgacagaatttgtggaacacttggaagatcagacagtcactgagttcgatgacgctgtcttctcctgccagctctccagagagaaagccaatgtaaaatggtacagaaatgggagagaaatcaaagaaggcaaaaaatacaaatttgaaaaagatggaagtatacacagactcattataaaagattgcaggctggatgatgagtgtgaatatgcttgcggggtagaagacaggaagtctcgtgctagactttttgtggaagaaattcctgttgagatcatcaggcctccacaagatattcttgaagcccctggtgctgatgttgtctttttagcagaactcaataaagataaggtggaagtccaatggctaagaaataacatggttgttgtccagggtgataaacaccagatgatgagtgaaggaaagatacatcgactacagatttgtgatattaagccccgtgaccagggtgaatacagatttattgccaaagacaaagaagccagagctaagcttgaactggcagctgcaccaaaaatcaagacagctgaccaagaccttgtggttgatgttggcaagcctctgacaatggtggtgccatatgatgcctaccccaaagcagaagctgaatggtttaaagaaaatgaacctttatctacaaaaaccattgatactacggctgaacaaacttctttcagaattttagaagccaagaaaggagacaaagggaggtataaaattgtgcttcagaacaaacatggaaaagcagaaggattcatcaatttaaaagttattgatgttcctgggccagtacgtaacttagaagtgacagaaacatttgatggtgaagtgagccttgcttgggaagaacctttaactgatggtggaagcaaaatcataggttacgttgttgaaagacgtgacattaagagaaagacctgggttctggccacagaccgtgcagagagttgtgagtttactgtcactggtctacagaaaggaggagttgagtacctattccgtgtgagtgcaagaaacagagttggcactggtgagccagtagaaactgacaatcctgtagaagcaaggagtaaatatgatgttccaggccctcctttgaatgtaaccatcactgatgtgaatcgatttggtgtctcactgacatgggaaccaccagagtatgatggaggtgctgagatcacaaactacgtcattgaattaagagacaagacttctatcaggtgggatactgccatgactgtgagagctgaagacctgtctgcaactgttactgatgtggtagaaggacaggagtacagtttccgagtgagagcccaaaatcgaattggagttggaaaaccaagtgcagccacacccttcgtcaaagttgctgatccaattgagagaccaagtcctcctgtaaacctaacttcctcagatcagactcagtcatcagttcagctcaaatgggaacctcctctgaaagatggaggaagcccaatattaggctatataattgagcgatgcgaagaaggaaaagataattggattcgttgcaatatgaaacttgtccctgaactgacttacaaggttaccggattggaaaaaggaaataaatatttatatagagtatctgcagaaaataaagctggtgtttcagatccatctgaaattcttggtcctctcaccgctgacgatgcatttgttgaaccaacaatggatttaagtgcatttaaagatggtctggaagttattgtcccaaatcctatcacgatcctggttccaagtacaggctatccaaggccaactgcaacctggtgttttggagataaagtactagaaacaggggaccgggtgaaaatgaagaccttgtctgcctatgccgaacttgtcatttctccaagtgaacgttcagacaagggcatttatacactgaaattagaaaaccgtgtgaaaacaatttctggggaaattgatgtcaatgtaattgctcgcccaagtgcacccaaagaattgaaatttggtgatataaccaaggactcagtacatttgacttgggaaccacctgatgatgatggaggaagtccgttaactggatacgttgttgaaaaacgagaagtcagccggaaaacatggactaaagttatggactttgtgactgatctagaattcacagttcctgatcttgttcaaggaaaagagtacttatttaaagtttgtgctcgtaacaaatgtggccctggagaacctgcatatgttgatgaacctgtaaatatgtcaactcctgcaacggtacctgacccaccagagaatgttaaatggagagatcgaacagccaatagcatcttcttaacatgggatccacctaaaaatgatggtggttcacgcatcaaaggatatatagttgaaagatgtccacgtggttctgataaatgggttgcctgtggagaacctgttgcagaaacaaaaatggaagtgacaggtcttgaggaaggcaaatggtatgcctaccgcgtgaaggccttaaacaggcagggtgctagcaaaccaagcagacccacagaggaaatccaggctgtggacacacaagaggccccagaaatcttcctcgatgtgaagctccttgctggtctcactgtaaaagctgggaccaagattgaacttcctgccaccgtaaccggaaaacctgaacctaaaataacttggacaaaggctgatatgattctgaagcaggacaaaagaattaccattgaaaatgtccctaagaaatccacagtgactattgttgatagtaagagaagtgacactggcacatatatcattgaggctgtgaatgtgtgtggccgggccactgctgtggtggaagtgaacgtcttagataaacccggaccaccagctgcctttgacatcacagatgtaaccaatgagtcatgtcttctaacatggaacccaccacgcgatgatggtggatctaagatcacaaactatgttgtggagagacgagcaactgatagtgaagtgtggcacaagctctcatccaccgtcaaggatacaaacttcaaggccaccaaattaatccccaataaagagtacatcttcagagttgctgcagaaaacatgtatggtgttggtgaaccagttcaggcctctccaataacagccaaatatcagtttgatccacctggtcctccaactcgcctagaaccttctgatatcactaaagacgcagtgactctcacatggtgtgagccagatgatgatggtggcagcccaatcacaggatactgggttgaaagactggatcctgatacagataaatgggttagatgcaataagatgccagtaaaggacacaacatacagagtgaaaggtctcactaataagaaaaaatacagattccgtgtgttggctgaaaatcttgctggacctggaaaaccaagcaaatcaactgaaccaatcttaataaaggatcccatagatcctccatggccccctggaaaaccaactgtaaaagatgtaggcaaaacatcagtaaggttgaattggacaaaaccagaacatgatggaggtgcaaagattgagtcttatgtcattgaaatgctgaagactggaacagatgagtgggtcagagtggcggaaggggttcccaccactcagcacttgctcccagggctcatggaaggacaggaatactcattccgagttagagctgtgaataaggctggggaaagtgaacccagtgaacccagtgaccctgtgctttgccgggagaagctatatcctccatcaccaccacgctggcttgaagttattaatatcacaaaaaatacagcagacctaaaatggacagttcctgagaaagatggagggtcccccatcaccaactacattgtggaaaagagagacgtcaggcgaaaaggctggcaaacagtggataccactgtcaaggacaccaagtgcacagtcaccccactgactgagggctctttatatgtgttccgagttgctgcagaaaatgctataggacaaagcgactacaccgaaattgaggactctgtgctggccaaagacacctttaccactcctggaccaccctacgccctggcagtggttgatgtgacaaaacgacatgttgacctaaagtgggagccacctaaaaatgatggtggaagaccaatacagagatatgtcattgagaagaaagaaaggttaggtacccgttgggtgaaagctggaaagactgcaggacctgactgtaacttcagagtaactgatgtcatcgaaggaacagaggtccagtttcaggttcgggctgaaaatgaagctggagttggccacccaagtgaacccacagaaatcctatccattgaagatccaacaagtcctccctcaccaccccttgacctacatgtgactgatgctgggagaaaacacattgccattgcttggaagcctccagagaaaaatggtggaagtcctatcataggataccatgttgaaatgtgtccagtaggcactgagaaatggatgagagttaattctcgcccaataaaggacttgaaattcaaggttgaagaaggtgttgttcctgacaaagaatatgtcctgagagtgagagcagtcaatgctattggtgtcagcgagccatctgaaatctctgaaaatgtggttgccaaagacccagactgcaagccaacaattgacctggagactcatgacattattgttattgaaggtgaaaagttaagcattcctgttcccttcagagctgtcccagttccaactgttagttggcataaagatggcaaagaagttaaagcaagtgatagattaacaatgaagaatgatcacatctctgcacaccttgaagttcccaagagtgtccgtgcagatgccggaatttataccattacactggagaataagctcggctcagcaacagcctcaatcaatgtcaaagtcataggcctacctggaccatgcaaagatattaaagcaagtgacattaccaagagttcttgtaagttaacttgggaacctccagaatttgatggtggaaccccaattcttcattatgtcctggagcgcagagaagctgggaggagaacatatataccagtcatgtctggtgagaacaaactgtcatggactgtgaaggatctcataccaaatggtgaatacttcttccgtgttaaagcagtcaacaaggttggtggaggagaatatattgaactgaaaaatccagtcattgctcaagatccaaagcaaccccctgatccacctgtagatgtagaggttcataatcctacagcggaggcaatgactattacatggaagccacctttgtatgatggagggagcaagataatgggctacatcatagagaagattgctaagggtgaagaaaggtggaagagatgcaatgaacacctggtaccaatcctgacctatacagcaaaaggacttgaagaggggaaagagtaccaattccgtgtgcgagcagagaacgccgcgggtattagtgaaccttctcgggctactcctccaaccaaagctgtagatcccattgatgcccccaaagtcattctgagaacaagcctagaagtgaaacgaggtgatgaaatagcacttgatgcaagtatttctggatcaccttacccaactattacatggataaaggatgaaaatgttattgtaccagaggaaattaagaagcgtgcagcacccttggttaggagaaggaagggtgaagttcaagaagaagaaccatttgtcctgcctctgacacagcgtttgagtattgacaacagcaaaaagggagaatctcagctacgcgtccgagattctctccgacctgaccatggtctgtatatgatcaaagttgaaaatgaccacggtattgcaaaagctccttgtactgtcagtgtgttagatacaccgggaccaccaatcaactttgtatttgaagatatcagaaagacctcagtcctttgtaaatgggaaccaccccttgatgatggtggcagtgaaatcataaactacactttggaaaagaaagacaagacaaaacccgactcagaatggattgttgtcacttcaacacttagacattgcaaatattcagtaacaaaactgattgaaggaaaagagtacctcttccgtgtaagagctgaaaacagatttgggccaggtccaccatgtgtttcaaagccacttgtggctaaagatccatttggaccacctgatgcaccagataagcccattgtggaagatgttaccagcaacagtatgctagtgaaatggaatgaaccaaaagataatggaagccccattttgggttactggcttgaaaaacgtgaagttaacagtacacattggtctcgtgtcaacaaaagccttctgaatgccttgaaagccaatgtagatggcttattagaaggactcacctatgtcttcagagtatgtgctgaaaatgcagctggacctggaaagttcagtccaccttcagatcccaaaacagcacatgatccaatctctcctcctgggccacctatcccaagagtcactgacacaagctctacaactattgaactagaatgggaacccccagctttcaatggtggtggggaaattgttggctattttgttgataagcagttggttggcacaaatgaatggtcacgctgcacagagaagatgatcaaggtccgtcagtacaccgtcaaagaaatccgagagggtgctgattacaaacttcgggtgagtgctgtcaatgccgcaggggaaggaccgcctggagaaacacaacctgttactgtggctgaaccacaagagcctccagctgtggaactggatgtttctgtcaagggtggaatacaaataatggctgggaagactcttagaattccagctgtggtgactggtcgccctgtacctacaaaagtatggaccaaagaagaaggggagctggataaagaccgtgttgtaatagacaacgttggaaccaaatctgaactaattatcaaggatgcactgcgaaaagaccatggcagatatgtgattacagctacaaatagctgtggttccaaatttgcagcagccagggtagaagtttttgatgtccctggtccagttcttgacttaaaacctgttgtaacaaacagaaaaatgtgtctacttaactggtctgatccagaagatgatggaggaagtgaaataacaggctttatcattgaaagaaaagatgccaagatgcatacttggagacaaccaatagagactgagagatctaaatgtgacatcacaggtctgcttgagggacaagaatataagttccgtgttattgccaagaacaagtttggctgtggccctcctgttgaaataggaccaattcttgcagttgatccactaggtcctccaacatctccagagaggctcacatacactgaaaggacaaagtccactatcacacttgactggaaagagccccgcagtaatggtggcagtcccatccaaggatatatcattgaaaaacggcgtcatgacaaacctgactttgaaagagttaacaagcgactctgcccaaccacatcttttctggttgaaaatcttgatgaacaccaaatgtatgagttccgtgtcaaagctgtcaatgaaattggtgaaagtgaaccatccctacctcttaatgtagtcatacaagatgatgaagtgcctccaactattaagttgcgtctgagtgttcgaggagacactatcaaagttaaggcaggagagcctgtccacatccctgcagatgtgacaggccttccaatgcctaagattgaatggtccaaaaatgaaactgtaattgaaaaacccactgatgcacttcagataaccaaggaagaggtatcccgaagtgaggcaaaaactgagcttagcattcccaaagcggtccgggaggacaaaggcacttacacagttactgcttccaatcgccttggctcagtgttccgaaatgttcacgttgaagtatatgaccgcccatccccaccaagaaatcttgctgttactgacattaaagctgaatcttgctacttgacatgggatgcccctcttgataatggtggcagtgaaatcacccattatgttattgacaaacgtgatgcaagtaggaagaaagcagaatgggaggaagtcaccaacactgctgtagagaaaagatatgggatctggaaacttatccccaatggtcagtatgagttccgagtcagggcagtgaataaatatggaatcagtgatgagtgcaaatcagataaagtagtcattcaagatccttatcgccttcctggacctccaggaaaaccaaaagttttggcacgcaccaaaggatcaatgctagtgagctggactcctcctttggacaatggtggctctccaattactggctactggctggagaaaagagaagagggaagtccttattggtcacgtgttagccgagcaccaataaccaaagtgggattgaaaggcgtggaatttaatgttcctcgtttgcttgaaggcgttaaataccagttcagagccatggcaataaatgctgcaggaattggtcctcccagtgaaccatcagatccagaggttgcaggagatcccatatttccaccggggccaccttcttgcccagaagttaaagataaaacgaagtcaagcatctcactaggatggaaacctccagccaaagatggtggcagcccaatcaaaggatacattgtagaaatgcaagaagaaggtactactgactggaaaagagtaaatgaaccagacaaacttataactacctgtgaatgtgtggtgcctaatctgaaagagctcaggaagtacagattcagagtgaaagctgtcaatgaagctggtgaatctgaaccaagtgatacaactggggagatccctgccactgatattcaagaggaaccagaagttttcattgacattggagcacaggactgtctggtttgtaaagctggctcacagattaggattcctgctgtcatcaagggacgcccaacaccaaaatcatcttgggaatttgatggaaaggcaaagaaagcaatgaaggatggagttcatgacatacccgaagatgcacagctggagactgctgaaaactcctcagtaattattattccggagtgtaaacgatctcatacaggcaaatacagcatcacagccaagaataaagcaggacaaaagactgcaaattgcagagttaaagtcatggatgtaccaggcccacccaaagatctgaaagtcagtgatatcacaaggggtagttgcagactttcatggaagatgccagacgacgatggaggagacaggatcaaaggctatgttattgagaagaggactattgatggaaaagcctggaccaaagtcaatccagactgtggaagcaccacatttgtagtgcctgatctcctctctgaacagcaatatttcttccgtgtgcgagcagaaaaccgttttggtattggcccacctgtggaaaccattcagaggaccactgccagagatccgatatatcctcctgatcctcctattaaactcaagattggcctcatcacaaagaacacagtgcatctgtcatggaaacccccgaagaatgatgggggctcccctgttacccactatattgttgagtgccttgcatgggaccctactgggacaaagaaagaagcctggaggcagtgcaataagcgtgatgtggaagaactgcaatttactgttgaagacctagtagagggtggggaatatgaattccgagtcaaagctgtcaatgctgcaggagtcagcaagccttcagccactgttggccctgtgactgtcaaagaccagacatgcccaccatcaattgatctaaaagaattcatggaggttgaagaaggaaccaatgttaacattgtggccaaaattaaaggtgtgccattcccgacactaacctggtttaaagctcctccaaagaagcctgataacaaagaacctgttctctatgacacccatgtcaacaaactggtggtagatgatacttgcactttagttattccgcagtctcgcaggagtgacactggcttatataccatcacagctgtaaataatctgggaacagcatcaaaggagatgagactgaatgtcctgggtcgtcctggccctccagtgggacccataaaatttgaatctgtttcagcagatcaaatgacactatcttggtttccacctaaagatgatggtgggtctaagattacaaactatgtaattgagaaaagagaagctaacaggaagacatgggtccatgtctccagtgaacctaaggagtgcacgtacacgattcccaaattgctagaaggccatgaatatgtattccgaatcatggcccagaataaatatggcattggagaacctcttgacagtgaacctgaaacagcaagaaacctcttctctgtccctggagcaccagataaaccaacagttagcagcgtgactcgtaactccatgactgtcaactgggaagagccagaatatgatggaggctctcctgtgacagggtactggctggaaatgaaagacaccacttcaaagagatggaagagagttaaccgagatcctatcaaagccatgactttgggtgtttcttataaagtgactggtcttattgaaggttccgactatcaattccgggtatatgcaatcaatgctgctggcgtgggtccagcaagtctgccatcagacccagcgactgctagagatccaattgcccctcctggtcctccatttcccaaagtgacagattggactaaatcatctgcagatctggagtggtctcccccactaaaagatggtggatccaaagtaactggatacatcgttgaatataaagaagaaggaaaagaagaatgggaaaagggtaaagataaagaagtgagaggaacaaagcttgttgtgacaggattaaaggaaggagcattctacaaatttagagttagagcagtcaacattgctggcattggagaacctggagaggtcacagatgtcattgaaatgaaggacagacttgtttcacctgaccttcagctagatgccagtgtcagagatagaattgttgtccatgctggaggggtgatccgaatcattgcctatgtgtctggaaagcctcctccaaccgtcacctggaacatgaatgaaagaaccttacctcaagaagccaccattgagaccacagccattagctcatccatggtcatcaagaactgccagaggagccatcaaggcgtctattctcttcttgccaaaaatgaagccggagaaagaaagaagacaattattgttgatgtattagatgttccaggtcccgttggaacaccattcctagctcacaacctaaccaatgagtcctgcaaactgacatggttttctccagaagatgatggaggctctccaatcaccaattatgtcattgaaaagcgtgaatctgaccgcagagcatggaccccagtgacatatacagttacccgacaaaatgctactgtccagggtctcattcaaggaaaagcctactttttccgaattgcggctgaaaatagtattggcatgggtccatttgttgagacatcagaggcacttgttatcagagagccaataactgtaccagagcgtcctgaagacctggaagtcaaagaagttactaaaaatactgtaactttgacttggaatcctcctaagtatgatggtgggtcagaaattattaactatgtcctagaaagtcggctcattgggactgagaagttccacaaagttacaaatgacaacttgcttagcagaaaatacactgttaaaggcttaaaagaaggtgatacctatgagtaccgtgtcagtgctgtcaacattgttggacaaggcaaaccatcattttgcaccaaaccaattacttgcaaggatgagctggcacccccaacgcttcacctcgacttcagagataagctcacgattcgagttggtgaagcttttgccctcactggccgttactcaggcaaaccaaagcctaaggtttcctggttcaaagatgaagctgatgtgctggaagatgatcgcactcatataaagactacaccagcaacacttgctttagagaagatcaaggccaaacgttcagattccggcaaatactgtgtggttgtggagaacagtacaggctctaggaaaggtttctgtcaagttaatgttgttgaccgtcctggaccaccagtaggaccagttagttttgatgaggtgaccaaagattacatggttatctcttggaagcctcctttagatgatggaggcagtaaaatcaccaattatattattgagaagaaggaagtgggtaaagacgtctggatgccagtgacatctgcaagtgctaaaacaacatgcaaagtttctaaactacttgaaggaaaagattatattttccggatacatgctgaaaatctgtatggaataagtgatcctctggtgtctgattcaatgaaagccaaagatcgtttcagggttcctgatgcacctgatcagccaattgttacagaagttaccaaagactctgcattagtaacctggaataagccacatgatggaggaaaacccatcacaaactacatcctggaaaagagagaaactatgtctaaacgatgggctagagttaccaaagatcctattcatccatacactaaatttagggttcctgatcttctagaaggatgtcagtatgaattccgggtttctgcagaaaatgaaattggtattggagatccaagcccaccatccaaaccagtctttgctaaagatccaattgctaaaccaagtccacctgttaatcctgaagcaatagatacaacatgcaattcagtcgatctaacttggcagccaccacgtcatgatggtgggagcaagattctgggttatattgttgagtaccagaaagttggagatgaagagtggagaagagccaatcacacccctgagtcatgtcctgaaactaaatataaagtcaccggtcttcgggacggtcaaacctataagtttagagtgttagcagtcaatgcagctggtgaatcagatccagctcatgttccggagccagtcctagtaaaagacaggcttgaaccccctgattgattcttgatgccaacatggcaagagaacaacacattaaagttggtgatactctaagacttagtgccatcatcaaaggagtgccattcccaaaagtaacttggaaaaaagaagacagagatgctccaactaaagcaagaattgatgtgactccagttggtagcaagcttgaaattcgtaatgctgcccatgaagatggtggaatttattctttaacagtggagaatccagctggttcaaaaactgtctcagtaaaagtacttgtattagataaacctgggccacctagagatctggaagtcagtgaaattaggaaagattcatgttaccttacttggaaagaaccactggatgatggtggttctgttattaccaattatgtggttgagaggagagatgttgccagcgcccagtggtcacctctctcagctacatcaaagaaaaagagtcacttcgctaagcatctgaatgaaggcaaccagtacctcttccgagtagctgcggagaaccagtatggacgtggtccttttgttgaaacaccaaaaccaatcaaggctttggatcctctccatcccccagggccacccaaggacctgcaccatgtagatgttgacaagactgaagtctccctagtctggaataagccggatcgtgatggtggttctccaatcactggatatttggtagaatatcaagaagaaggcacccaggactggattaaatttaagactgtgacaaacttagagtgtgtggttactggactacaacaaggaaagacctatagattccgtgtaaaagctgaaaacattgtgggtcttggtctccctgacacaactatcccgatagaatgtcaagaaaaactagtgcctccatccgtggagctagatgtgaaattaattgaaggtcttgtggtaaaggctggaaccacagtcagattccctgctattataagaggtgtgcctgttcctactgcaaagtggacaaccgatgggagtgagattaaaaccgatgagcactacacagttgaaacagacaacttctcatcagtacttaccattaagaactgcttaaggagagacactggggaatatcaaatcacagtttccaatgcagccggtagcaaaacagtagccgtacatcttactgttcttgatgttcctgggccaccaacaggtcctattaatattctggatgttactcctgaacacatgactatctcatggcagccacctaaggatgatggaggaagccctgtgataaattatattgttgagaaacaagatacaaggaaagacacgtggggtgttgtctcttccggaagcagtaagacaaagctgaaaatcccacatctgcagaagggctgtgaatatgttttccgagttagagcagagaataagataggtgttggtcctccccttgactccacacctactgttgctaagcataaatttagtcctccgtctcctcctggtaaaccagtggttactgacattactgaaaatgcagcaacagtgtcttggaccctgccaaaatctgatggtggcagtccaataactggctactatatggaacgtcgagaagtaactggcaaatgggtgagggtcaacaaaacacctatcgctgacctgaagttcagagtgactggactctatgaaggaaatacatatgagtttagagtttttgctgaaaatcttgcaggactaagcaaaccatccccaagttctgatccaataaaagcttgccggcccatcaaaccacctggaccacctattaatcctaaactgaaagacaagagcagagaaacagctgatttggtgtggacaaagcctctcagtgatggtggtagccccattctaggatatgtagtggaatgtcagaaacctggcacagcacaatggaacaggattaataaagatgaactcattaggcaatgtgcctttagggtacctggactaattgaaggaaatgagtacagattccgtataaaggcagctaatattgtaggagagggtgagccaagagaactagcagaatctgtgattgcaaaagatatccttcatcctccagaagtagaacttgatgttacttgtcgtgatgttattaccgtgagagtaggccaaactatccgcattctagctcgagtcaaaggcagacctgaaccagacataacttggactaaggaaggcaaagtattggtccgagaaaagagggtggaccttattcaggatctacctcgtgttgagttacaaattaaagaagctgttagagctgatcatggcaagtatatcatctcagctaagaacagcagtggacatgcccaaggttcagccatcgttaacgtccttgacagacctgggccttgccagaatttgaaggttaccaatgtaaccaaagagaactgtacaatttcttgggaaaacccactagataatggtggctcagaaataacaaacttcatagtagaatatcgcaaaccaaaccagaaaggctggtcaattgttgcatcagatgtcactaaacgattaatcaaggccaaccttttagccaacaatgaatactatttccgagtttgtgcagagaataaagtaggtgttgggccaaccatcgaaacaaaaactcccattctggctattaaccctattgacagaccaggtgagcctgaaaaccttcacattgcagataaaggaaagacatttgtctatctaaagtggcggaggcctgactatgatggtggcagtccaaatctgtcatatcatgttgagagaaggcttaagggctccgatgactgggaaagagtgcataaaggaagcattaaagaaactcactacatggttgacagatgtgttgaaaaccagatttatgagttcagagtgcaaacaaagaatgaaggtggggaaagtgactgggtgaagacagaggaagttgttgtgaaagaagacttacaaaaaccagtacttgatctgaaattaagtggggtcctaactgtcaaagcaggggacaccattaggcttgaggcaggggttagaggcaaaccattcccagaagttgcatggaccaaggacaaagacgctacagacttaacaagatcaccaagggtcaagattgatacccgtgctgattcatctaaattttctcttactaaagcaaagcgaagtgatgggggtaaatatgtagttacggcaactaacacggctggcagttttgtggcctatgccactgtcaatgttttagataagcctggtcctgtgagaaatctgaaaattgttgatgtgtccagtgataggtgtactgtttgctgggatccaccagaagatgatggtggctgtgaaatccaaaattatattctagaaaaatgtgagacaaagcgaatggtttggtctacctattctgctactgtcttgacacctggtactacagtaacacgtctcatagaaggaaatgaatatattttcagagtccgtgcagaaaataaaataggcacagggcctccaacagaaagtaaaccagtcatagccaaaaccaagtatgataaacctggtcgccctgatcccccagaagtcactaaagtaagcaaagaagagatgactgtggtttggaatccacctgaatatgatggtggaaagtctataactggatactttttggagaaaaaggaaaagcattcaacacgatgggtccctgtcaacaagagtgcaatccctgagagacgtatgaaagtacagaatctcctcccagaccatgaatatcagttccgtgtcaaggcagaaaatgaaattggaattggagaaccaagcttgccttcaagaccggtggtggcaaaagaccccatagagccacctggtccaccaaccaatttcagagtggttgatacaaccaaacattccataactcttgggtggggaaaaccagtctatgatggtggtgcaccgatcattggatatgttgtggaaatgagaccaaaaatagcagatgcgtctcctgatgaaggctggaaacggtgtaatgctgcagcacagcttgtacgcaaggaattcactgttaccagcttggatgaaaaccaggaatatgagttcagggtgtgtgcccaaaaccaagttggtattgggcgccctgcagagctaaaggaagctatcaaacctaaagaaatactagaacctccggagattgatttggatgccagcatgaggaaactggtcatagtgagagcaggatgccctattcgtctctttgctatagtgagaggacgaccagcccctaaagtcacttggcgaaaagttggcattgataatgtggtcagaaaaggacaagttgatctggttgacactatggccttccttgtcatccccaattctacccgtgatgactcaggaaaatattccttaacacttgtgaacccagcaggagaaaaggctgtattcgtaaatgtcagagtattagacactcctgggcctgtgtctgatttaaaagtttcagatgtcactaaaacatcatgccatgtgtcctgggcccctcctgaaaacgacggtgggagccaagtgacacattatatcgtggagaaacgtgaggcagacagaaagacatggtcgaccgttaccccagaagttaagaaaacaagcttccatgtaaccaatcttgtccctgggaatgagtattacttcagagtaactgctgtcaacgaatatggccctggcgtcccaacagatgtcccaaaaccagtgcttgcatcagatcctctaagtgagccggatcccccaaggaaattagaagtgactgaaatgaccaagaacagtgccaccttagcctggttacctcccctacgtgatggaggtgctaaaatcgatggctacatcactagttacagagaagaagagcagcctgcagatcgctggacagagtactcagtggtaaaagatctgagccttgttgtcactggcctaaaggaaggaaagaaatacaaatttagagtagcggccagaaatgctgttggagtcagtttgccaagagaagctgaaggagtgtatgaagccaaagaacaactgttgccaccaaagatccttatgccagagcaaataactatcaaagctgggaaaaaactccgaattgaagcccatgtgtatggaaagcctcatcccacctgtaaatggaaaaaaggagaagatgaagttgtcacatccagccacctggcagtgcataaagcagacagctcttcaattctgatcataaaagatgtgactaggaaagacagtggttactacagcctcacagcagagaacagttctgggacagacactcagaaaatcaaagttgtagtcatggatgcccccggcccccctcagcctccatttgacatttctgatatagacgctgatgcttgctccctgtcatggcacatccctctggaggacggaggcagtaacatcaccaattatatagtggagaagtgtgatgtaagccgaggtgactgggtcacggctctagcttcagtcacaaaaacttcctgcagggttggaaagctgatcccaggccaggagtacatcttccgggtccgtgctgaaaaccgatttggcatttcagagcctctcacatctccaaagatggttgcgcagttcccatttggtgttcctagtgaaccaaagaatgcacgagtcaccaaagtcaacaaggactgtatttttgttgcttgggacagaccagatagtgatggagggagccccattattggttatctgattgaacgcaaggaaagaaacagtttgctgtgggtgaaagccaatgatactcttgtccggtcaactgaatatccttgtgctggccttgtagaaggtcttgagtattcattcagaatctatgccctaaacaaagctggatccagcccacccagcaaacccacagaatatgtaactgcaagaatgccagttgatcctcctgggaaacctgaggttattgatgtcaccaagagtactgtatctctgatctgggctcgtccaaagcatgatggaggcagtaaaattattggctatttcgtagaagcttgcaaacttcctggtgataaatgggtacggtgcaatactgcacctcaccagattccccaggaagagtacacagctactggcctagaagagaaagctcagtatcaatttagagctattgccaggaccgcggtaaacattagcccaccttctgaaccttctgatccagtgactatcctcgcagaaaatgtccctcccaggatagacctgagtgtggctatgaaatctttgcttactgtgaaagctggaactaatgtctgcttggatgctactgtttttggtaaaccgatgccaacagtttcttggaaaaaagatggcacactgctaaaaccagcagaaggcataaagatggccatgcagcggaatctgtgcaccttggagctattcagcgtgaaccggaaggactcaggagactataccattactgctgaaaattcaagtggttctaaatcagccaccattaagcttaaagtgttagataaaccgggtcctccagcatctgttaaaatcaacaaaatgtattcagatcgtgctatgctttcttgggaaccgcctcttgaagatggaggctcagaaatcaccaactatattgttgacaaacgtgaaacaagcaggcccaactgggctcaagtctctgcaactgtgcctatcaccagctgcagcgtggagaaacttatagagggccatgagtatcagttccgtatttgtgctgaaaataaatatggagtaggcgatccagtcttcactgaaccagcaattgccaaaaacccatatgacccaccaggacgctgtgatcctcctgttattagcaacataaccaaagatcacatgacagtcagctggaagccaccagcagatgatgggggctcacccatcactggctatttgcttgaaaagcgggaaacccaggctgttaactggactaaggtcaacagaaaacctattatagaaagaacattaaaagcaacaggtcttcaagaaggtaccgaatatgagttccgtgttacagctataaataaagctggaccaggcaaacccagtgacgcatccaaggccgcttatgctcgggaccctcagtatcctcctggcccaccggctttccctaaagtatatgatacaactcgcagctctgtgagtctatcttggggcaagccagcctatgacggcggcagccctatcattggttatctcgttgaagtaaaacgggctgactccgataactgggtgaggtgcaacttaccacagaatctacagaaaacccgctttgaggttactggcctgatggaagacacacaatatcaattccgtgtgtatgccgttaataagattggatacagtgaccccagtgatgtgccagataaacactatcccaaggacatcttaattccacctgagggagaacttgatgcggacttaaggaagacactcatattacgtgctggagttactatgagactatatgtaccagtaaaaggacgcccacctccaaagattacttggtctaaaccaaatgtcaatctaagagacaggattggactggacataaagtcaactgactttgacactttcttgcgctgtgaaaatgtgaacaaatatgatgcaggaaaatatatcttaaccctggagaacagctgtggtaaaaaggaatataccattgttgtgaaagtgcttgatactcctgggccacctgtcaatgtgactgttaaggaaatatccaaagactctgcttatgttacctgggagcctcccattattgatggcggaagccccatcataaactatgtggtacaaaaacgtgatgcagagaggaaatcctggtctacagtgacaactgagtgctccaaaacaagcttcagagtagctaatttggaggagggaaaatcctacttcttccgagtgtttgctgaaaatgagtatggcattggtgatcccggtgaaactcgtgatgctgtcaaagcttcccaaactcctggaccagttgtggacctgaaagtgaggtctgtatctaagtcatcctgtagcattggctggaaaaagcctcacagtgatggtggaagtcggattattggatatgtagttgatttcctgactgaagaaaataagtggcaacgagttatgaaatccttaagcctacagtactctgcaaaagatttgactgaagggaaggaatataccttcagagtgagtgctgagaatgaaaatggagaaggaaccccaagcgaaatcactgttgtggcaagggatgatgttgtggctcctgatcttgacttaaagggtctacctgatttgtgctacttggctaaagaaaacagcaacttccggcttaagatccccataaaaggcaagccagctccatcagtctcctggaagaaaggggaagatcctctagcaactgacactagagtcagtgttgagtcatctgcggttaacacaactcttatagtgtacgattgccaaaaatctgatgctggaaaatacacaatcacacttaagaatgttgctggcaccaaggaaggaactatctccataaaggttgttggcaagcctggcatccccactggaccaatcaaatttgatgaagtcacagcagaagccatgaccttaaagtgggctcctccaaaggatgatggaggttctgaaatcaccaactatatcctagagaagagggattctgtgaacaacaagtgggtgacgtgcgcctcagctgtccagaaaaccacctttagagtaaccagacttcatgagggcatggaatataccttcagggtcagtgccgaaaataaatatggtgtaggggaaggcctgaaatcggagccaattgttgcgagacatccatttgatgtgcctgatgctcccccacctcccaatattgtggatgtcagacacgattcagtatctctaacttggactgaccccaagaaaactggtggttctccaattacagggtatcatctcgagttcaaggaaagaaacagccttttgtggaagagagctaacaagactccgataaggatgagagactttaaagtgacaggattaactgaaggtcttgaatatgaattccgagttatggcaatcaatttagcaggtgtgggcaagccaagcctaccatcagagcctgttgtggcactggacccaattgatcctcctggaaaacctgaggttattaacataacaaggaattcagtgactctcatttggactgaacctaaatatgacggtggtcataagttaactggatatatagtggagaagcgagatctaccttcgaagtcttggatgaaagccaaccatgttaatgtcccagaatgtgcctttactgtaactgaccttgttgagggtggaaaatatgaattcagaattagagcaaagaatacagcaggtgctatcagtgctccatcagaaagtacagaaaccattatttgcaaggatgaatacgaggcaccaacaattgtccttgatcccacaataaaagatgggctaacaattaaagcaggggataccattgttttgaatgccattagcattcttggcaaaccccttccaaaatcaagttggtccaaggcaggaaaagacattagaccatcagatatcactcagataacttcaaccccaacatcttccatgcttactatcaagtatgccactagaaaagatgcgggtgaatataccatcactgctaccaatccttttggcacgaaggtggaacatgtgaaggtaacagtccttgatgtacctggtcccccaggtcctgttgaaatcagtaatgtttctgctgaaaaagcaacacttacatggacacctcccttggaagatggcggctcaccaattaagtcctatatacttgaaaagagagaaaccagccgacttttgtggacagtggtttctgaagatattcagtcttgcaggcatgtggcaaccaaacttatccaaggaaatgagtacatcttccgggtctcagctgtaaaccactatggcaaaggagaacctgtacagtctgaacctgtcaaaatggtagacagatttggtccccctggccctcctgaaaaaccagaggtatcaaatgtcactaagaacactgccactgtcagctggaaaaggccagtggatgatggtggcagcgaaattacaggatatcatgtagaaaggagagaaaagaaaagcctgcgatgggtgagagcaataaaaacaccagtttccgatctcaggtgcaaagtaacaggactgcaagaaggaagcacctacgaattccgtgtcagtgcagaaaacagagcaggaattggtccacccagtgaggcttcagattctgttctgatgaaagatgcagcatatcctccaggaccaccttcaaatccgcatgtcactgatactaccaagaaatctgcttctttggcatggggcaagcctcattatgatggtggacttgaaatcactggctatgtcgtggagcatcaaaaagtaggagacgaggcctggataaaagataccacaggaaccgccctcagaatcactcagttcgttgttcctgatcttcagactaaagaaaaatacaacttcagaatcagtgccatcaacgatgcaggtgttggggagccagcggtgattccagatgttgaaatcgtagaacgggagatggctcctgattttgaactagatgccgagcttcgaagaacacttgttgttagagcaggactcagtattaggatatttgtgccaattaaaggtcgtcctgctcctgaagtgacatggaccaaagataacatcaacctgaaaaaccgagccaacattgaaaatacggaatcatttactcttctgattatcccagaatgtaacagatatgataccggtaaatttgtcatgaccattgaaaacccggctgggaagaaaagtggctttgtgaacgtcagagtcttggacacgccaggcccagtcctcaacctgcggcctacagacatcacaaaggacagtgtcaccctgcactgggacctccctctgatagatggaggctcacgtataacaaactacattgtagagaaacgtgaagcaacacggaaatcttattccacagccaccactaagtgccataaatgcacatataaagttaccggcttgtctgaagggtgtgaatatttcttcagagtgatggcagagaatgaatatggaattggtgagccaacagaaactacagagcccgtaaaagcctctgaagcaccatctccaccagacagccttaacatcatggacataactaagagcaccgtcagcctggcatggcctaagcccaaacacgatggtggcagcaagatcactggctatgtgattgaagcccaaagaaaaggctctgaccagtggacccacatcacaaccgtgaaagggttagaatgtgttgtgaggaatctaactgaaggagaggaatataccttccaagtgatggcagtgaacagcgcggggagaagtgcccctagagaaagcagacccgtcattgtcaaggagcagacaatgcttccagagctggatctccgtggcatctatcagaaactggtcattgccaaagctggtgacaacatcaaagttgaaattccagtgctcggtcgaccgaagcccacagtgacatggaaaaaaggagaccaaattcttaaacagacacagagagttaattttgaaaccacagcgacttcaaccattttaaatatcaatgagtgtgtcagaagtgatagtgggccctatccattaacagcaaggaacattgtaggagaggttggtgatgtcatcaccattcaagtccatgatatcccagggccacctactggaccaatcaaatttgatgaagtttcatctgattttgtaaccttctcttgggacccacctgagaacgatggtggtgtaccaataagcaactatgtagtggaaatgcggcagactgacagtactacctgggttgagttagcaaccaccgttatacgtactacctataaagccacccgccttactactggattagagtatcagttccgtgtaaaagctcagaatagatatggagttggaccaggcatcacatcagcatgcatagttgccaactatccatttaaggttcctggacctcctggtacccctcaggtaactgcagttaccaaggattcaatgacaattagctggcatgagccactttctgatggtggaagccccattttaggatatcatgttgaaagaaaagaacgaaatggtattctctggcagactgtgagcaaagctttagtaccaggcaacattttcaaatcaagtggacttacagatggtattgcttatgagttccgggtgattgcagaaaacatggcaggcaaaagtaagccaagcaagccatcagaacctatgttggctctggatcccattgacccacctggaaaaccagtacctctaaatattacaagacacacagtaacacttaaatgggctaagcctgaatatactgggggctttaaaattaccagttatatcgttgaaaagagagaccttcctaatggacggtggctgaaggccaacttcagcaacattttggagaatgaatttacagtcagtggcctaacagaagatgctgcatatgaattccgtgtgatcgccaaaaatgctgcaggtgccatcagtccaccatctgagccatctgatgctatcacttgcagggatgatgttgaggcaccaaagataaaggtggatgttaaatttaaggacacggttatattaaaagcaggtgaagcattcagactggaagctgatgtttcaggccgcccacctccaacaatggaatggagcaaagatggaaaagagctggaaggcacagcaaagttagaaataaaaattgcagatttctctactaatctggtaaacaaagattcaacaagaagggatagtggtgcctatacccttacagcgactaatcctggtggctttgctaaacacattttcaatgtcaaagttcttgacagaccaggcccacctgaaggacctttggctgtaactgaagtgacatcagaaaagtgtgtactatcatggttccctccactggatgatggaggtgccaaaattgatcattacatagtacagaaacgtgaaaccagcagattggcatggacaaatgtagcctcagaagtccaagtaacaaagctaaaggtcactaaactcttgaaaggcaatgaatacatattccgtgtcatggctgtaaataaatatggagtgggagagccactggaatcagagcctgtgcttgcagtgaatccttatggaccccctgatccgcccaaaaaccctgaagtgacaactattactaaagattcgatggttgtctgctggggacatcctgattctgatggtggaagtgaaatcatcaattatattgtggaacggcgtgataaagctggccaacgctggattaaatgcaacaaaaaaactcttactgatttaagatataaagtgtctggactgacagaaggacatgaatatgagttcaggattatggctgaaaatgctgctggaattagtgcaccaagtcctaccagtccattttacaaggcttgtgacactgtgtttaaacctggaccaccaggtaacccacgtgttctggatacaagcagatcatccatttcaatcgcttggaataaacctatctatgatggtggttcagaaatcactgggtatatggttgagattgccctgccagaggaagatgaatggcagattgtcactccaccagcaggactcaaggcaacttcgtatactatcactggcctcacagagaatcaggaatataagatccgcatctatgccatgaattccgaaggacttggggaacctgcccttgttcctggaactccaaaggctgaagacagaatgctgcctccagaaattgaactggatgctgacctgcgcaaagttgttactataagggcctgctgcaccctgagactttttgttcccatcaaaggaaggcctgcacctgaggtgaagtgggcccgggaccatggagaatctttagataaagctagcatcgaatccacaagctcttacaccctgcttattgttggaaatgtaaacagatttgacagtggcaaatatatactaactgtagaaaatagttcaggcagcaagtctgcatttgtcaatgttagagttctcgatacaccaggccccccacaggatctgaaggtaaaagaggtcactaagacatctgtcacactcacatgggacccacctctccttgatggaggttcaaaaatcaagaactatattgttgaaaagcgggaatcaacaagaaaagcatattcaactgttgcaacaaactgccacaagacttcctggaaggtagaccagcttcaagaaggctgtagctactatttcagggttctcgcagaaaatgaatatggcattgggctgcctgctgaaaccgcagaatctgtgaaagcatcagaacgacctcttcctccaggaaaaataactttgatggatgtcacaagaaatagtgtgtcactctcttgggagaaaccagagcatgatggaggcagccgaattctaggctacattgtggagatgcagaccaaaggcagtgacaaatgggccacgtgtgccacagtcaaggtcactgaagccactatcactggattaattcagggtgaagaatactctttccgtgtttcagctcagaatgaaaagggcatcagtgatcctagacaactgagtgtgccagtgatcgccaaagatcttgtcattccaccagccttcaaactcctgttcaatactttcactgtactggcaggtgaagacctaaaagttgatgttccattcattggccgccctaccccagctgtaacctggcataaagataatgtaccactgaagcagacaactagagtaaatgcagagagcacagaaaataattcactactgacaataaaggacgcctgccgagaagatgttggccattatgtggttaaactgactaactcagctggtgaagctattgaaacccttaatgttatcgttcttgacaaaccagggcctccaactggaccagttaaaatggatgaagtgacagctgatagtattactctttcctggggcccacccaagtatgatggtggaagttctatcaataattacattgttgagaaacgggacacttccacaaccacctggcaaattgtatcagctacagttgcaaggacaacaataaaggcttgcagactgaagactggatgtgaatatcagtttagaattgcagctgaaaacagatatgggaagagtacctacctcaattcagagcctactgtagcccaatatccattcaaagttcctggtcctcctggcactccagttgtcacactgtcctccagggacagcatggaagtacaatggaatgagccaatcagtgatggaggaagtagagtcattggctatcatctagaacgcaaggaaagaaatagcatcctctgggttaagttgaataaaacacctattcctcaaaccaagtttaagacaactggccttgaagaaggtgttgaatatgaatttagagtctctgcagagaacatcgtgggcattggcaagccgagtaaagtatcagaatgttatgtggctcgtgacccatgtgatccaccaggacggccagaggcaatcattgtcacaaggaattctgtgactcttcagtggaagaaacccacctatgacggtggaagcaagatcactggttatattgttgagaagaaagaattacctgagggccgttggatgaaagccagttttacaaatattattgacactcattttgaagtaactggcctagttgaagatcacagatatgagttccgggttatagcccgaaatgccgcaggagtgtttagtgagccttcagaaagcacaggagcaataacagctagagatgaggtagatccaccacgaataagtatggatccaaaatacaaagacacaatcgtggttcatgctggtgaatcattcaaggttgatgcagatatttatggcaaaccaataccaaccattcagtggataaaaggtgatcaggagctttcaaacacagctcgattagaaataaagagcaccgactttgccaccagtctcagtgtaaaagatgcagtacgtgtcgacagtggaaattacatactgaaggccaaaaatgttgcaggagaaagatcagttactgtgaatgtcaaggttcttgacagaccagggccacctgaaggacctgttgttatctcaggagttacagcagaaaaatgcacactagcttggaaacccccacttcaggatggtgggagtgacatcataaattatattgtggaaaggagagaaaccagccgcttagtttggactgtggttgatgccaatgtgcagactctcagctgcaaggttactaagcttcttgaaggcaatgaatatactttccgtataatggcagtaaacaaatatggtgttggtgaacctcttgaatctgagccagtagttgccaagaatccatttgtagtaccagatgcaccaaaagctccagaagtcacaacagtgaccaaggactcaatgattgttgtatgggaaagaccagcatctgatggtggtagtgaaattcttggatatgttcttgagaaacgggataaagaaggcattagatggacaagatgccataagcgtctgattggagagttgcgcctgagagtaactggactcatagaaaatcacgattatgagttcagagtttctgctgagaatgctgctggacttagtgaaccaagccctccttctgcttaccaaaaggcttgtgatcctatttataaaccaggacccccaaacaaccccaaagtcatagacataaccagatcttcagtattcctttcttggagcaaaccaatatatgatggtggctgtgaaattcaaggatacattgttgaaaaatgtgatgtgagtgttggtgaatggacaatgtgcactccaccaacaggaattaataaaacaaacatagaagtagagaagctgttggaaaagcatgaatacaacttccgtatctgtgctattaataaagctggagttggagaacatgctgacgtccctggacctattatagttgaagaaaaattagaagcaccagacattgatcttgacctagaactaaggaaaatcataaatataagggcaggtggctccttaaggttatttgttcctataaaaggtcgtcctacaccagaagttaaatggggaaaggtggatggtgaaatccgagatgcagctataattgatgtcactagcagtttcacctctcttgttcttgacaatgtcaaccgatatgatagtggaaaatatacgcttacattagaaaacagcagtggaacaaagtctgcctttgttactgtgagagttctggacacgccaagtccacctgttaacctgaaagtcacagaaatcaccaaagactcagtatcaattacatgggaacctcctttgttggatgggggatccaaaataaaaaattacattgttgagaaacgtgaagccacaagaaaatcatatgctgctgttgtaactaactgccataagaattcttggaaaatcgatcagctccaagaaggttgcagttattactttagagtcacagctgagaatgagtatggtattggccttcctgcccagactgctgatccaattaaggttgcagaagtgccacaacctcctggaaaaataactgtggatgatgtcaccagaaacagtgtctctctgagttggacaaaacctgaacatgatggtggcagtaaaatcattcagtatattgtggaaatgcaagctaaacacagtgagaaatggtcagagtgtgctcgagtaaagtctcttcaggcagtaattaccaacctaactcaaggggaagaatatctttttagagttgttgctgtaaatgaaaaggggagaagtgatcctcggtcccttgcagttccaatagttgccaaagatctggtaattgagccagatgtaaaacctgcattcagtagttacagtgtacaggttggccaagatttgaaaatagaagtgccaatttctggacgtcctaagccaaccattacctggactaaagatggtctcccactgaagcagaccacaagaatcaatgttaccgattcactggatctcaccacactcagtattaaagaaactcataaggatgatggtggacaatatggaatcacagttgccaatgttgttggtcagaagacagcatccatcgaaattgtaactctagataaacctgatcctccaaaaggacctgttaaatttgatgacgtcagtgctgaaagtattacattatcttggaaccctccattatatacagggggctgccaaatcaccaactacattgttcagaaaagagatacaaccaccacagtatgggatgttgtttctgctactgttgctagaactacactcaaagtgaccaaactgaaaactggtacagaataccaatttagaatatttgccgaaaacagatatggacaaagctttgccttagagtctgatccaattgtagctcaatatccctacaaagaaccaggccctccaggtacaccatttgccacagccatttccaaagactccatggtcatacagtggcatgaaccagtcaacaatggtggaagccccgtcataggttaccacctggagagaaaagaaagaaacagtattttgtggacaaaggtcaacaaaactattattcatgacacccaattcaaagcacagaatcttgaagaaggcattgaatatgaattcagagtgtatgctgaaaatattgttggtgtaggcaaagcaagcaagaattctgaatgctatgtagccagagatccctgtgacccaccaggaaccccagaaccaataatggttaaaagaaatgaaatcactttacagtggaccaaacctgtgtatgatggtggaagtatgattacaggctacattgtagagaaacgtgatttgcctgatggtcgttggatgaaagctagctttacaaatgtcattgaaactcaatttactgtgtcaggtcttactgaagatcaaagatatgaattcagagtcattgcaaagaatgcagctggtgcaataagtaaaccctctgacagtactggaccaataactgccaaggatgaggttgaactcccaagaatttcaatggatccaaaattcagagacacaattgtggtaaatgctggagaaacattcagacttgaggctgatgtccatggaaagcccctacctaccattgagtggttaagaggagataaggaaattgaagaatctgctagatgtgaaataaagaacacagatttcaaggctttacttattgtaaaagatgcaattagaattgatggtgggcagtatattttaagagcttccaatgttgcaggttctaagtcattcccagtaaatgtaaaagtattagatagaccaggacctccagaagggccagtccaggttactggagtcacttctgaaaaatgctctttaacatggtctccaccacttcaagatggtggcagtgacatttctcactatgttgttgaaaagcgagaaaccagtcgacttgcctggactgttgttgcttcagaagttgtgaccaattctctgaaagttaccaaactcttagaaggtaatgaatatgttttccgtataatggctgtcaacaaatatggtgttggagagcctttggaatctgcaccagtactaatgaaaaatccatttgtgcttcctggaccaccaaaaagcttggaagtcacaaatattgccaaagactccatgaccgtctgttggaaccgtccagatagtgatggtggaagtgagattattggttacattgtagagaaaagagacagaagtggcattcgatggataaaatgtaataaacgccgcattacagatttgcgtctaagagtgacaggattaacagaagatcatgagtatgaattcagggtctctgcagaaaatgctgctggagttggggaaccaagtccagctacagtttattataaagcctgtgatcctgtgttcaaacctggcccacctaccaatgcacacattgtagacaccactaaaaattcaatcacacttgcctggggtaaacccatctatgatggcggcagtgagatcttgggatatgtagtagaaatctgtaaagcagatgaagaagaatggcaaatagttactccacagactggcctgagagtcactcgatttgaaatttcaaaactcactgaacaccaagagtataaaatacgagtctgtgccctcaacaaagttggtttaggtgaggctacatcagttcctggtactgtgaaaccagaagataaacttgaagcacctgaacttgaccttgactccgaattaagaaaaggaattgttgtaagagctggtggatctgccagaattcacattccattcaaaggtcgtccaacgcctgagatcacttggtctcgagaggaaggtgaattcacagataaggtccaaattgaaaagggagtaaactatacccaactatcaatagataactgtgatagaaatgatgctggaaaatacattcttaagttggaaaacagcagtggatcaaagtctgcttttgtaactgtgaaagttcttgacactccaggaccaccacagaatttggcagtcaaagaagtgagaaaagattctgccttcctggtatgggagccacccatcattgatggaggggcaaaggtcaagaactatgtgattgacaaacgtgagtcaaccagaaaagcgtatgctaatgtgagtagtaaatgcagcaaaacaagttttaaagtggaaaaccttacagaaggagccatttattacttcagagtcatggctgaaaatgaatttggagttggtgttccagtggaaactgttgatgccgtgaaagctgctgaacctccttccccaccaggaaaggttacactcactgatgtgtcccagaccagtgcatcacttatgtgggagaaacctgaacatgatggcggtagcagagtcctggggtacgttgttgaaatgcagcccaaaggaactgaaaaatggagcattgtggctgaatccaaagtctgtaatgcagttgttactggtttgagttctggacaagaatatcagttccgtgtcaaggcttataatgagaaaggaaaaagcgatccaagagtgttgggtgttcctgtcatagccaaggacttgactatacagcctagtttaaagttaccatttaacacatatagtatccaagctggagaagatcttaaaatagaaattccagttataggccgaccaagacctaacatttcttgggtcaaagatggtgagcctcttaaacagacaacaagagtaaacgttgaagaaacagctacctcaactgttttgcacattaaagaaggtaacaaagatgactttggaaaatacaccgtaacggcaacaaatagtgcaggcacagcaacagaaaatctcagtgttatcgttttagaaaagcctggacctccagttggcccagttcggtttgatgaagttagtgcagactttgtagtcatatcttgggaacctccagcctatactggtggctgccaaataagcaactacattgtagagaagcgagatacaaccaccaccacttggcacatggtatcagcaacagttgcaagaacaacaattaaaataaccaaactgaaaacaggcacggagtaccagtttagaatttttgctgaaaacaggtatggaaaaagtgccccactggattctaaggcagttattgtacaatatccatttaaagaacctggaccacctggaactccttttgtgacatcaatctcaaaagatcagatgcttgtgcaatggcatgagccagtgaatgatggaggcaccaaaattattggctaccatcttgaacagaaagaaaagaacagtattttatgggtcaagttaaataagacccccattcaggacaccaaattcaaaacaactgggcttgatgagggccttgagtatgagttcaaagtttctgctgaaaatattgttggcattggcaagcctagcaaagtgtcagaatgctttgttgctcgtgatccatgtgacccacctggtcgccctgaagccattgttattacaagaaacaatgtcacactgaaatggaagaaacctgcctatgatggtggtagcaaaataacaggttatattgtagaaaagaaagatctacctgatggccgctggatgaaagccagctttaccaacgtattagaaactgaatttacagtgagtggacttgtagaagaccaaagatatgaatttagagtaattgcaagaaatgcagctggaaactttagtgaaccatctgatagtagtggtgccattactgcaagagatgaaattgatgcaccaaatgcctctctggatccaaaatataaagatgtcatcgttgttcatgcaggagagacttttgttcttgaagccgacatccgtggcaaacctatacctgatgttgtttggtcaaaagatggaaaagaacttgaagaaacagctgctagaatggaaattaaatctactattcagaaaacaactcttgttgtcaaagactgtatacggactgatggaggacaatatattctgaaactcagcaatgttggtggtacaaagtctatacccatcactgtaaaggtacttgacaggccagggcctcctgaagggcctctgaaagttactggagttactgcggaaaaatgttacctggcatggaacccacctttgcaagatggtggtgctaatatttcacattacatcattgaaaagagggagacaagccgactctcttggacccaggtttcaactgaggtacaggcccttaactacaaagttactaaacttcttcctggtaatgagtacattttccgtgtcatggctgtgaataaatatggaattggagagcccttggaatctgggcctgttacggcctgtaatccttataagccaccaggtcctccctcaacacctgaagtctcagcaatcaccaaagattctatggtagtaacatgggcacgcccagtagacgacggaggtaccgaaattgagggctacattcttgaaaaacgagataaggaaggcgttagatggaccaagtgcaacaagaaaacattaacggatctgcggctcagggtaactggtcttaccgaaggccattcctatgaattcagagttgctgctgaaaatgcagctggtgtgggagaacctagtgagccatctgttttctaccgtgcgtgtgatgccttgtatccaccaggtcccccaagcaatccaaaagtgacggacacttccagatcttctgtctccctggcatggagtaagccaatttatgatggtggcgcacctgttaaaggctatgttgtagaggtcaaagaagctgctgcggatgaatggacaacctgcactccaccaacaggattacaaggaaagcagttcacagtgaccaagcttaaagaaaacactgaatataacttccgtatttgtgccatcaattctgaaggtgtaggtgaacctgcaactctacctggctcagtggttgctcaggagaggatagagccaccagaaatagaactcgatgctgatctcagaaaggtggtcgttctgcgtgcaagtgctactttacgcttatttgtcactatcaaaggtcgaccagaacccgaagttaaatgggaaaaggcagaaggcattctcactgacagggctcagatagaggtgaccagctcatttacaatgttggtgattgataatgttaccagatttgacagtggtcggtataatctgacattagaaaataatagtggctccaaaacagcttttgttaacgtcagagttcttgactcaccaagtgcccctgtgaatttgaccataagagaagtgaagaaagactcagtgacgttgtcctgggaaccaccacttattgatggtggagctaagattacaaactacattgtcgaaaaacgagaaactacaagaaaagcctatgctaccattacaaataattgcactaaaactactttcagaattgaaaatctacaagaaggatgttcttactacttccgagtcttggcttccaatgaatatgggattggtttgccagctgaaacaacagaacccgttaaagtgtctgaaccacccctcccacctggaagagtaactcttgttgatgtgacccgtaatacagctacaattaagtgggagaaaccagaaagtgatggtggcagcaaaattactggttatgtggttgaaatgcagactaaagggagtgaaaagtggagcacctgcacacaagttaagactctagaagcaactatatctggcttaactgcaggagaagagtatgtcttcagggtagctgcagttaacgaaaagggaagaagtgatccaagacaacttggagtgccagtaattgcaagggatattgaaataaagccttcagttgagcttcctttccatactttcaatgtaaaggctagagaacaacttaagattgatgtgccattcaaaggaagacctcaagctactgtgaactggagaaaagatggtcagactcttaaagagacaactagagtcaatgtttcttcttcaaagactgtaacatcactatctattaaggaagcttcaaaggaagatgttggaacttatgaattatgtgtttcaaacagtgctggatccataacagttcctattactataattgtccttgacagaccaggacctccaggtcctatacgtattgatgaggttagttgtgacagcataaccatttcttggaatcctccagaatatgatggtggctgccaaattagcaattacattgttgaaaagaaagaaaccacctctacaacatggcacatagtttcacaagcagttgcaagaacatccattaaaatagttcgcctgacaacaggaagtgagtatcagttccgtgtttgtgcagaaaaccgctatggaaagagctcctacagtgaatcttcagctgttgttgcagagtatccattcagtcccccaggtcctcctggtactcctaaagttgtgcatgccacaaaatctaccatgcttgtaacctggcaagtgccagttaatgatggaggaagtcgagtaattggctatcatcttgagtataaagaaagaagcagcattctttggtcaaaagcaaataaaatcctcattgctgatactcaaatgaaagtctccggccttgatgaaggactgatgtatgagtatcgtgtatatgctgaaaatattgctggaattggtaaatgcagtaaatcttgtgaaccagtccctgcaagagatccttgtgaccctcctggacaacctgaagtcacaaatatcacaagaaaatcagtgtcacttaaatggtctaaaccacattatgatggtggagctaagatcacaggatacattgttgaacgcagagaactaccagatggccggtggctgaagtgcaattatactaatatacaagaaacatactttgaagtaactgaacttactgaagatcagcgttatgaattccgggtttttgcaaggaatgctgctgactcagttagtgagccatctgaatccactgggcctattatagttaaagatgatgttgagcctccaagagttatgatggatgtcaagttccgagacgttattgttgtcaaagctggagaggtccttaagataaatgcagacattgcagggcgacctctgccagtaatttcctgggccaaggatggtatagaaattgaagaaagagcaagaacagaaatcatctcaacagacaatcatactttgttaacagttaaagactgtataagacgagacactgggcaatatgtactaacactgaagaatgttgccggcactcggtctgtggccgttaattgcaaagtacttgataagcctggtccaccagcaggaccacttgaaataaatggcctcactgctgagaaatgctctctttcctggggacgtccccaagaagatggtggtgcagatatcgactattacatcgtagaaaaacgtgaaacaagccaccttgcatggacaatatgtgaaggagagttacagatgacatcctgtaaagtaaccaagttactcaaaggcaatgaatatatatttagagtaactggtgttaataaatatggtgttggtgagcccctagagagtgtagctataaaggcactagatccatttacagttccaagtccacccacgtctttggaaattacttctgtgaccaaagaatctatgacactttgctggtcaagacccgagagtgatggaggtagtgaaatatctggatatataattgaaaggcgagagaaaaatagcctaagatgggtgcgtgtaaacaaaaaaccagtttatgatctaagagtgaaatcaacaggacttcgggaaggatgtgaatatgaatatcgtgtttatgcagaaaatgctgctggcctaagtcttccaagtgaaacctctcccttaattagggcagaagatccagtgttcctaccatctcctccatccaaacccaaaattgtggactcaggcaagacaactataactattgcctgggttaagccgctgtttgatggtggggccccgataactggatatactgtagaatacaaaaaatctgatgacactgactggaaaacttccattcagagcttacgagggacagaatatacaataagcggactaacaacaggagctgaatatgttttcagagtaaaatctgtcaataaggttggtgctagtgaccccagtgatagctctgaccctcagatagcaaaggaaagagaagaagaacctttatttgatattgacagtgaaatgaggaagaccttgattgtcaaggctggtgcctcatttaccatgactgtgcctttccgaggaagaccagtacccaatgtcttgtggagtaagccagacactgacctccgtactagagcttatgttgataccacagactctcgtacatcactgaccattgaaaatgccaacagaaatgactctggaaagtacacattaacaattcagaatgttttgagtgctgcttcactgaccttagttgtcaaagttttagataccccaggtcctccaaccaacattactgtgcaagatgtaaccaaagagtctgcagtgttatcctgggatgttcctgaaaacgatggtggagcaccagtgaagaattaccacatagaaaaacgtgaggccagcaagaaagcatgggtctctgtgaccaacaactgtaaccgcctctcctacaaagttaccaatttacaagaaggagctatctattacttcagagtctctggagaaaatgagtttggtgttggtataccagctgaaacaaaggaaggagtaaaaataacagaaaaaccaagcccacctgaaaaacttggagtaacaagtatatccaaagacagtgtttccctgacctggctgaagcctgaacatgatggcggaagcagaattgtacactatgtcgttgaagcactagaaaaaggacagaaaaactgggttaaatgtgcagtggcaaagtcaacccatcacgttgtttccggtctgagagagaattctgaatactttttccgagtgtttgctgaaaatcaagctggcctgagtgacccgagagagcttctgcttcctgttcttattaaggagcaactagaaccacctgaaattgatatgaagaatttcccaagtcacactgtatatgttagagctggttcaaaccttaaagttgacattccaatctctggaaaaccacttcccaaagtgaccttatcaagagatggtgtcccccttaaggcaaccatgagatttaataccgaaattactgctgagaacctgaccatcaatctcaaagaaagtgttacagctgacgctgggagatatgaaatcactgctgccaactccagtggtacaaccaaagctttcattaacattgttgtgctagacaggcctggtcctccaactggccctgttgttattagtgatataactgaagaaagtgtgactctcaaatgggagccacctaagtatgacggtggaagtcaagttaccaactacattctactcaaaagagaaacaagtactgcagtgtggactgaagtgtctgcaacagttgcaagaaccatgatgaaagtcatgaaactgaccacaggagaagaataccaattccgcatcaaggcagaaaaccgctttggcatcagtgatcatatagattcagcttgtgtgactgtcaaactaccatacacaacacctggaccaccatctacaccatgggtcactaatgttactcgagaaagcatcactgtgggctggcatgaaccagtgtcaaatggaggcagtgcagtcgtaggctatcacctggaaatgaaagacagaaacagtattttatggcaaaaagccaacaaactggtcatccgcacaactcacttcaaagtcacaacaatcagtgctggacttatttatgaattcagggtgtatgcagaaaatgctgctggagttggaaaacctagccatccttctgaaccagtcttggcaattgatgcttgtgaacccccaagaaatgttcgtatcactgatatttcaaagaactctgtcagcctttcatggcaacaaccagctttcgatggaggtagcaagattacaggctacattgttgagagacgtgaccttccagatggcagatggaccaaggccagcttcaccaatgttactgaaactcaattcatcatctctggcttgactcagaattcccagtatgaattccgtgtctttgctaggaatgctgttggttccattagcaatccatctgaggttgtagggcccattacttgcatcgattcttatggtggtcctgtaattgatttgcctctagaatatacagaagttgtcaaatacagagcaggtacatctgtgaagctcagagctggcatttctggcaaacctgcgcctactattgagtggtataaagatgataaagaattacaaaccaatgcactggtgtgtgttgaaaataccacggacctcgcatctatactcatcaaagatgccgatcgccttaatagtggatgctatgaattaaaactaaggaatgccatgggctcagcctcagccaccatcagagtacagatccttgacaaaccaggcccacctggtggaccaattgaatttaagactgtaactgctgagaagatcacccttctctggcggcctccagctgatgatggtggtgcaaaaatcactcactacattgtggaaaagcgtgagacaagccgcgttgtgtggtctatggtgtctgaacatttggaagagtgcatcattacaaccaccaaaattatcaaaggaaatgaatacatcttccgggtccgagccgtgaacaaatatggaattggcgagccactggaatctgattccgttgtagccaagaacgcatttgttacacctgggccaccaggcataccagaagtgacaaagattaccaagaattcgatgactgttgtatggagcaggccaattgcagatggcggtagtgatataagtggctatttccttgaaaaacgagacaagaagagcctaggatggtttaaagtactaaaagagactatccgtgacaccagacaaaaagtaacaggactcacagaaaacagtgactatcaatacagagtttgtgctgtaaacgctgctggacagggtccattttctgaaccatctgaattctacaaagctgctgatcctattgatcctccaggtccacctgctaagataagaatcgcagattcaaccaagtcatccatcacccttggctggagtaagcctgtctatgatgggggcagtgctgttactgggtatgttgtcgagataagacaaggagaggaagaggaatggactactgtctctaccaaaggagaggtcagaactacagaatatgtggtatccaacctgaaacctggagtcaattactacttccgggtatctgctgtaaactgtgctggacaaggagaacctatagaaatgaatgaacctgtacaagctaaagatatacttgaggcaccagagattgacctggatgtggctctcagaacttctgttattgccaaagctggtgaagatgtacaagtgttgattccctttaaaggcagacctccacctactgtcacatggagaaaagatgagaagaatcttggcagtgatgccagatacagcattgaaaacactgattcatcctcattactcaccattcctcaagttactcgcaatgatacaggaaaatatattctcacaatagaaaatggagttggtgaacctaagtcttcaactgtgagtgttaaagtgcttgacacaccagctgcctgccagaaactacaggttaaacatgtttctcgaggcacagtcactttgctctgggatcctcctctcattgatggaggatctccaataattaattatgtcattgaaaagagagatgccaccaagagaacatggtctgtcgtgtcacacaaatgttctagcacatccttcaagctaatagatttgtcggagaagactccattcttcttcagagttcttgcagaaaatgaaattggaattggggaaccctgtgaaactacagagccagtgaaggctgctgaagtaccagctcctatacgtgatctctcaatgaaagactcaacaaagacatctgtcatcctcagctggaccaaacctgactttgatggtggtagcgtcatcacagaatatgttgtagaaaggaaaggtaaaggtgaacagacgtggtcccacgctggcataagtaagacatgtgaaattgaggttagccaacttaaggagcagtcagtcctggagttcagagtgtttgccaaaaatgagaaaggactgagtgatcctgtcactattgggccaattacagtgaaagaacttattattacacctgaagttgacctgtcagatatccctggggcacaagtcactgtgagaattgggcacaatgtgcaccttgaattaccttataagggaaaacccaaaccatccatcagttggctgaaagatggcttgccactgaaagaaagtgaatttgttcgcttcagtaaaactgaaaacaaaattactttgagtattaagaatgccaagaaggagcatggaggaaaatacactgttattcttgataatgcagtgtgtagaattgcagtccccattacagtcatcacccttggcccaccatcaaagcccaaaggacccattcgatttgatgaaatcaaggctgatagtgtcatcctgtcatgggatgtacctgaagataatggaggaggagaaattacttgttacagcatcgagaagcgggaaacttcacaaactaactggaagatggtgtgttcaagtgttgccagaacgactttcaaagttcctaatctagtcaaagatgctgagtaccagtttagagtgagagcagaaaacagatacggagtcagccaaccacttgtctcaagcattattgtggcaaaacaccagttcaggattcctggtcccccaggaaagccagttatatacaatgtgacttctgatggcatgtcactaacttgggatgctccagtttatgatggtggttcagaagttactggattccatgttgaaaagaaagaaagaaatagcatcctctggcaaaaagttaatacatcaccaatctctggaagagaatatagagccactggactggtagaaggtctggattaccaattccgtgtatatgctgaaaattctgctggcctaagctcacctagtgacccaagcaaatttaccttagctgtttctccagtagacccacctggcactcctgactacattgatgtcacccgggaaaccatcacacttaaatggaacccaccattgcgtgatggaggcagtaagattgtgggctatagcattgagaaacggcaaggaaatgaacgctgggtgagatgcaactttactgacgtcagtgaatgtcagtacacagttacaggactcagtcctggggatcgctatgagttcagaataattgcaagaaatgctgttggaactataagcccgccctcacagtcttctggcattattatgacaagagatgaaaatgttccaccaatagtagagtttggccctgaatactttgatggtctcattattaagtccggagagagccttagaattaaagctttggtacaaggaagaccagtgcctcgagtaacttggttcaaagatggagtggaaatcgaaaagaggatgaatatggaaataaccgacgtacttggatccaccagcctatttgttagagatgctactcgggaccatcgtggtgtatacacagtggaagccaaaaatgcatctggttctgcaaaagcagaaattaaagtgaaagtacaagatacaccaggaaaagtagttgggccaataagattcaccaatattactggggagaagatgactctgtggtgggatgccccactcaatgacggttgtgctcccataacccactacatcattgaaaaacgggaaaccagcagacttgcctgggcactaattgaggataaatgtgaagcccaaagttacactgccattaaactaataaacggcaatgaataccaattccgtgtttctgcagttaacaagtttggtgttggcaggcccttgattctgatccagtggttgctcaaatacaatatactgttcctgatgcccctggcattccagaacctagcaacataacaggcaacagcattaccctgacatgggcaaggccagaatcagatggtggcagtgaaattcaacagtatatccttgaaagaagagaaaagaaaagcacaagatgggtaaaagtgatcagcaaacgaccaatctctgaaacaagattcaaagtcactggtctgacagaaggcaatgagtatgaattccatgtcatggctgaaaatgctgcaggagttggacctgcaagtggcatctcaagactcattaaatgtagagagcccgtcaacccaccaggtcctcccacagtggtcaaagtaacagacacatcaaagacaactgtgagcttagaatggtccaaaccagtgtttgatggtggcatggaaataattgggtatattattgaaatgtgtaaggccgacttaggagactggcacaaggtgaatgcagaggcatgtgtgaaaacaagatatacagtcactgatctacaagcaggtgaagaatacaaattccgagttagtgctatcaatggtgctggaaaaggcgacagctgtgaagtgactggcacaattaaagcagttgaccggttaacagctcctgagttagacatagatgcaaacttcaaacagactcatgttgttagagctggggccagtattcgcctcttcattgcctaccaaggtagacctactcctacagctgtgtggagcaaaccagactctaaccttagccttcgggctgatatccatacaacagattccttcagcaccctcactgtggaaaactgcaacagaaatgatgcagggaaatatacccttactgtggaaaacaacagtggtagtaagtcaatcacattcaccgtgaaagtgctagacactccaggcccacctggcccaattaccttcaaagatgtgacccggggatctgctacattgatgtgggatgcccctcttcttgacggtggtgcccgaatccatcattatgtggtagagaaacgagaggcaagtcgccgtagttggcaggttatcagtgaaaaatgcactcgtcagatcttcaaggtcaatgacctggccgaaggtgttccgtactatttccgtgtttctgcagtaaatgagtatggtgttggtgagccctatgaaatgccagaaccaattgtagccacagaacagcctgctccacctaggagacttgatgttgttgatactagcaaatcctccgcagtcttagcttggcttaaacctgaccacgatggaggcagccggatcactggctacctgcttgaaatgagacaaaagggatctgacttctgggttgaagctggtcacaccaaacagctaactttcacagtagagcgtcttgttgagaaaactgaatatgaattccgtgtgaaggccaagaatgatgctggctatagtgaacccagagaagccttctcttctgtcatcattaaggagcctcaaatcgagcccactgctgacctcactggaattaccaatcagcttataacttgcaaagcaggaagcccatttaccattgacgtaccaatcagtggtcgtcctgcccccaaagtaacatggaaactggaagaaatgagacttaaagagacagatcgagtgagcattacaacaacaaaagacagaaccacactgactgtaaaggacagcatgagaggtgactctggaagatacttcttgaccctggaaaatacagctggtgttaaaacatttagcgtcacagttgtggtcattggaaggccaggtccagtaaccggccccattgaggtctcatctgtctcagctgaatcgtgtgtcctgtcatggggagaacctaaagatggaggaggcactgaaattactaattacatagttgaaaagcgtgaatcgggtacaacagcttggcagcttgtcaattccagtgtcaagcgcactcaaattaaagtcactcatctcacaaaatacatggaatattctttccgtgtcagttcagagaacagatttggtgtcagcaaacctctagaatcagcaccaataattgctgaacatccatttgtcccaccaagcgctcctaccagacctgaggtctaccatgtgtctgccaatgccatgtctattcgttgggaagaaccctaccacgatggtggcagtaaaatcattggctactgggttgagaagaaagaacgtaatacaattctttgggtgaaagaaaacaaagtgccatgcttagagtgcaactacaaagtaactggtttagtagaaggactggaatatcagttcagaacttatgcactcaatgctgcaggtgttagcaaggccagcgaagcttcaagacctataatggctcaaaatccagttgatgcaccaggcagaccagaggtgacagatgtcacaagatcaacagtatcactgatttggtctgccccagcgtatgatggaggcagcaaggttgtgggctacatcatagagcgtaagccagtcagtgaggtaggagatggtcgctggctgaagtgcaactacaccattgtatctgacaatttcttcaccgtgactgctctcagtgaaggagacacttatgagttccgtgtgttagccaagaatgcagcaggcgtaattagcaaagggtctgaatctacaggccctgtcacttgccgagatgaatacgctccacccaaagccgaactggatgcccgattacacggtgatctggttaccatcagagcaggttctgatcttgttctggatgctgcagttggtggcaaacctgaacccaaaattatctggaccaaaggagacaaggagctagatctctgtgaaaaagtctctttgcagtatactggcaaacgagcaactgctgtgatcaagttctgtgacagaagtgacagtggaaaatacactttaacagtgaaaaatgccagcgggaccaaggccgtgtctgtcatggtcaaagtgcttgattcccctggcccatgtggaaagctcaccgtcagcagagtaacacaggagaagtgcactttagcctggagccttccgcaggaagacggaggagcagaaatcactcactacatcgtggaaagacgcgagactagcaggctcaactgggtgattgttgaaggcgaatgcccaaccctatcctatgtcgttaccaggctcatcaagaacaatgagtacatattccgagtgagggcagtaaacaaatatggccctggtgtgcctgttgaatcagagccaattgtagccagaaactcattcactattccatcaccacccggcatacctgaagaagttgggactggcaaagagcatatcatcattcagtggacaaaacctgaatctgatggtggcaatgaaatcagcaactacctagtagacaaacgtgagaagaagagcctgcgctggacacgtgtcaacaaagactatgtggtgtatgataccaggctgaaggtgaccagcctgatggagggttgtgattaccagttccgggtgaccgcagtgaatgcagctggtaacagtgagcccagcgaagcttccaacttcatctcatgcagagaaccatcatatacccctggaccaccttctgctccaagagttgtggataccaccaaacacagcattagtttggcatggaccaaacccatgtacgatggtggtactgacattgtaggatatgttctggaaatgcaagagaaggacactgatcagtggtaccgagtgcataccaatgccacaataagaaatactgaattcactgtgccagaccttaaaatgggccagaaatattccttcagagttgctgccgtgaacgtgaagggtatgagcgaatacagcgaatcaattgctgaaattgagcccgtggaaagaatagaaataccagatcttgagcttgcagatgatctaaagaagactgtgaccatcagggctggggcctccttgcgcttgatggtgtctgtatctggaagaccacctcctgtcataacgtggagcaagcagggcattgaccttgcaagccgggcaattattgacaccactgagagctactcattgctaatagtggacaaagttaatcggtacgatgctggaaaatacacaattgaagctgaaaaccaatctggcaagaaatcagcaacagtccttgttaaagtctatgatactcctggtccctgtccttcagtgaaagttaaggaagtatcaagagattctgtgactataacttgggaaattcccacgattgatggtggagctccagtcaacaattacatcgttgagaagcgtgaagctgctatgagagcattcaaaacagtaactaccaaatgcagcaagacactttacagaatttctggacttgtagaaggaaccatgtactatttcagagtgctgccagaaaatatttatggcattggagaaccttgtgaaacatctgatgcagtactggtctcagaagtgcctttggtgcctgcaaagctagaagtggtcgatgtcaccaaatccactgttacccttgcctgggaaaaaccactctacgatggtggtagccgactcactggatatgttctcgaggcctgcaaagctggcacagagagatggatgaaggttgtcaccttaaaacccacagtcctagagcacactgttacttccttaaatgaaggtgaacaatacttatttagaataagggcacaaaatgagaaaggtgtgtcagaaccaagagagactgtcacagccgtgactgtacaagacctcagagtgttgccaacaatcgatctttctacaatgcctcagaagaccatccatgtcccagctggcagaccagtagagctggtgatacctattgctggccgtccacctcctgctgcttcctggttctttgctggttctaaactgagagaatcagagcgtgtcacagttgaaactcacactaaagtagctaaattaaccatccgtgaaaccactatcagagatactggagaatacacacttgaattgaagaatgttaccggaactacttcagaaaccattaaagttatcattcttgacaagcctggtccaccaacaggacctattaagattgatgaaattgatgctacatcaattaccatttcctgggaaccacctgaattggacggtggtgctccactgagtggttatgtggtagaacaacgtgacgctcatcgtccaggatggctgcccgtttctgaatcagtgactaggtccacgtttaagtttaccagactcaccgaaggaaatgagtatgtgttccgtgtggctgcaacaaaccgcttcgggattggctcttacttgcagtctgaggtcatagagtgtcgcagcagcatccgtattcctggacccccagaaacattacagatatttgatgtttcccgtgatggcatgacacttacttggtacccaccagaggatgacggtggctcccaagtgactggatatattgtggagcgcaaagaagtgagagcagatcgatgggtccgtgtaaataaagtacctgtgacaatgacacggtaccgctccactggccttactgaaggcttagaatatgaacaccgtgtcacagccattaatgcaagagggtctgggaaaccaagtcgtccttccaaacccatcgttgccatggatccaattgctcctccaggaaagccacaaaacccaagagttactgatacaacaaggacatcagtctccctggcctggagtgttccagaagatgaaggaggatctaaagtcacaggctacttgattgaaatgcaaaaagtagatcaacatgaatggaccaagtgtaacaccactccaaccaagattcgagagtatactctaacacacctacctcagggtgcagaatacaggttccgcgtcctagcttgtaatgctggtggacctggtgagcctgctgaggtaccaggaacagtcaaagtcactgaaatgcttgaatatcctgattatgaacttgatgaaagataccaagaaggtatctttgtaaggcaaggtggcgtcatcagacttaccataccaatcaaaggaaaaccattcccaatatgtaaatggaccaaggaaggccaggatattagtaagcgtgccatgattgcaacatctgaaacacacactgagcttgtgatcaaagaagcagacaggggtgattctggcacttatgacctggttctggaaaataaatgtggcaagaaggctgtctacatcaaggtcagggtgataggaagtcccaacagtccagaagggccactggaatatgatgacatccaagtccgctctgtgagggtcagctggagacctcctgctgatgatggtggtgctgacatcttaggctacatcctcgagagacgagaagtgcctaaagccgcctggtataccattgattccagagtccgaggtacatctctggtggtaaaaggcctcaaagagaatgtagaataccatttccgtgtttcagcagaaaaccagtttggcataagcaaacccttgaaatctgaggaaccagtcacaccaaaaacaccattgaatcctccagaacctccaagcaatcctccagaagtactcgatgtaaccaagagttctgttagcttgtcctggtcccggcccaaagatgatggtggttctagagtcacaggctactacatcgaacgcaaagagacatccactgacaagtgggtcagacacaacaagactcagatcaccaccacaatgtacactgtcacagggcttgttcccgatgctgagtatcagttccgcatcatcgcacagaatgatgttggcctgagtgagaccagccctgcttctgaaccagttgtttgcaaagatccatttgataaaccaagccaaccaggagaacttgagattctttcaatatccaaagatagtgtcactctacagtgggagaaacctgaatgtgatggtggtaaagaaattcttggatactgggttgaatatagacagtctggagacagtgcctggaagaagagcaataaggaacgtattaaggacaagcaattcacaataggaggtttgctggaagctactgagtatgaattcagggtttttgctgagaatgagactgggctgagcagacctcgcagaactgctatgtctataaagactaaactcacatctggagaggccccaggaatacgcaaagaaatgaaggatgttaccacaaaattgggtgaagctgctcaactctcatgccagattgttggaaggcctcttcctgacattaaatggtacagatttggtaaagagctcatacaaagccggaaatacaaaatgtcttcagatggacgcacacacactcttacagtaatgacagaggaacaggaagatgaaggtgtttatacctgcatagccaccaatgaggttggagaagtagaaaccagtagtaagcttctcctgcaagcaacaccgcagttccatcctggttacccactgaaagagaaatattatggagctgtgggttccacacttcggcttcatgttatgtacattggtcgtccagtacctgccatgacttggttccatggtcagaaacttttgcaaaactcagaaaacattactattgaaaacactgagcactatactcatcttgtcatgaagaatgtccaacgtaagactcatgctgggaaatacaaagtccagctcagcaatgtttttggaacagttgatgccatccttgatgtggaaatacaagataaaccagacaaacctacaggaccaattgtgatcgaagctctattgaagaactccgcagtgatcagctggaaaccacccgcagatgacggaggctcctggatcaccaactatgtggtggaaaaatgtgaggccaaggagggggctgaatggcaattggtgtcttcagccatctcagtgacaacctgtagaattgtgaacctcacagaaaatgctggctattacttccgggtttcagctcagaacactttcggcatcagtgaccctctagaagtgtcctcagttgtgatcattaagagtccatttgaaaagccaggtgctcctggcaaaccaactattactgctgtcacaaaagattcttgtgttgtggcctggaagccacctgccagtgatggaggtgcaaagattagaaattactaccttgagaagcgtgagaagaagcagaataaatggatttctgtgacaacagaagaaattcgagaaactgtcttttcagtgaaaaaccttattgaaggtcttgaatacgagtttcgtgtgaaatgtgaaaatctaggtggggaaagtgaatggagtgaaatatcagaacccatcactcccaaatctgatgtcccaattcaggcaccacactttaaagaggaactgagaaatctaaatgtcagatatcagagcaatgctaccttggtctgcaaagtgactggtcatccaaaacctatcgtcaaatggtacagacaaggcaaagaaatcattgcagatggattaaaatataggattcaagaatttaagggtggctaccaccagctcatcattgcaagtgtcacagatgatgatgccacagtttaccaagtcagagctaccaaccaagggggatctgtgtctggcactgcctccttggaagtggaagttccagctaagatacacttacctaaaactcttgaaggcatgggagcagttcatgctctccgaggtgaagtggtcagcatcaagattcctttcagtggcaaaccagatcctgtgatcacctggcagaaaggacaagatctcattgacaataatggccactaccaagttattgtcacaagatccttcacatcacttgttttccccaatggggtagagagaaaagatgctggtttctatgtggtctgtgctaaaaacagatttggaattgatcagaagacagttgaactggatgtggctgatgttcctgacccacccagaggagtcaaagttagtgatgtctcacgagattctgtcaacttaacatggactgagccagcctctgatggtggcagcaaaatcaccaactacattgttgaaaaatgtgcaactactgcagaaagatggctccgtgtaggacaggcccgagaaacacgttataccgtgatcaacttatttggaaaaacaagttaccagttccgggtaatagctgaaaataaatttggtctgagcaagccttcagagccttcagaaccaaccataaccaaagaagataagaccagagctatgaactatgatgaagaggtagatgaaaccagggaagtctccatgactaaagcatctcactcttcaaccaaggaactctatgagaaatatatgattgctgaagatcttgggcgtggtgagtttggaattgtccatcgttgtgttgaaacatcctcaaagaagacatacatggccaaatttgttaaagtcaaagggactgatcaggttttggtaaagaaggaaatttccattctgaatattgctaggcatagaaacatcttacacctccatgaatcatttgaaagcatggaagaattagttatgatctttgagtttatatcaggacttgacatatttgagcgcattaacacaagtgcttttgaacttaatgaaagagaaattgtaagttatgttcaccaggtctgtgaagcacttcagtttttacacagtcataatattggacactttgacattagaccagaaaatatcatttaccaaaccagaagaagctctaccattaaaatcatagaatttggtcaagcccgtcagctgaaaccaggggacaacttcaggcttctattcactgccccagaatactatgcacctgaagtccaccagcatgatgttgtcagcacagccacagacatgtggtcacttggaacactggtatatgtgctattgagtggtatcaacccattcctggctgaaactaaccaacagatcattgagaatatcatgaatgctgaatatactttcgatgaggaagcattcaaagagattagcattgaagccatggattttgttgaccggttgttagtgaaagagaggaaatctcgcatgacagcatcggaggctctccagcacccatggttgaagcagaagatagaaagagtcagtactaaagttatcagaacattaaaacaccggcgttattaccacaccctgatcaagaaagacctcaacatggttgtgtcagcagcccggatctcctgtggtggtgcaattcgatctcagaagggagtgagtgttgctaaagttaaagtggcatccattgaaattggcccagtttctgggcagataatgcatgcagttggtgaagaaggaggacatgtcaaatatgtatgcaaaattgaaaattatgatcagtctacccaagtgacttggtactttggcgtccgacagctggagaacagtgagaaatacgaaatcacctacgaagatggagtggccatcctctatgtcaaagacattaccaaattagatgatggtacctacagatgcaaagtagtcaatgactatggtgaagacagttcttatgcagagctatttgttaaaggtgtgagagaagtctatgactattactgccgtagaaccatgaagaaaattaagcgcagaacagacacaatgagactcctggaaaggccaccagaatttaccctgcctctctataataagacagcttatgtaggtgaaaatgtccggtttggagtaactataactgtccacccagagcctcatgtaacatggtataaatcaggtcagaaaatcaaaccaggtgacaatgacaagaagtacacatttgagtcagacaagggtctttaccaattaacaatcaacagtgtcactacagatgatgacgctgaatatactgttgtggcaaggaacaaatatggtgaagacagctgtaaagcaaagctgacagtaaccctacacccacctccaacagatagtaccttaagacccatgttcaaaaggttactggcaaatgcagaatgccaagaaggccaaagtgtctgctttgagatcagagtgtctggcatccccccaccaacattaaaatgggagaaagatggtcagccactgtccctcgggcctaacattgaaattatccatgaaggcttggattattatgctctgcacatcagggacactttgcctgaagacacgggttattatagagtcacagccactaacacagctgggtccaccagctgccaggctcacctacaagtggaacgcctgaggtacaagaaacaggaattcaagagtaaggaggagcatgagcgacacgtacaaaaacaaattgacaaaaccctcagaatggctgaaattctttctggaactgaaagtgtaccactgacacaggtagctaaagaggctctgagagaagctgctgtcctttataaaccggctgtaagcaccaagactgtaaaaggggaattcagacttgagatagaagaaaagaaggaggagagaaaactccggatgccttatgatgtaccagagccacgcaagtataagcagactaccatagaagaagaccaacgcatcaagcagttcgtgcccatgtctgacatgaagtggtataaaaagatacgtgatcagtatgaaatgcctgggaaacttgacagagttgtacagaaacgacccaagcgcatccgcctttcaagatgggaacagttctatgtgatgcctcttccacgcattacagatcaatacagacctaaatggcgtattcctaaactgtcccaagatgatcttgagatagtgagaccagcccgccggcgtacaccttctcctgattatgacttttactaccgacctagaagacgttctcttggggacatctctgatgaagaattactcctccccattgatgactacttagcaatgaaaagaacagaggaagagaggctgcgtcttgaagaagagcttgagttaggtttttcagcttcacccccaagtcgaagccctccacactttgagctttctagcctacgttactcttcaccacaagctcatgtcaaggtggaggaaacaagaaaagacttcaggtattcaacctatcacatcccaacgaaggctgaagctagtacaagttatgcagaactgagggaacggcatgcccaggctgcgtacagacagccaaagcaacggcaaagaatcatggctgagagggaggatgaagagttgcttcgcccagttacgaccacccagcatctctcagaatacaaaagcgaacttgacttcatgtcaaaggaggaaaagtctagaaagaaatcaaggcgacaaagagaagtgacagaaataacagaaattgaggaagaatacgaaatctcaaaacatgctcaaagagaatcatcctcatctgcgtctagactactgagacgacggcgctccctgtctccaacttatattgagttaatgaggccagtgtctgagctgatccggtcacgtccacaaccggctgaggaatacgaagatgacacagaaagaaggtcacctactccagagagaactcgcccacgatcccccagccctgtgtctagtgagagatcactctcgagatttgagaggtctgcaagatttgatatcttttccaggtatgagtccatgaaagctgctttaaaaactcagaagacatcagaaaggaagtatgaagttttgagtcagcagcctttcacactggaccatgcccctcgaatcacactgagaatgcgctcgcacagggtaccatgtggccaaaatacacgttttattttaaatgttcagtctaagccaactgccgaggttaaatggtaccacaatggtgtggaactccaagaaagcagtaagattcattacaccaacacgagtggagtcctcaccctggaaattctggactgtcatactgatgacagtggaacctaccgtgctgtgtgcaccaactacaagggcgaagcttctgactatgcaacgttggacgtgacaggaggggattataccacctatgcttcccaacgcagagatgaagaggtccccagatctgttttccctgagctgacaagaacagaggcgtatgctgtttcatcatttaagaaaacatctgagatggaagcttcgtcttctgtcagggaagtgaaatcacagatgacggagacaagggaaagtctctcctcatatgaacactctgcatctgcagaaatgaaaagtgctgcattagaagaaaagtcactggaagaaaaatccacaaccagaaagatcaagacgactttggcagcaagaattctaacaaagccacggtccatgaccgtctacgagggcgagtctgcaaggttttcttgtgacaccgatggtgagccggtaccaactgtgacctggctgcgtaaaggacaagtgctaagtacttctgcccgccaccaagtgaccaccacaaagtacaaatcaacctttgagatctcttcagtccaggcttccgatgagggcaattacagcgtggtggtagaaaacagtgaagggaaacaagaagcagagttcactctgactattcaaaaggccagggtaactgaaaaggctgtgacatcaccaccaagagtcaaatccccagagcctcgggtgaaatccccagaagcagttaagtctccaaaacgagtgaaatctccagaaccttctcacccgaaagccgtatcacccacagagacaaaaccaacaccaacagagaaagttcagcacctcccagtctctgccccaccaaagattactcagttcctgaaagcagaagcttctaaagagattgcaaaactgacctgtgtggttgaaagcagtgtattaagggcaaaagaggtcacctggtataaagatggcaagaaactgaaggaaaatgggcatttccagtttcattattcagcagatggtacctatgagctcaaaatcaataacctcactgaatctgatcaaggagaatatgtttgtgagatttctggtgaaggtggaacgtctaaaaccaacttacaatttatggggcaagcctttaagagtatccatgagaaggtatcaaaaatatcagaaactaagaaatcagatcagaaaaccactgagtcaacagtaaccagaaaaactgaaccaaaagctcctgaaccaatttcctcaaaaccagtaattgttactgggttgcaggatacaactgtttcttcagacagtgttgctaaatttgcagttaaggctactggagaaccccggccaactgccatctggacaaaagatggaaaggccattacacaaggaggtaaatataaactctctgaagacaagggagggttcttcttagaaattcataagactgatacttctgacagtggactttatacttgtacagtaaaaaattcagctggatctgtgtcctctagctgcaaattaacaataaaagctataaaagatactgaggcacagaaagtctctacacaaaagacttctgaaattacacctcagaagaaagctgttgtccaagaggaaatttcccaaaaagccctaaggtctgaagaaattaagatgtcagaggcaaaatctcaagaaaagttagccctcaaagaggaagcttcaaaggttctgatttctgaagaagtcaagaaatcagcagcaacctccctggaaaaatccattgtccatgaggaaatcactaaaacatcacaggcatcagaagaagtcagaactcatgctgagattaaagcattttctactcagatgagcataaacgaaggtcaaagactggttttaaaagccaacattgctggtgccactgatgtgaaatgggtactgaatggcgtagagcttaccaactctgaggagtaccgatatggtgtctcaggcagcgatcagaccctaaccatcaagcaagccagtcacagagatgaaggaatcctcacctgcataagcaaaaccaaggaaggaatcgtcaagtgtcagtatgatttgacactgagcaaagaactctcagatgctccagccttcatctcacagcctagatctcaaaatattaatgaaggacaaaatgttctctttacttgtgaaatcagtggcgagccatcccctgaaatcgaatggtttaaaaacaacctgccaatttctatttcttcaaatgtcagcataagccgctccagaaatgtatactcccttgaaatccgaaatgcatcagtcagcgacagtggaaagtacacaattaaggccaaaaatttccgtggccagtgttcagctacagcttccttaatggtccttcctctagttgaagaaccttccagagaggtagtattgagaacaagtggtgacacaagcttgcaaggaagcttctcgtctcagtcagtccaaatgtctgcctccaagcaggaggcctccttcagcagtttcagcagcagcagtgctagcagcatgactgagatgaaatttgcaagcatgtctgcccaaagcatgtcctccatgcaagagtcctttgtagaaatgagttccagcagctttatgggaatatctaatatgacacaactggaaagctcaactagtaaaatgcttaaagcaggcataagaggaattccgcctaaaattgaagctcttccatctgatatcagcattgatgaaggcaaagttctaacagtagcctgtgctttcacgggtgagcctaccccagaagtaacatggtcctgtggtggaagaaaaatccacagtcaagaacaggggaggttccacattgaaaacacagatgacctgacaaccctgatcatcatggacgtacagaaacaagatggtggactttataccctgagtttagggaatgaatttggatctgactctgccactgtgaatatacatattcgatccatttaagagggcctgtgcccttatactctacactcattcttaacttttcgcaaacgtttcacacggactaatctttctgaactgtaaatatttaaagaaaaaaaagtagttttgtatcaacctaaatgagtcaaagttcaaaaatattcatttcaatcttttcataattgttgacctaagaatataatacatttgctagtgacatgtacatactgtatatagccggattaacggttataaagttttgtaccatttattttatgacattttacaatgtaagttttgaaactaactgttggtaggagaaagtttcttatggaacgaataccctgctcaacatttaatcaatctttgtgcctcaacatactgttgatgtctaagtatgcctcagtgggttgagaaaatccccattgaagatgtcctgtccacctaaaagagaatgatgctgtgcatatcacttgatatgtgcaccaatacctactgaatcagaaatgtaaggcattggtgatgtttgcatttaccctcctgtaagcaacactttaacgtcttacattttctctgatgatgtcacacaaaattatcatgacaaatattaccagagcaaagtgtaacggccaacactttgttcgctcattttacgctgtctctgacataaggagtgcctgaatagcttggaaaagtaacatctcctggccatcccttcatttaaccaagctattcaagtattcctatgccagagcagtgccaactcttggaggtcccagagtgcagccaatgcctttgtgtggtagttctaaattttaattgcacctgaaaaacctgggcacctaagcaatgagccacagcaaaaagtaaagaacaacaacaaaataaagctgttgttaaattttaaacaatattactaattgcccaaaatgtcaatttgatgtagttcttttcatgcaagtataaattcaattgttagttataattgttggacctccttgagatagtaacaacaaaataaagcaagctatctgcacctcaaaa

SEQ ID NO: 5011 - DNA, 82603 bp, Homo sapiens
gagcagtcgtgcattcccagcctcgcctcgggtgtagggattgcatagaaaagcaaaactacacagtcttgactgtgtagttttgtttttaggattagaggctcaccgattcatgtcggagatggtcagaaaaaccaactctccataggacgtcgtttcagaagcaaccttgggcttagtcccaccctttttaggcactcttgagaaatcagagtgcctagaaagatgacaactcaagcaccgacgtttacgcagccgttacaaagcgttgtggtactggagggtagtaccgcaacctttgaggctcacattagtggttttccagttcctgaggtgagctggtttagggatggccaggtgatttccacttccactctgcccggcgtgcagatctcctttagcgatggccgcgctaaactgacgatccccgccgtgactaaagccaacagtggacgatattccctgaaagccaccaatggatctggacaagcgactagtactgctgagcttctcgtgaaagctgagacagcaccacccaacttcgttcaacgactgcagagcatgaccgtgagacaaggaagccaagtgagactccaagtgagagtgactggaatccctacacctgtggtgaagttctaccgggatggagccgaaatccagagctcccttgatttccaaatttcacaagaaggcgacctctacagcttactgattgcagaagcataccctgaggactcagggacctattcagtaaatgccaccaatagcgttggaagagctacttcgactgctgaattactggttcaaggtgaagaagaagtacctgctaaaaagacaaagacaattgtttcgactgctcagatctcagaatcaagacaaacccgaattgaaaagaagattgaagcccactttgatgccagatcaattgcaacagttgagatggtcatagatggtgccgctgggcaacagctgccacataaaacacctcccaggattcctccgaagccaaagtcaagatccccaacaccaccgtctattgctgccaaagcacagctggctcggcagcagtccccatcgcccataagacactccccttccccggtcagacacgtgcgggcaccgaccccatctccggtcaggtccgtgtctccagcagcaagaatctccacatcccccatcaggtctgttaggtctccattgctcatgcgtaagactcaggcatccaccgtggccacaggtcctgaagtgcctcccccttggaagcaagagggctacgtggcctcctcatctgaggctgagatgagagagacaacgctgacaacctctactcagatcaggacagaagagagatgggaagggagatacggtgtccaggagcaagtgaccatcagtggtgctgcgggtgctgccgccagtgtgtcggccagtgctagctacgcagcagaggctgttgccactggtgctaaagaggtgaaacaagatgctgacaaaagtgcagctgttgcgactgttgttgctgccgttgatatggccagagtgagagaaccagtgatcagcgctgtagagcagactgctcagaggacaaccacgactgctgtgcacatccaacctgctcaagaacaggtaagaaaggaagcggagaagactgctgtaactaaggtagtagtggccgccgataaagccaaggaacaagaattaaaatcaagaaccaaagaagtaattaccacaaagcaagagcagatgcacgtaactcatgagcagataagaaaagaaactgaaaaaacatttgtaccaaaggtagtaatttccgcagctaaagccaaagaacaagaaactagaatttctgaagaaattactaagaaacagaaacaagtaactcaagaagcaataatgaaggaaactaggaaaacagttgtacctaaagtcatagttgccacacccaaagtcaaagaacaagatttagtatcaagaggtagagaaggcattactaccaaaagagaacaagtgcaaataactcaggagaagatgagaaaggaagccgagaaaactgccttgtctacaatagcagttgctactgctaaagccaaagaacaagaaacaatactgagaactagagaaactatggctactagacaagaacaaatccaagttacccatggaaaggtggacgttggaaaaaaggctgaagctgtagcaacagttgttgctgcagtagaccaggcccgagtcagagagcccagagagcctgggcatcttgaagaatcctatgctcagcagaccactttggagtacggatataaggaacgcatttccgccgcaaaggtagctgagcctccccaacgtccagcctcagaaccccacgttgtccctaaagcagtcaagcctagagtaatccaggctccttctgagactcatatcaaaactactgatcaaaagggaatgcacatatcatcacagatcaagaaaactacagatctaacaacggaaagattagtccatgtggataaacgcccccgcacagctagccctcactttactgtttcaaaaatttctgttcctaagacagaacatggatatgaggcatcaatagccggtagtgctattgccacattacaaaaagagttgtcagccacatcttctgctcagaagatcaccaaatcggtgaaggctcctactgtgaagcccagtgagactagagtaagggcagagcccacacccttgccacagttccccttcgctgacacaccagatacttacaagagtgaagctggcgttgaggtgaaaaaggaagtaggggtgagcatcactggcaccaccgtccgtgaagagcgctttgaagtactgcacggacgcgaagccaaggtaacagaaacagcaagagtaccagcacctgttgaaattcctgttactccaccaactttggtctcgggcttaaaaaatgtgactgtcatagaaggtgaatctgtcaccttggagtgccacatctctggatacccatccccgacagtgacatggtacagggaagactaccaaatcgaaagttccattgacttccagataaccttccagagtggaattgctcgtcttatgattcgcgaagcatttgcggaagacagcgggcgatttacttgcagtgctgtaaatgaggctggaaccgtcagcacatcctgctatctggctgtgcaggtgtcagaagaatttgaaaaggaaaccacagccgtgactgagaaatttactacagaagagaaacgctttgttgagtcaagagatgtggttatgactgatactagcctcacagaggaacaagcagggcctggagaacctgccgcgccttactttattacaaaaccagtggtccagaaactggtggaaggtgggagcgtggtgtttggatgccaagttggcggcaacccaaagccccatgtatactggaaaaaatctggtgttcctctaaccactggatacagatacaaagtgagttacaacaaacaaaccggtgaatgcaagctggtgatttctatgacttttgctgatgatgctggagaatacactattgttgttcgcaataagcatggagaaacttctgcatctgcttccttgcttgaagaagctgattatgagttactgatgaagtcccagcaagaaatgctttatcagacacaagtgactgcatttgttcaagaacctaaagttggagaaacagcacctggatttgtatactctgagtatgaaaaagagtatgaaaaagaacaagccttaattaggaagaaaatggccaaagatactgtagtggtcagaacttatgtagaagatcaggaattccatatttcttcctttgaagagagacttattaaagaaattgaatatagaataataaagactacattagaagaacttcttgaagaagatggagaagaaaagatggcagttgacatttctgaatctgaagctgttgaatcaggatttgattcaagaatcaagaattatagaattcttgaggggatgggtgtcacttttcattgcaagatgtctggatatccattaccaaagattgcttggtacaaagatggcaagcgcatcaaacatggagaaagataccaaatggactttctacaagatggcagagctagtctgcgtatacctgttgttcttccagaagatgaaggaatctacactgcatttgccagcaatattaaaggaaatgcaatttgctcagggaaattgtatgtggagcctgctgcaccacttggagctccgacttacattcccacactagagccagtgagcagaatcagatctctctctccacgttcagtgagcaggtctcctatacgcatgtctcctgcacggatgtcacctgcaaggatgtctcctgcacggatgtcccctgcaagaatgtcccctggacgtaggctggaggagacagatgagtcacaacttgagagactatataaaccagtctttgtgttaaaacctgtttctttcaaatgtttagaagggcaaactgccagatttgacttaaaggttgttggtagacctatgccagagacgttctggtttcatgatggccagcaaattgtcaatgactatacccataaagtagtcattaaagaagatggtactcaatcactaattattgtccctgccacacccagtgattctggggaatggactgtggttgcccaaaacagggcaggcagatcttcaatttcagtgattttaactgtggaagctgtggaacatcaggtaaaaccgatgtttgtagaaaaactgaaaaatgtcaatataaaggaaggttcccgacttgaaatgaaagtcagagctacgggtaaccccaaccctgacattgtatggttgaaaaacagtgacatcattgtgcctcataaatatcccaaaatcagaattgaaggaaccaagggagaagctgcccttaaaatcgattccactgtcagccaagattctgcctggtatactgcgactgctattaataaagctggcagagacactacaagatgcaaagtaaatgttgaagttgagtttgcagagcctgagccagagagaaagttaatcatcccacgggggacatatagagcaaaggagattgcagccccagaactggagcccctccatttgcgatatggccaagagcaatgggaagaaggtgatctctatgacaaagagaaacaacagaaaccatttttcaagaaaaaactcacttccttaagacttaagcgctttgggcctgcccactttgaatgcaggctaacacccattggtgacccaacgatggtggtggagtggctccatgatggaaagccacttgaagcagccaacaggctccgtatgatcaatgaatttgggtactgcagccttgattatggcgttgcatattctagagacagtggtatcattacttgcagagccactaacaaatatggaacagatcacacatctgctacccttattgttaaagatgagaaaagtcttgtggaagaatcccaattgcctgaggggaggaaaggcttacagagaattgaagaattagagagaatggctcatgaaggtgcacttacaggtgtaacaacagatcagaaagaaaagcaaaagccagacattgtcttgtacccagagccagttagagtacttgaaggggagactgcaaggttccgctgcagggtaacaggctaccctcagcccaaagtcaactggtacctcaatggacagctcatccgcaaaagcaaaaggttcagagttcgctatgatggtatccattacctggacatcgtggactgcaaatcatatgacacaggtgaagtgaaggtcaccgcggaaaatcctgaaggtgtgatagagcataaagtgaagcttgagattcaacagagggaagattttaggtctgtccttaggagagctcctgaaccaaggcctgagtttcacgtacatgaaccaggaaagcttcagtttgaagtacaaaaagtggatagacctgttgacaccactgaaaccaaagaagttgtgaagttgaaaagggctgaaagaattacccatgaaaaagtgcctgaagagtcggaagagctgcgcagtaaattcaagcgcagaacagaagagggctattatgaagccattaccgctgtggagctcaagtctcgaaagaaggatgaatcctatgaggaactcctcaggaagacaaaagatgaacttctccactggaccaaagagttaactgaagaggaaaagaaagctcttgccgaagaaggcaaaatcacgattccaacttttaaacctgacaagattgaactaagtcctagtatggaggctccaaaaatcttcgaaagaatccagagccaaacagtgggccaaggatctgatgcacacttccgggtcagagtcgtggggaaaccagaccccgaatgtgaatggtacaaaaatggtgtcaaaattgaacggtctgaccggatctactggtactggcccgaagacaatgtttgtgaattggtcataagagatgtgactgctgaggactctgccagcatcatggtaaaagccatcaacatagctggagaaacctccagtcacgcattcttacttgtccaagccaagcaattgatcactttcacacaggaattacaagatgttgttgctaaggaaaaagacactatggcaacctttgaatgtgaaacttcagaaccatttgtcaaagtgaaatggtataaagatggtatggaggttcatgagggagataaatacaggatgcactctgacagaaaggttcacttcctctccatactgaccattgatacgtctgatgctgaagattacagctgtgtacttgtggaagatgaaaatgtcaaaacgactgctaaacttattgttgaaggtgcagttgttgagtttgtgaaagaacttcaggacatagaagttccagaatcatattcaggagaattagagtgcattgtatccccagaaaatatagaaggaaaatggtatcataatgatgtggagcttaaatccaatggcaaatatacaattacatctcgtcgtggacgtcagaacctcacggtcaaggatgtaaccaaggaggaccagggagaatacagctttgtcatcgacgggaaaaagacaacctgtaaattaaagatgaaaccccgccccattgctatcctacaaggacttagtgaccaaaaagtctgtgagggtgacattgttcagcttgaagttaaagtctccttggaaagtgtggaaggcgtctggatgaaagacggccaagaagtgcagcccagtgacagggttcacattgtgatagacaaacaatctcatatgctgctcattgaagacatgactaaggaagatgctggaaattactctttcaccattccagcccttggcctctccaccagtgggcgtgtctctgtctatagtgtggacgtgataacacctctaaaagatgttaatgtgattgaaggcaccaaggctgtgcttgaatgtaaggtgtcagtccctgatgtgacttctgttaagtggtacttaaatgatgaacaaatcaagcctgatgaccgtgtacaggccattgtgaaaggtactaaacagcgactagtcattaaccgaactcatgcttcagacgaaggaccttacaagctgatagttggcagagttgaaaccaactgtaatctctctgtagaaaaaattaaaattatcagaggtcttcgtgaccttacctgtacagaaactcaaaatgtggtgtttgaggttgagctgtcccactctggaattgatgtcctgtggaattttaaggacaaggaaatcaagcccagttctaaatataaaattgaagcacatggaaaaatatataaattgacagttctaaatatgatgaaagatgatgaaggaaaatacacattttacgcgggagaaaatatgacatctggaaaacttactgtggcaggtggggccatctccaagccactcacagatcagaccgtagctgaatcccaggaagctgtgtttgaatgtgaagttgccaacccagattccaaaggcgaatggttgagggatggcaaacacctaccactgactaacaacatcagaagtgagtctgatggccacaaaaggagacttatcattgctgccaccaaattagatgacattggagaatatacctacaaggtggccacctccaaaacatctgccaaactcaaagttgaagctgtcaaaattaagaagactctgaagaacctcacagtgacagaaacacaggatgctgttttcactgtcgagcttacacaccctaatgtcaaaggtgtccagtggatcaaaaatggagttgtgctggaatccaatgaaaagtatgctatctctgtcaaaggaacaatttactctctgaggattaaaaactgtgccatcgtggatgagtctgtttatggcttcaggcttggaaggcttggagccagtgccagactgcacgtggagactgtcaagatcattaaaaagccaaaggatgtgacagccttggaaaatgccactgttgcctttgaagttagtgtttcccatgacactgttccagtaaaatggttccataagagtgtggaaattaagccaagtgacaaacacagactggtctcagaaaggaaagtccacaagctgatgctgcagaacatctccccctcagatgctggggaatacacagctgtggtcgggcaattggaatgcaaagcaaaactgtttgtggagacattacatattacaaaaaccatgaaaaatatcgaggtgcctgagaccaaaactgcctcttttgagtgtgaggtgtcccacttcaatgtcccttccatgtggctgaagaatggtgtggaaattgagatgagtgaaaagttcaagatagttgtgcagggaaaactccatcagctgatcatcatgaacaccagcacagaggactcggcagaatacacatttgtctgtggcaatgaccaagtcagtgccaccctgacagtcaccccaatcatgattacttccatgctgaaagacatcaacgctgaagaaaaagacactattacttttgaggtgacagtgaactatgaaggcatctcttacaaatggttaaagaatggtgtggaaatcaaatcaactgacaagtgccagatgagaaccaaaaagctcacacactcactgaacatcaggaatgttcactttggggatgctgctgactacacctttgtggctggaaaagcaacatcaacagccacactttatgtggaagctcgtcatatagaatttaggaaacacattaaggacattaaggtactggagaagaagcgagccatgtttgaatgtgaagtttctgaacctgacatcactgtacagtggatgaaagatgaccaggaactgcagatcacagacagaataaagattcagaaggagaaatatgtccaccgccttctgatcccatccacccggatgtctgatgctgggaagtacacagtggtggcaggaggcaacgtgtcaactgcaaaactctttgtagaaggcagagatgttcgcatccgaagtattaaaaaggaggttcaggtcattgagaaacagcgtgctgttgttgaatttgaggtcaatgaagacgatgttgatgcccactggtataaagatggcattgaaatcaatttccaagttcaagaacgacacaaatatgtagtggaaagaagaatccaccgaatgtttatctctgagaccagacagagcgatgcaggagaatacacctttgtggcaggaaggaacaggagttctgtcactctctatgtcaatgctcctgaaccgccccaagttctgcaggagctccagcctgtcactgtgcagtctggcaagcctgcccgcttctgtgccgtgatatccggaagaccacagcccaaaatttcctggtacaaggaagagcagctgctttccactggcttcaagtgcaaatttcttcatgatgggcaagaatacacgcttttgctaattgaagccttcccagaggatgcggcagtctatacctgtgaagccaagaatgactatggtgttgccacaacatcagcttcactctcagtggaagttccagaagttgtgtctcctgatcaggaaatgcctgtttatccacctgccatcatcaccccgcttcaggacactgtcacttctgaagggcagccagcccgttttcaatgccgggtttctggaacagatctaaaagtgtcgtggtacagcaaagacaagaaaatcaagccatctcggttctttagaatgactcaatttgaagacacttatcaactggaaattgccgaagcttatccagaagatgaaggaacttacacgtttgttgctagtaatgctgtaggccaagtatcaagcacagccaacctgagtctggaagtgcaagccctagataggcaaagttctgggaaagatgtaagagagtccgccaagtcccaggcagtggcagattcctctttcacaaaggaggagagcaaaatatctcaaaaggaaattaagtcatttcaaggatcatcatatgaatatgaagtgcaggtttttgaaagtgtatctcaaagttccatccacacagctgcatctgttcaagatacacagttgtgccatactgcatccctttcacaaattgcagaaagcactgagctatctaaggaatgtgctaaagagtccacgggtgaggcgcccaagattttcctgcatcttcaggacgtcactgtaaagtgcggtgacacggctcaattcctctgtgttttaaaagatgattctttcattgatgtaacctggactcacgaaggtgcaaagatagaggaatccgagagactgaaacaatcacaaaatggaaatattcagtttcttaccatatgtaatgttcagctggtagaccaaggactatacagctgcattgtacacaatgactgtggagagaggacaacgtcagcagtactaagtgtagaaggtgctcctgaatcaattttgcatgagaggattgaacaagagattgagatggaaatgaaagagttttctagttcttttctgtctgccgaggaagaaggacttcatagcgccgaacttcaattatctaaaataaatgaaacacttgaacttttgtctgaatctccagtttacccaactaaatttgattccgaaaaggaaggcactggcccaattttcatcaaagaagtgtcaaatgctgatataagcatgggggatgtggctacactgtctgtaactgtcattggcatccccaaacctaaaattcagtggttctttaatggagtgctattaaccccttctgctgactacaaatttgtttttgacggtgatgatcatagcctgatcattctgttcaccaaattggaggatgagggagagtatacatgtatggccagtaatgactatggaaagacaatatgtagtgcctatctaaaaattaattccaaaggagagggtcacaaagacactgaaacagaatcagcagtggcaaaatctctggaaaagctgggaggtccttgtcctcctcacttccttaaggagttaaaaccaattcgctgtgctcaagggcttcctgccatctttgagtacacagtggttggagagcctgcccctactgttacatggttcaaagaaaacaagcagctttgcaccagtgtttattacactatcattcataaccctaatggctctggaactttcattgtcaatgaccctcagagggaagacagtggcctctatatctgtaaagcagagaatatgttgggtgagtccacctgtgcagcagagctgcttgtgcttctggaagacacagacatgactgataccccctgcaaagcaaagtccacaccagaggctcctgaggattttccacagacacccttaaagggtcccgcagttgaagcacttgactcagagcaggaaattgcaacgtttgtaaaagacaccattttgaaagctgctttaattacagaagaaaaccagcaactatcttatgagcatattgctaaagccaatgaattgagcagtcagcttcctttgggagctcaggaattgcaatccattttggagcaagacaagctcactcctgaaagcaccagggaatttctttgcatcaatggcagtattcactttcagcctctcaaggaaccatctcccaacctacagctgcagattgtacagtcccagaaaaccttctccaaagaaggtattctaatgcctgaagagcctgagacacaggcagttctatcagataccgagaaaatcttcccaagtgccatgtccatagaacaaattaattcattaacagttgagcctctgaaaactttattagctgaacctgaagggaattatccacagtcttcaatagaacctccaatgcattcttatctaacctctgtggctgaggaagtactttcaccaaaagaaaagacagtatctgacaccaacagagagcaaagagtgactcttcaaaagcaagaggcacaaagtgcgctcatcttgagtcagagcttagctgagggacacgtggagagtctccagagtcctgatgtcatgatctctcaggtaaactatgagcccctagtcccttcagaacactcatgcacagaaggaggtaaaattttgatagaaagtgcaaatccactggaaaatgcagggcaagattctgcggtcagaattgaggaaggcaagtccttaagatttccactagcacttgaagaaaagcaggtactgctcaaagaagagcattctgacaacgtggtgatgcccccagaccaaatcattgagtctaaaagagagcccgtggcaataaagaaagtgcaggaggtacagggaagggaccttctttctaaggaaagcttgctttctggtattccagaagagcagagattaaacctgaaaattcaaatctgccgggctttgcaagcagccgtggccagcgagcagccaggtcttttctctgagtggctaagaaatattgaaaaggtggaggtcgaggctgtaaacatcacccaagagcccagacacatcatgtgcatgtaccttgttacttcggcaaagtctgtaacagaagaagtaaccatcattattgaagatgttgatcctcaaatggctaacctgaaaatggaacttagggatgctttgtgtgctattatatatgaggaaatagacatcctaacagctgagggtcctagaattcagcaaggagccaaaacaagtttgcaagaagaaatggattctttttcaggttcacagaaggttgaacccattactgaaccagaagttgaatctaaatatctgatctcaactgaagaggtcagttattttaacgtgcaaagtagggttaaatatttggatgccacacctgtcactaaaggggttgcttcagctgttgtctctgacgaaaaacaagatgagagtctgaaaccatcagaggaaaaagaggagtcttcctctgaaagtggtactgaggaggttgctacagtaaagatacaggaagctgagggtggcttaatcaaagaggatggccccatgatacatacacctttagtggacactgtttctgaggaaggtgatattgtacacctcacaacatccataacaaatgctaaagaggtgaattggtattttgagaataaactggtgccttcagatgaaaagttcaagtgtttacaagatcaaaatacatatacgctagtcatcgacaaagtaaataccgaagaccatcaaggagagtatgtctgtgaggccttgaatgacagcggaaaaacagcaacttcagccaaactcactgtagtaaaaagagctgccccagtgatcaagaggaaaatcgaacccctggaagtagcactgggccacctagccaaattcacctgtgagatccaaagtgctcccaatgtccggttccagtggtttaaagctggccgagaaatttatgagagtgacaagtgttctattcgatcttcaaagtatatctccagccttgaaatcctgagaacccaggtggttgactgcggcgagtatacatgcaaagcttccaatgagtatggcagtgtcagctgtacagccacactaactgtgacagtgcctggaggtgaaaagaaagttcgcaaattacttccggaacgtaaacctgaaccaaaggaagaagttgttctgaaaagcgttctaagaaaaagacctgaagaagaagaacctaaagtagaacctaaaaaactagaaaaagttaaaaaacctgcagtaccagaaccaccacctccaaaacctgttgaagaggttgaagtacctactgttacaaaaagggaaaggaagattcctgaaccaacaaaagtgcctgaaatcaagccagcaatacctctccctgcacctgaaccgaaaccaaagcccgaagcagaagtgaaaacaatcaaaccacctcctgtggaacctgaaccaacccccatcgctgccccagtaacagtgccagtggttggaaagaaagcagaagccaaagcacctaaggaagaggctgccaagccaaaaggtcctatcaaaggtgtacccaaaaagactccttcaccaatagaagccgaaaggagaaagttaaggccaggaagtggtggagagaaacctcctgatgaagccccgttcacctaccagctaaaggctgtgccactgaagtttgtgaaagaaatcaaagacatcatcttgacagaatcagagttcgttggctcttcagcaatctttgaatgtttggtctccccttccactgcaattacaacctggatgaaagacggtagcaatatccgtgagagtcccaagcacaggtttattgcagatggtaaagacagaaagctgcacatcattgatgttcaactttccgatgctggtgaatacacctgtgttttacgtttgggaaacaaagaaaagacctccacggctaaacttgttgtagaagaacttcctgtgcgttttgtaaaaacactggaagaggaagtcacagtggtcaaaggacagccattgtacttgagctgcgagttaaacaaagagcgtgacgtggtctggaggaaggatggcaagattgtggtggagaaacctggccgaattgtgccaggcgtcattggcttgatgcgggctctgaccatcaacgatgcagatgacacagatgctggaacatacacagttactgtggaaaacgccaacaacctggagtgttcatcttgcgtaaaagtagtagaagtcattagagattggctggtgaaacctatacgagaccagcatgtgaaacccaaggggacagctatttttgcctgtgatatagcaaaagatactccaaacattaagtggttcaaaggatatgatgaaatccctgcggaaccaaatgataagactgaaatactgagagatggaaatcatctgtacctcaaaattaagaatgctatgccagaagatattgctgagtatgcagtggaaattgaaggaaaaagataccctgcaaagctgacacttggagagcgtgaagttgaactgcttaaaccaatagaggacgttaccatttatgagaaagaaagtgcaagctttgatgcagaaatctcagaggcagacattcctggacaatggaaactgaaaggagaacttctaaggccctcacctacttgtgaaatcaaagcagaaggtggaaaacgcttcttaactttgcacaaagtcaaactggaccaagctggtgaagtcctctaccaggcccttaatgcaattacaactgccattttgacagtaaaagaaatcgaacttgactttgctgtgcccctgaaggatgtcactgttccagaaaggcgacaggctcgattcgaatgtgtcctcacccgagaggcaaatgttatatggtccaaaggacctgatataattaagtcatctgacaaatttgatatcatcgctgatggaaagaaacatattcttgttattaatgattctcaatttgatgatgaaggggtctatactgctgaggtggagggcaagaagacctcagctcggttgtttgtcacaggtataagactgaaattcatgtcacctcttgaagatcaaacagtaaaagaaggtgaaacagcaacttttgtttgtgaactttctcatgaaaaaatgcatgtagtctggttcaaaaatgatgccaaactccatacaagcagaacagtactcatctcttctgagggcaagactcacaaattggaaatgaaagaagtgacattggatgatatatctcagataaaagctcaagtcaaggagctgagctccacagcacagctgaaggtcttagaggccgatccctacttcactgtgaaattacatgacaaaactgcagtggagaaggatgagattactttgaagtgtgaagtgagcaaagatgtaccagtgaaatggttcaaagatggtgaagagattgtcccttcacccaaatattctatcaaggcagatggcctgcgccgcatcttaaaaatcaaaaaggcggaccttaaagataaaggcgaatatgtgtgtgactgtggcacagacaagaccaaggcaaatgttactgttgaggctcgactaataaaagtggaaaagcctctgtacggagtagaggtgtttgttggtgaaacagcccactttgaaattgaactttctgaacctgatgttcacggccagtggaagctgaaaggacagcctttgacagcttcccctgactgtgaaatcattgaggatggaaagaagcatattctgatccttcataactgtcagctgggtatgacaggagaggtttccttccaggctgctaatgccaaatctgcagccaatctgaaagtgaaagaattgcctcttatcttcatcacacctctcagtgatgttaaagtcttcgagaaagatgaggctaagtttgagtgtgaagtatccagggagcccaaaacattccgttggctaaaaggaacccaggaaatcacaggtgatgacagatttgagcttataaaggatggcactaagcattcaatggtgatcaagtcagctgcttttgaagatgaagcaaaatacatgtttgaagctgaagataagcacacaagtggcaaactgatcattgaaggaatccggctcaaattcctcacccctctcaaagatgtaactgccaaagagaaggaaagtgctgtatttactgtggagttatctcatgataacatccgagttaaatggttcaagaatgaccagcgcctacacaccaccaggtcggtctcaatgcaagacgaagggaaaactcattcgatcacattcaaagacctgtctattgatgacacctcccaaattagagtagaagctatggggatgagttcagaagctaaactcactgtgcttgagggagacccatattttacaggaaaacttcaagattatactggtgtagagaaagatgaagttattctacagtgtgaaattagcaaagcagatgcaccagtgaaatggtttaaggatgggaaggaaataaagccatccaaaaatgctgttattaaggcagatggcaagaaacgcatgctaatcctaaagaaagccttgaaatcagatattggacagtacacctgtgactgtgggacagataagacctcaggaaaacttgacattgaggatcgggaaattaaactggtgcgacccctgcacagtgtggaggtgatggagactgagacagcacgctttgaaaccgaaatctctgaagatgatatccacgccaactggaaactcaagggagaggccctactccaaacacctgattgtgaaattaaggaagaaggcaaaatacactcccttgttttgcacaactgtcgcctggaccagacgggtggggtggatttccaagctgccaatgttaaatctagtgcccacctccgagttaagccacgagtaattggtcttctgaggcctttaaaggatgtcaccgtgactgcaggggaaacagccaccttcgactgcgagctctcctacgaagatatcccagtggaatggtatctcaaagggaagaaactagagcccagcgataaggtggtcccacgttcagaaggaaaagttcatacacttactctgagggatgtaaagttagaagatgctggggaagtccaactaacagcaaaagatttcaaaactcacgccaacctctttgtgaaagaacccccagttgaattcactaagcctcttgaggaccagacggtcgaagagggagccactgcagtgctggagtgtgaagtctccagagaaaatgctaaggtgaaatggttcaaaaatgggacagaaatcctcaaaagcaagaagtatgaaattgttgctgatggcagggtcagaaaacttgttatacatgactgtaccccagaggatattaaaacatacacttgtgatgctaaggattttaagacttcctgtaacctgaatgtcgtgcctcctcatgtggaattcttaagaccactcaccgaccttcaagttagagaaaaagaaatggctcgatttgagtgtgaactttcccgagaaaatgctaaggttaagtggtttaaagatggtgctgaaattaaaaagggcaaaaaatatgacatcatatccaagggagcagtgcgcattcttgtcatcaacaaatgtctactggatgatgaagctgaatattcctgtgaagtaaggacagcgagaacttctggcatgctgacagttctggaagaagaagctgtctttaccaaaaatcttgccaacattgaagttagtgaaacagacactataaaactggtttgtgaagtctccaaacctggcgcagaagtgatttggtataaaggggatgaggagatcattgaaacaggaagatatgaaatactgactgaaggacggaagagaatcctggtcattcagaacgctcaccttgaggatgctggcaactacaactgtcgactcccaagctctcgaaccgatggcaaagtcaaagtacatgaactggctgctgaatttatctcaaagcctcaaaaccttgaaatacttgaaggagaaaaggctgaatttgtctgctctatatcaaaagaaagctttccagtccagtggaagagggatgataagacacttgaatctggagataaatatgacgttattgctgatggtaaaaagagggtcctagttgtgaaagatgccacattacaagatatgggcacttacgttgtcatggtaggggccgccagagcagcagctcacttgacagtcattgaaaaactcaggatcgtagttcctcttaaggacacccgggtgaaggaacaacaggaagttgtcttcaactgtgaagtcaatactgaaggtgccaaagccaaatggttcagaaatgaagaagctatatttgatagttcaaaatacatcattctccaaaaagacctagtctacaccctcagaattagagatgcacacttagatgaccaagccaactataatgtgtctttgaccaatcacagaggtgaaaatgttaaaagtgcagccaatctaatagtagaagaggaagaccttaggattgttgagcctcttaaagatattgaaacaatggagaagaaatctgtcacattctggtgcaaggtgaatcgtctcaatgtaacactgaagtggaccaaaaatggtgaagaagtgccttttgacaaccgtgtctcatacagagttgataagtacaagcacatgttaaccattaaagactgtggcttcccagatgaaggtgaatacattgtcactgctggacaagataaatctgttgctgagcttctcatcatagaagccccgacagaatttgtggaacacttggaagatcagacagtcactgagttcgatgacgctgtcttctcctgccagctctccagagagaaagccaatgtaaaatggtacagaaatgggagagaaatcaaagaaggcaaaaaatacaaatttgaaaaagatggaagtatacacagactcattataaaagattgcaggctggatgatgagtgtgaatatgcttgcggggtagaagacaggaagtctcgtgctagactttttgtggaagaaattcctgttgagatcatcaggcctccacaagatattcttgaagcccctggtgctgatgttgtctttttagcagaactcaataaagataaggtggaagtccaatggctaagaaataacatggttgttgtccagggtgataaacaccagatgatgagtgaaggaaagatacatcgactacagatttgtgatattaagccccgtgaccagggtgaatacagatttattgccaaagacaaagaagccagagctaagcttgaactggcagctgcaccaaaaatcaagacagctgaccaagaccttgtggttgatgttggcaagcctctgacaatggtggtgccatatgatgcctaccccaaagcagaagctgaatggtttaaagaaaatgaacctttatctacaaaaaccattgatactacggctgaacaaacttctttcagaattttagaagccaagaaaggagacaaagggaggtataaaattgtgcttcagaacaaacatggaaaagcagaaggattcatcaatttaaaagttattgatgttcctgggccagtacgtaacttagaagtgacagaaacatttgatggtgaagtgagccttgcttgggaagaacctttaactgatggtggaagcaaaatcataggttacgttgttgaaagacgtgacattaagagaaagacctgggttctggccacagaccgtgcagagagttgtgagtttactgtcactggtctacagaaaggaggagttgagtacctattccgtgtgagtgcaagaaacagagttggcactggtgagccagtagaaactgacaatcctgtagaagcaaggagtaaatatgatgttccaggccctcctttgaatgtaaccatcactgatgtgaatcgatttggtgtctcactgacatgggaaccaccagagtatgatggaggtgctgagatcacaaactacgtcattgaattaagagacaagacttctatcaggtgggatactgccatgactgtgagagctgaagacctgtctgcaactgttactgatgtggtagaaggacaggagtacagtttccgagtgagagcccaaaatcgaattggagttggaaaaccaagtgcagccacacccttcgtcaaagttgctgatccaattgagagaccaagtcctcctgtaaacctaacttcctcagatcagactcagtcatcagttcagctcaaatgggaacctcctctgaaagatggaggaagcccaatattaggctatataattgagcgatgcgaagaaggaaaagataattggattcgttgcaatatgaaacttgtccctgaactgacttacaaggttaccggattggaaaaaggaaataaatatttatatagagtatctgcagaaaataaagctggtgtttcagatccatctgaaattcttggtcctctcaccgctgacgatgcatttgttgaaccaacaatggatttaagtgcatttaaagatggtctggaagttattgtcccaaatcctatcacgatcctggttccaagtacaggctatccaaggccaactgcaacctggtgttttggagataaagtactagaaacaggggaccgggtgaaaatgaagaccttgtctgcctatgccgaacttgtcatttctccaagtgaacgttcagacaagggcatttatacactgaaattagaaaaccgtgtgaaaacaatttctggggaaattgatgtcaatgtaattgctcgcccaagtgcacccaaagaattgaaatttggtgatataaccaaggactcagtacatttgacttgggaaccacctgatgatgatggaggaagtccgttaactggatacgttgttgaaaaacgagaagtcagccggaaaacatggactaaagttatggactttgtgactgatctagaattcacagttcctgatcttgttcaaggaaaagagtacttatttaaagtttgtgctcgtaacaaatgtggccctggagaacctgcatatgttgatgaacctgtaaatatgtcaactcctgcaacggtacctgacccaccagagaatgttaaatggagagatcgaacagccaatagcatcttcttaacatgggatccacctaaaaatgatggtggttcacgcatcaaaggatatatagttgaaagatgtccacgtggttctgataaatgggttgcctgtggagaacctgttgcagaaacaaaaatggaagtgacaggtcttgaggaaggcaaatggtatgcctaccgcgtgaaggccttaaacaggcagggtgctagcaaaccaagcagacccacagaggaaatccaggctgtggacacacaagaggccccagaaatcttcctcgatgtgaagctccttgctggtctcactgtaaaagctgggaccaagattgaacttcctgccaccgtaaccggaaaacctgaacctaaaataacttggacaaaggctgatatgattctgaagcaggacaaaagaattaccattgaaaatgtccctaagaaatccacagtgactattgttgatagtaagagaagtgacactggcacatatatcattgaggctgtgaatgtgtgtggccgggccactgctgtggtggaagtgaacgtcttagataaacccggaccaccagctgcctttgacatcacagatgtaaccaatgagtcatgtcttctaacatggaacccaccacgcgatgatggtggatctaagatcacaaactatgttgtggagagacgagcaactgatagtgaagtgtggcacaagctctcatccaccgtcaaggatacaaacttcaaggccaccaaattaatccccaataaagagtacatcttcagagttgctgcagaaaacatgtatggtgttggtgaaccagttcaggcctctccaataacagccaaatatcagtttgatccacctggtcctccaactcgcctagaaccttctgatatcactaaagacgcagtgactctcacatggtgtgagccagatgatgatggtggcagcccaatcacaggatactgggttgaaagactggatcctgatacagataaatgggttagatgcaataagatgccagtaaaggacacaacatacagagtgaaaggtctcactaataagaaaaaatacagattccgtgtgttggctgaaaatcttgctggacctggaaaaccaagcaaatcaactgaaccaatcttaataaaggatcccatagatcctccatggccccctggaaaaccaactgtaaaagatgtaggcaaaacatcagtaaggttgaattggacaaaaccagaacatgatggaggtgcaaagattgagtcttatgtcattgaaatgctgaagactggaacagatgagtgggtcagagtggcggaaggggttcccaccactcagcacttgctcccagggctcatggaaggacaggaatactcattccgagttagagctgtgaataaggctggggaaagtgaacccagtgaacccagtgaccctgtgctttgccgggagaagctatatcctccatcaccaccacgctggcttgaagttattaatatcacaaaaaatacagcagacctaaaatggacagttcctgagaaagatggagggtcccccatcaccaactacattgtggaaaagagagacgtcaggcgaaaaggctggcaaacagtggataccactgtcaaggacaccaagtgcacagtcaccccactgactgagggctctttatatgtgttccgagttgctgcagaaaatgctataggacaaagcgactacaccgaaattgaggactctgtgctggccaaagacacctttaccactcctggaccaccctacgccctggcagtggttgatgtgacaaaacgacatgttgacctaaagtgggagccacctaaaaatgatggtggaagaccaatacagagatatgtcattgagaagaaagaaaggttaggtacccgttgggtgaaagctggaaagactgcaggacctgactgtaacttcagagtaactgatgtcatcgaaggaacagaggtccagtttcaggttcgggctgaaaatgaagctggagttggccacccaagtgaacccacagaaatcctatccattgaagatccaacaagtcctccctcaccaccccttgacctacatgtgactgatgctgggagaaaacacattgccattgcttggaagcctccagagaaaaatggtggaagtcctatcataggataccatgttgaaatgtgtccagtaggcactgagaaatggatgagagttaattctcgcccaataaaggacttgaaattcaaggttgaagaaggtgttgttcctgacaaagaatatgtcctgagagtgagagcagtcaatgctattggtgtcagcgagccatctgaaatctctgaaaatgtggttgccaaagacccagactgcaagccaacaattgacctggagactcatgacattattgttattgaaggtgaaaagttaagcattcctgttcccttcagagctgtcccagttccaactgttagttggcataaagatggcaaagaagttaaagcaagtgatagattaacaatgaagaatgatcacatctctgcacaccttgaagttcccaagagtgtccgtgcagatgccggaatttataccattacactggagaataagctcggctcagcaacagcctcaatcaatgtcaaagtcataggcctacctggaccatgcaaagatattaaagcaagtgacattaccaagagttcttgtaagttaacttgggaacctccagaatttgatggtggaaccccaattcttcattatgtcctggagcgcagagaagctgggaggagaacatatataccagtcatgtctggtgagaacaaactgtcatggactgtgaaggatctcataccaaatggtgaatacttcttccgtgttaaagcagtcaacaaggttggtggaggagaatatattgaactgaaaaatccagtcattgctcaagatccaaagcaaccccctgatccacctgtagatgtagaggttcataatcctacagcggaggcaatgactattacatggaagccacctttgtatgatggagggagcaagataatgggctacatcatagagaagattgctaagggtgaagaaaggtggaagagatgcaatgaacacctggtaccaatcctgacctatacagcaaaaggacttgaagaggggaaagagtaccaattccgtgtgcgagcagagaacgccgcgggtattagtgaaccttctcgggctactcctccaaccaaagctgtagatcccattgatgcccccaaagtcattctgagaacaagcctagaagtgaaacgaggtgatgaaatagcacttgatgcaagtatttctggatcaccttacccaactattacatggataaaggatgaaaatgttattgtaccagaggaaattaagaagcgtgcagcacccttggttaggagaaggaagggtgaagttcaagaagaagaaccatttgtcctgcctctgacacagcgtttgagtattgacaacagcaaaaagggagaatctcagctacgcgtccgagattctctccgacctgaccatggtctgtatatgatcaaagttgaaaatgaccacggtattgcaaaagctccttgtactgtcagtgtgttagatacaccgggaccaccaatcaactttgtatttgaagatatcagaaagacctcagtcctttgtaaatgggaaccaccccttgatgatggtggcagtgaaatcataaactacactttggaaaagaaagacaagacaaaacccgactcagaatggattgttgtcacttcaacacttagacattgcaaatattcagtaacaaaactgattgaaggaaaagagtacctcttccgtgtaagagctgaaaacagatttgggccaggtccaccatgtgtttcaaagccacttgtggctaaagatccatttggaccacctgatgcaccagataagcccattgtggaagatgttaccagcaacagtatgctagtgaaatggaatgaaccaaaagataatggaagccccattttgggttactggcttgaaaaacgtgaagttaacagtacacattggtctcgtgtcaacaaaagccttctgaatgccttgaaagccaatgtagatggcttattagaaggactcacctatgtcttcagagtatgtgctgaaaatgcagctggacctggaaagttcagtccaccttcagatcccaaaacagcacatgatccaatctctcctcctgggccacctatcccaagagtcactgacacaagctctacaactattgaactagaatgggaacccccagctttcaatggtggtggggaaattgttggctattttgttgataagcagttggttggcacaaatgaatggtcacgctgcacagagaagatgatcaaggtccgtcagtacaccgtcaaagaaatccgagagggtgctgattacaaacttcgggtgagtgctgtcaatgccgcaggggaaggaccgcctggagaaacacaacctgttactgtggctgaaccacaagagcctccagctgtggaactggatgtttctgtcaagggtggaatacaaataatggctgggaagactcttagaattccagctgtggtgactggtcgccctgtacctacaaaagtatggaccaaagaagaaggggagctggataaagaccgtgttgtaatagacaacgttggaaccaaatctgaactaattatcaaggatgcactgcgaaaagaccatggcagatatgtgattacagctacaaatagctgtggttccaaatttgcagcagccagggtagaagtttttgatgtccctggtccagttcttgacttaaaacctgttgtaacaaacagaaaaatgtgtctacttaactggtctgatccagaagatgatggaggaagtgaaataacaggctttatcattgaaagaaaagatgccaagatgcatacttggagacaaccaatagagactgagagatctaaatgtgacatcacaggtctgcttgagggacaagaatataagttccgtgttattgccaagaacaagtttggctgtggccctcctgttgaaataggaccaattcttgcagttgatccactaggtcctccaacatctccagagaggctcacatacactgaaaggacaaagtccactatcacacttgactggaaagagccccgcagtaatggtggcagtcccatccaaggatatatcattgaaaaacggcgtcatgacaaacctgactttgaaagagttaacaagcgactctgcccaaccacatcttttctggttgaaaatcttgatgaacaccaaatgtatgagttccgtgtcaaagctgtcaatgaaattggtgaaagtgaaccatccctacctcttaatgtagtcatacaagatgatgaagtgcctccaactattaagttgcgtctgagtgttcgaggagacactatcaaagttaaggcaggagagcctgtccacatccctgcagatgtgacaggccttccaatgcctaagattgaatggtccaaaaatgaaactgtaattgaaaaacccactgatgcacttcagataaccaaggaagaggtatcccgaagtgaggcaaaaactgagcttagcattcccaaagcggtccgggaggacaaaggcacttacacagttactgcttccaatcgccttggctcagtgttccgaaatgttcacgttgaagtatatgaccgcccatccccaccaagaaatcttgctgttactgacattaaagctgaatcttgctacttgacatgggatgcccctcttgataatggtggcagtgaaatcacccattatgttattgacaaacgtgatgcaagtaggaagaaagcagaatgggaggaagtcaccaacactgctgtagagaaaagatatgggatctggaaacttatccccaatggtcagtatgagttccgagtcagggcagtgaataaatatggaatcagtgatgagtgcaaatcagataaagtagtcattcaagatccttatcgccttcctggacctccaggaaaaccaaaagttttggcacgcaccaaaggatcaatgctagtgagctggactcctcctttggacaatggtggctctccaattactggctactggctggagaaaagagaagagggaagtccttattggtcacgtgttagccgagcaccaataaccaaagtgggattgaaaggcgtggaatttaatgttcctcgtttgcttgaaggcgttaaataccagttcagagccatggcaataaatgctgcaggaattggtcctcccagtgaaccatcagatccagaggttgcaggagatcccatatttccaccggggccaccttcttgcccagaagttaaagataaaacgaagtcaagcatctcactaggatggaaacctccagccaaagatggtggcagcccaatcaaaggatacattgtagaaatgcaagaagaaggtactactgactggaaaagagtaaatgaaccagacaaacttataactacctgtgaatgtgtggtgcctaatctgaaagagctcaggaagtacagattcagagtgaaagctgtcaatgaagctggtgaatctgaaccaagtgatacaactggggagatccctgccactgatattcaagaggaaccagaagttttcattgacattggagcacaggactgtctggtttgtaaagctggctcacagattaggattcctgctgtcatcaagggacgcccaacaccaaaatcatcttgggaatttgatggaaaggcaaagaaagcaatgaaggatggagttcatgacatacccgaagatgcacagctggagactgctgaaaactcctcagtaattattattccggagtgtaaacgatctcatacaggcaaatacagcatcacagccaagaataaagcaggacaaaagactgcaaattgcagagttaaagtcatggatgtaccaggcccacccaaagatctgaaagtcagtgatatcacaaggggtagttgcagactttcatggaagatgccagacgacgatggaggagacaggatcaaaggctatgttattgagaagaggactattgatggaaaagcctggaccaaagtcaatccagactgtggaagcaccacatttgtagtgcctgatctcctctctgaacagcaatatttcttccgtgtgcgagcagaaaaccgttttggtattggcccacctgtggaaaccattcagaggaccactgccagagatccgatatatcctcctgatcctcctattaaactcaagattggcctcatcacaaagaacacagtgcatctgtcatggaaacccccgaagaatgatgggggctcccctgttacccactatattgttgagtgccttgcatgggaccctactgggacaaagaaagaagcctggaggcagtgcaataagcgtgatgtggaagaactgcaatttactgttgaagacctagtagagggtggggaatatgaattccgagtcaaagctgtcaatgctgcaggagtcagcaagccttcagccactgttggccctgtgactgtcaaagaccagacatgcccaccatcaattgatctaaaagaattcatggaggttgaagaaggaaccaatgttaacattgtggccaaaattaaaggtgtgccattcccgacactaacctggtttaaagctcctccaaagaagcctgataacaaagaacctgttctctatgacacccatgtcaacaaactggtggtagatgatacttgcactttagttattccgcagtctcgcaggagtgacactggcttatataccatcacagctgtaaataatctgggaacagcatcaaaggagatgagactgaatgtcctgggtcgtcctggccctccagtgggacccataaaatttgaatctgtttcagcagatcaaatgacactatcttggtttccacctaaagatgatggtgggtctaagattacaaactatgtaattgagaaaagagaagctaacaggaagacatgggtccatgtctccagtgaacctaaggagtgcacgtacacgattcccaaattgctagaaggccatgaatatgtattccgaatcatggcccagaataaatatggcattggagaacctcttgacagtgaacctgaaacagcaagaaacctcttctctgtccctggagcaccagataaaccaacagttagcagcgtgactcgtaactccatgactgtcaactgggaagagccagaatatgatggaggctctcctgtgacagggtactggctggaaatgaaagacaccacttcaaagagatggaagagagttaaccgagatcctatcaaagccatgactttgggtgtttcttataaagtgactggtcttattgaaggttccgactatcaattccgggtatatgcaatcaatgctgctggcgtgggtccagcaagtctgccatcagacccagcgactgctagagatccaattgcccctcctggtcctccatttcccaaagtgacagattggactaaatcatctgcagatctggagtggtctcccccactaaaagatggtggatccaaagtaactggatacatcgttgaatataaagaagaaggaaaagaagaatgggaaaagggtaaagataaagaagtgagaggaacaaagcttgttgtgacaggattaaaggaaggagcattctacaaatttagagttagagcagtcaacattgctggcattggagaacctggagaggtcacagatgtcattgaaatgaaggacagacttgtttcacctgaccttcagctagatgccagtgtcagagatagaattgttgtccatgctggaggggtgatccgaatcattgcctatgtgtctggaaagcctcctccaaccgtcacctggaacatgaatgaaagaaccttacctcaagaagccaccattgagaccacagccattagctcatccatggtcatcaagaactgccagaggagccatcaaggcgtctattctcttcttgccaaaaatgaagccggagaaagaaagaagacaattattgttgatgtattagatgttccaggtcccgttggaacaccattcctagctcacaacctaaccaatgagtcctgcaaactgacatggttttctccagaagatgatggaggctctccaatcaccaattatgtcattgaaaagcgtgaatctgaccgcagagcatggaccccagtgacatatacagttacccgacaaaatgctactgtccagggtctcattcaaggaaaagcctactttttccgaattgcggctgaaaatagtattggcatgggtccatttgttgagacatcagaggcacttgttatcagagagccaataactgtaccagagcgtcctgaagacctggaagtcaaagaagttactaaaaatactgtaactttgacttggaatcctcctaagtatgatggtgggtcagaaattattaactatgtcctagaaagtcggctcattgggactgagaagttccacaaagttacaaatgacaacttgcttagcagaaaatacactgttaaaggcttaaaagaaggtgatacctatgagtaccgtgtcagtgctgtcaacattgttggacaaggcaaaccatcattttgcaccaaaccaattacttgcaaggatgagctggcacccccaacgcttcacctcgacttcagagataagctcacgattcgagttggtgaagcttttgccctcactggccgttactcaggcaaaccaaagcctaaggtttcctggttcaaagatgaagctgatgtgctggaagatgatcgcactcatataaagactacaccagcaacacttgctttagagaagatcaaggccaaacgttcagattccggcaaatactgtgtggttgtggagaacagtacaggctctaggaaaggtttctgtcaagttaatgttgttgaccgtcctggaccaccagtaggaccagttagttttgatgaggtgaccaaagattacatggttatctcttggaagcctcctttagatgatggaggcagtaaaatcaccaattatattattgagaagaaggaagtgggtaaagacgtctggatgccagtgacatctgcaagtgctaaaacaacatgcaaagtttctaaactacttgaaggaaaagattatattttccggatacatgctgaaaatctgtatggaataagtgatcctctggtgtctgattcaatgaaagccaaagatcgtttcagggttcctgatgcacctgatcagccaattgttacagaagttaccaaagactctgcattagtaacctggaataagccacatgatggaggaaaacccatcacaaactacatcctggaaaagagagaaactatgtctaaacgatgggctagagttaccaaagatcctattcatccatacactaaatttagggttcctgatcttctagaaggatgtcagtatgaattccgggtttctgcagaaaatgaaattggtattggagatccaagcccaccatccaaaccagtctttgctaaagatccaattgctaaaccaagtccacctgttaatcctgaagcaatagatacaacatgcaattcagtcgatctaacttggcagccaccacgtcatgatggtgggagcaagattctgggttatattgttgataccagaaagttggagatgaagagtggagaagagccaatcacacccctgagtcatgtcctgaaactaaatataaagtcaccggtcttcgggacggtcaaacctataagtttagagtgttagcagtcaatgcagctggtgaatcagatccagctcatgttccggagccagtcctagtaaaagacaggcttgaaccccctgagttgattcttgatgccaacatggcaagagaacaacacattaaagttggtgatactctaagacttagtgccatcatcaaaggagtgccattcccaaaagtaacttggaaaaaagaagacagagatgctccaactaaagcaagaattgatgtgactccagttggtagcaagcttgaaattcgtaatgctgcccatgaagatggtggaatttattctttaacagtggagaatccagctggttcaaaaactgtctcagtaaaagtacttgtattagataaacctgggccacctagagatctggaagtcagtgaaattaggaaagattcatgttaccttacttggaaagaaccactggatgatggtggttctgttattaccaattatgtggttgagaggagagatgttgccagcgcccagtggtcacctctctcagctacatcaaagaaaaagagtcacttcgctaagcatctgaatgaaggcaaccagtacctcttccgagtagctgcggagaaccagtatggacgtggtccttttgttgaaacaccaaaaccaatcaaggctttggatcctctccatcccccagggccacccaaggacctgcaccatgtagatgttgacaagactgaagtctccctagtctggaataagccggatcgtgatggtggttctccaatcactggatatttggtagaatatcaagaagaaggcacccaggactggattaaatttaagactgtgacaaacttagagtgtgtggttactggactacaacaaggaaagacctatagattccgtgtaaaagctgaaaacattgtgggtcttggtctccctgacacaactatcccgatagaatgtcaagaaaaactagtgcctccatccgtggagctagatgtgaaattaattgaaggtcttgtggtaaaggctggaaccacagtcagattccctgctattataagaggtgtgcctgttcctactgcaaagtggacaaccgatgggagtgagattaaaaccgatgagcactacacagttgaaacagacaacttctcatcagtacttaccattaagaactgcttaaggagagacactggggaatatcaaatcacagtttccaatgcagccggtagcaaaacagtagccgtacatcttactgttcttgatgttcctgggccaccaacaggtcctattaatattctggatgttactcctgaacacatgactatctcatggcagccacctaaggatgatggaggaagccctgtgataaattatattgttgagaaacaagatacaaggaaagacacgtggggtgttgtctcttccggaagcagtaagacaaagctgaaaatcccacatctgcagaagggctgtgaatatgttttccgagttagagcagagaataagataggtgttggtcctccccttgactccacacctactgttgctaagcataaatttagtcctccgtctcctcctggtaaaccagtggttactgacattactgaaaatgcagcaacagtgtcttggaccctgccaaaatctgatggtggcagtccaataactggctactatatggaacgtcgagaagtaactggcaaatgggtgagggtcaacaaaacacctatcgctgacctgaagttcagagtgactggactctatgaaggaaatacatatgagtttagagtttttgctgaaaatcttgcaggactaagcaaaccatccccaagttctgatccaataaaagcttgccggcccatcaaaccacctggaccacctattaatcctaaactgaaagacaagagcagagaaacagctgatttggtgtggacaaagcctctcagtgatggtggtagccccattctaggatatgtagtggaatgtcagaaacctggcacagcacaatggaacaggattaataaagatgaactcattaggcaatgtgcctttagggtacctggactaattgaaggaaatgagtacagattccgtataaaggcagctaatattgtaggagagggtgagccaagagaactagcagaatctgtgattgcaaaagatatccttcatcctccagaagtagaacttgatgttacttgtcgtgatgttattaccgtgagagtaggccaaactatccgcattctagctcgagtcaaaggcagacctgaaccagacataacttggactaaggaaggcaaagtattggtccgagaaaagagggtggaccttattcaggatctacctcgtgttgagttacaaattaaagaagctgttagagctgatcatggcaagtatatcatctcagctaagaacagcagtggacatgcccaaggttcagccatcgttaacgtccttgacagacctgggccttgccagaatttgaaggttaccaatgtaaccaaagagaactgtacaatttcttgggaaaacccactagataatggtggctcagaaataacaaacttcatagtagaatatcgcaaaccaaaccagaaaggctggtcaattgttgcatcagatgtcactaaacgattaatcaaggccaaccttttagccaacaatgaatactatttccgagtttgtgcagagaataaagtaggtgttgggccaaccatcgaaacaaaaactcccattctggctattaaccctattgacagaccaggtgagcctgaaaaccttcacattgcagataaaggaaagacatttgtctatctaaagtggcggaggcctgactatgatggtggcagtccaaatctgtcatatcatgttgagagaaggcttaagggctccgatgactgggaaagagtgcataaaggaagcattaaagaaactcactacatggttgacagatgtgttgaaaaccagatttatgagttcagagtgcaaacaaagaatgaaggtggggaaagtgactgggtgaagacagaggaagttgttgtgaaagaagacttacaaaaaccagtacttgatctgaaattaagtggggtcctaactgtcaaagcaggggacaccattaggcttgaggcaggggttagaggcaaaccattcccagaagttgcatggaccaaggacaaagacgctacagacttaacaagatcaccaagggtcaagattgatacccgtgctgattcatctaaattttctcttactaaagcaaagcgaagtgatgggggtaaatatgtagttacggcaactaacacggctggcagttttgtggcctatgccactgtcaatgttttagataagcctggtcctgtgagaaatctgaaaattgttgatgtgtccagtgataggtgtactgtttgctgggatccaccagaagatgatggtggctgtgaaatccaaaattatattctagaaaaatgtgagacaaagcgaatggtttggtctacctattctgctactgtcttgacacctggtactacagtaacacgtctcatagaaggaaatgaatatattttcagagtccgtgcagaaaataaaataggcacagggcctccaacagaaagtaaaccagtcatagccaaaaccaagtatgataaacctggtcgccctgatcccccagaagtcactaaagtaagcaaagaagagatgactgtggtttggaatccacctgaatatgatggtggaaagtctataactggatactttttggagaaaaaggaaaagcattcaacacgatgggtccctgtcaacaagagtgcaatccctgagagacgtatgaaagtacagaatctcctcccagaccatgaatatcagttccgtgtcaaggcagaaaatgaaattggaattggagaaccaagcttgccttcaagaccggtggtggcaaaagaccccatagagccacctggtccaccaaccaatttcagagtggttgatacaaccaaacattccataactcttgggtggggaaaaccagtctatgatggtggtgcaccgatcattggatatgttgtggaaatgagaccaaaaatagcagatgcgtctcctgatgaaggctggaaacggtgtaatgctgcagcacagcttgtacgcaaggaattcactgttaccagcttggatgaaaaccaggaatatgagttcagggtgtgtgcccaaaaccaagttggtattgggcgccctgcagagctaaaggaagctatcaaacctaaagaaatactagaacctccggagattgatttggatgccagcatgaggaaactggtcatagtgagagcaggatgccctattcgtctctttgctatagtgagaggacgaccagcccctaaagtcacttggcgaaaagttggcattgataatgtggtcagaaaaggacaagttgatctggttgacactatggccttccttgtcatccccaattctacccgtgatgactcaggaaaatattccttaacacttgtgaacccagcaggagaaaaggctgtattcgtaaatgtcagagtattagacactcctgggcctgtgtctgatttaaaagtttcagatgtcactaaaacatcatgccatgtgtcctgggcccctcctgaaaacgacggtgggagccaagtgacacattatatcgtggagaaacgtgaggcagacagaaagacatggtcgaccgttaccccagaagttaagaaaacaagcttccatgtaaccaatcttgtccctgggaatgagtattacttcagagtaactgctgtcaacgaatatggccctggcgtcccaacagatgtcccaaaaccagtgcttgcatcagatcctctaagtgagccggatcccccaaggaaattagaagtgactgaaatgaccaagaacagtgccaccttagcctggttacctcccctacgtgatggaggtgctaaaatcgatggctacatcactagttacagagaagaagagcagcctgcagatcgctggacagagtactcagtggtaaaagatctgagccttgttgtcactggcctaaaggaaggaaagaaatacaaatttagagtagcggccagaaatgctgttggagtcagtttgccaagagaagctgaaggagtgtatgaagccaaagaacaactgttgccaccaaagatccttatgccagagcaaataactatcaaagctgggaaaaaactccgaattgaagcccatgtgtatggaaagcctcatcccacctgtaaatggaaaaaaggagaagatgaagttgtcacatccagccacctggcagtgcataaagcagacagctcttcaattctgatcataaaagatgtgactaggaaagacagtggttactacagcctcacagcagagaacagttctgggacagacactcagaaaatcaaagttgtagtcatggatgcccccggcccccctcagcctccatttgacatttctgatatagacgctgatgcttgctccctgtcatggcacatccctctggaggacggaggcagtaacatcaccaattatatagtggagaagtgtgatgtaagccgaggtgactgggtcacggctctagcttcagtcacaaaaacttcctgcagggttggaaagctgatcccaggccaggagtacatcttccgggtccgtgctgaaaaccgatttggcatttcagagcctctcacatctccaaagatggttgcgcagttcccatttggtgttcctagtgaaccaaagaatgcacgagtcaccaaagtcaacaaggactgtatttttgttgcttgggacagaccagatagtgatggagggagccccattattggttatctgattgaacgcaaggaaagaaacagtttgctgtgggtgaaagccaatgatactcttgtccggtcaactgaatatccttgtgctggccttgtagaaggtcttgagtattcattcagaatctatgccctaaacaaagctggatccagcccacccagcaaacccacagaatatgtaactgcaagaatgccagttgatcctcctgggaaacctgaggttattgatgtcaccaagagtactgtatctctgatctgggctcgtccaaagcatgatggaggcagtaaaattattggctatttcgtagaagcttgcaaacttcctggtgataaatgggtacggtgcaatactgcacctcaccagattccccaggaagagtacacagctactggcctagaagagaaagctcagtatcaatttagagctattgccaggaccgcggtaaacattagcccaccttctgaaccttctgatccagtgactatcctcgcagaaaatgtccctcccaggatagacctgagtgtggctatgaaatctttgcttactgtgaaagctggaactaatgtctgcttggatgctactgtttttggtaaaccgatgccaacagtttcttggaaaaaagatggcacactgctaaaaccagcagaaggcataaagatggccatgcagcggaatctgtgcaccttggagctattcagcgtgaaccggaaggactcaggagactataccattactgctgaaaattcaagtggttctaaatcagccaccattaagcttaaagtgttagataaaccgggtcctccagcatctgttaaaatcaacaaaatgtattcagatcgtgctatgctttcttgggaaccgcctcttgaagatggaggctcagaaatcaccaactatattgttgacaaacgtgaaacaagcaggcccaactgggctcaagtctctgcaactgtgcctatcaccagctgcagcgtggagaaacttatagagggccatgagtatcagttccgtatttgtgctgaaaataaatatggagtaggcgatccagtcttcactgaaccagcaattgccaaaaacccatatgacccaccaggacgctgtgatcctcctgttattagcaacataaccaaagatcacatgacagtcagctggaagccaccagcagatgatgggggctcacccatcactggctatttgcttgaaaagcgggaaacccaggctgttaactggactaaggtcaacagaaaacctattatagaaagaacattaaaagcaacaggtcttcaagaaggtaccgaatatgagttccgtgttacagctataaataaagctggaccaggcaaacccagtgacgcatccaaggccgcttatgctcgggaccctcagtatcctcctggcccaccggctttccctaaagtatatgatacaactcgcagctctgtgagtctatcttggggcaagccagcctatgacggcggcagccctatcattggttatctcgttgaagtaaaacgggctgactccgataactgggtgaggtgcaacttaccacagaatctacagaaaacccgctttgaggttactggcctgatggaagacacacaatatcaattccgtgtgtatgccgttaataagattggatacagtgaccccagtgatgtgccagataaacactatcccaaggacatcttaattccacctgagggagaacttgatgcggacttaaggaagacactcatattacgtgctggagttactatgagactatatgtaccagtaaaaggacgcccacctccaaagattacttggtctaaaccaaatgtcaatctaagagacaggattggactggacataaagtcaactgactttgacactttcttgcgctgtgaaaatgtgaacaaatatgatgcaggaaaatatatcttaaccctggagaacagctgtggtaaaaaggaatataccattgttgtgaaagtgcttgatactcctgggccacctgtcaatgtgactgttaaggaaatatccaaagactctgcttatgttacctgggagcctcccattattgatggcggaagccccatcataaactatgtggtacaaaaacgtgatgcagagaggaaatcctggtctacagtgacaactgagtgctccaaaacaagcttcagagtagctaatttggaggagggaaaatcctacttcttccgagtgtttgctgaaaatgagtatggcattggtgatcccggtgaaactcgtgatgctgtcaaagcttcccaaactcctggaccagttgtggacctgaaagtgaggtctgtatctaagtcatcctgtagcattggctggaaaaagcctcacagtgatggtggaagtcggattattggatatgtagttgatttcctgactgaagaaaataagtggcaacgagttatgaaatccttaagcctacagtactctgcaaaagatttgactgaagggaaggaatataccttcagagtgagtgctgagaatgaaaatggagaaggaaccccaagcgaaatcactgttgtggcaagggatgatgttgtggctcctgatcttgacttaaagggtctacctgatttgtgctacttggctaaagaaaacagcaacttccggcttaagatccccataaaaggcaagccagctccatcagtctcctggaagaaaggggaagatcctctagcaactgacactagagtcagtgttgagtcatctgcggttaacacaactcttatagtgtacgattgccaaaaatctgatgctggaaaatacacaatcacacttaagaatgttgctggcaccaaggaaggaactatctccataaaggttgttggcaagcctggcatccccactggaccaatcaaatttgatgaagtcacagcagaagccatgaccttaaagtgggctcctccaaaggatgatggaggttctgaaatcaccaactatatcctagagaagagggattctgtgaacaacaagtgggtgacgtgcgcctcagctgtccagaaaaccacctttagagtaaccagacttcatgagggcatggaatataccttcagggtcagtgccgaaaataaatatggtgtaggggaaggcctgaaatcggagccaattgttgcgagacatccatttgatgtgcctgatgctcccccacctcccaatattgtggatgtcagacacgattcagtatctctaacttggactgaccccaagaaaactggtggttctccaattacagggtatcatctcgagttcaaggaaagaaacagccttttgtggaagagagctaacaagactccgataaggatgagagactttaaagtgacaggattaactgaaggtcttgaatatgaattccgagttatggcaatcaatttagcaggtgtgggcaagccaagcctaccatcagagcctgttgtggcactggacccaattgatcctcctggaaaacctgaggttattaacataacaaggaattcagtgactctcatttggactgaacctaaatatgacggtggtcataagttaactggatatatagtggagaagcgagatctaccttcgaagtcttggatgaaagccaaccatgttaatgtcccagaatgtgcctttactgtaactgaccttgttgagggtggaaaatatgaattcagaattagagcaaagaatacagcaggtgctatcagtgctccatcagaaagtacagaaaccattatttgcaaggatgaatacgaggcaccaacaattgtccttgatcccacaataaaagatgggctaacaattaaagcaggggataccattgttttgaatgccattagcattcttggcaaaccccttccaaaatcaagttggtccaaggcaggaaaagacattagaccatcagatatcactcagataacttcaaccccaacatcttccatgcttactatcaagtatgccactagaaaagatgcgggtgaatataccatcactgctaccaatccttttggcacgaaggtggaacatgtgaaggtaacagtccttgatgtacctggtcccccaggtcctgttgaaatcagtaatgtttctgctgaaaaagcaacacttacatggacacctcccttggaagatggcggctcaccaattaagtcctatatacttgaaaagagagaaaccagccgacttttgtggacagtggtttctgaagatattcagtcttgcaggcatgtggcaaccaaacttatccaaggaaatgagtacatcttccgggtctcagctgtaaaccactatggcaaaggagaacctgtacagtctgaacctgtcaaaatggtagacagatttggtccccctggccctcctgaaaaaccagaggtatcaaatgtcactaagaacactgccactgtcagctggaaaaggccagtggatgatggtggcagcgaaattacaggatatcatgtagaaaggagagaaaagaaaagcctgcgatgggtgagagcaataaaaacaccagtttccgatctcaggtgcaaagtaacaggactgcaagaaggaagcacctacgaattccgtgtcagtgcagaaaacagagcaggaattggtccacccagtgaggcttcagattctgttctgatgaaagatgcagcatatcctccaggaccaccttcaaatccgcatgtcactgatactaccaagaaatctgcttctttggcatggggcaagcctcattatgatggtggacttgaaatcactggctatgtcgtggagcatcaaaaagtaggagacgaggcctggataaaagataccacaggaaccgccctcagaatcactcagttcgttgttcctgatcttcagactaaagaaaaatacaacttcagaatcagtgccatcaacgatgcaggtgttggggagccagcggtgattccagatgttgaaatcgtagaacgggagatggctcctgattttgaactagatgccgagcttcgaagaacacttgttgttagagcaggactcagtattaggatatttgtgccaattaaaggtcgtcctgctcctgaagtgacatggaccaaagataacatcaacctgaaaaaccgagccaacattgaaaatacggaatcatttactcttctgattatcccagaatgtaacagatatgataccggtaaatttgtcatgaccattgaaaacccggctgggaagaaaagtggctttgtgaacgtcagagtcttggacacgccaggcccagtcctcaacctgcggcctacagacatcacaaaggacagtgtcaccctgcactgggacctccctctgatagatggaggctcacgtataacaaactacattgtagagaaacgtgaagcaacacggaaatcttattccacagccaccactaagtgccataaatgcacatataaagttaccggcttgtctgaagggtgtgaatatttcttcagagtgatggcagagaatgaatatggaattggtgagccaacagaaactacagagcccgtaaaagcctctgaagcaccatctccaccagacagccttaacatcatggacataactaagagcaccgtcagcctggcatggcctaagcccaaacacgatggtggcagcaagatcactggctatgtgattgaagcccaaagaaaaggctctgaccagtggacccacatcacaaccgtgaaagggttagaatgtgttgtgaggaatctaactgaaggagaggaatataccttccaagtgatggcagtgaacagcgcggggagaagtgcccctagagaaagcagacccgtcattgtcaaggagcagacaatgcttccagagctggatctccgtggcatctatcagaaactggtcattgccaaagctggtgacaacatcaaagttgaaattccagtgctcggtcgaccgaagcccacagtgacatggaaaaaaggagaccaaattcttaaacagacacagagagttaattttgaaaccacagcgacttcaaccattttaaatatcaatgagtgtgtcagaagtgatagtgggccctatccattaacagcaaggaacattgtaggagaggttggtgatgtcatcaccattcaagtccatgatatcccagggccacctactggaccaatcaaatttgatgaagtttcatctgattttgtaaccttctcttgggacccacctgagaacgatggtggtgtaccaataagcaactatgtagtggaaatgcggcagactgacagtactacctgggttgagttagcaaccaccgttatacgtactacctataaagccacccgccttactactggattagagtatcagttccgtgtaaaagctcagaatagatatggagttggaccaggcatcacatcagcatgcatagttgccaactatccatttaaggttcctggacctcctggtacccctcaggtaactgcagttaccaaggattcaatgacaattagctggcatgagccactttctgatggtggaagccccattttaggatatcatgttgaaagaaaagaacgaaatggtattctctggcagactgtgagcaaagctttagtaccaggcaacattttcaaatcaagtggacttacagatggtattgcttatgagttccgggtgattgcagaaaacatggcaggcaaaagtaagccaagcaagccatcagaacctatgttggctctggatcccattgacccacctggaaaaccagtacctctaaatattacaagacacacagtaacacttaaatgggctaagcctgaatatactgggggctttaaaattaccagttatatcgttgaaaagagagaccttcctaatggacggtggctgaaggccaacttcagcaacattttggagaatgaatttacagtcagtggcctaacagaagatgctgcatatgaattccgtgtgatcgccaaaaatgctgcaggtgccatcagtccaccatctgagccatctgatgctatcacttgcagggatgatgttgaggcaccaaagataaaggtggatgttaaatttaaggacacggttatattaaaagcaggtgaagcattcagactggaagctgatgtttcaggccgcccacctccaacaatggaatggagcaaagatggaaaagagctggaaggcacagcaaagttagaaataaaaattgcagatttctctactaatctggtaaacaaagattcaacaagaagggatagtggtgcctatacccttacagcgactaatcctggtggctttgctaaacacattttcaatgtcaaagttcttgacagaccaggcccacctgaaggacctttggctgtaactgaagtgacatcagaaaagtgtgtactatcatggttccctccactggatgatggaggtgccaaaattgatcattacatagtacagaaacgtgaaaccagcagattggcatggacaaatgtagcctcagaagtccaagtaacaaagctaaaggtcactaaactcttgaaaggcaatgaatacatattccgtgtcatggctgtaaataaatatggagtgggagagccactggaatcagagcctgtgcttgcagtgaatccttatggaccccctgatccgcccaaaaaccctgaagtgacaactattactaaagattcgatggttgtctgctggggacatcctgattctgatggtggaagtgaaatcatcaattatattgtggaacggcgtgataaagctggccaacgctggattaaatgcaacaaaaaaactcttactgatttaagatataaagtgtctggactgacagaaggacatgaatatgagttcaggattatggctgaaaatgctgctggaattagtgcaccaagtcctaccagtccattttacaaggcttgtgacactgtgtttaaacctggaccaccaggtaacccacgtgttctggatacaagcagatcatccatttcaatcgcttggaataaacctatctatgatggtggttcagaaatcactgggtatatggttgagattgccctgccagaggaagatgaatggcagattgtcactccaccagcaggactcaaggcaacttcgtatactatcactggcctcacagagaatcaggaatataagatccgcatctatgccatgaattccgaaggacttggggaacctgcccttgttcctggaactccaaaggctgaagacagaatgctgcctccagaaattgaactggatgctgacctgcgcaaagttgttactataagggcctgctgcaccctgagactttttgttcccatcaaaggaaggcctgcacctgaggtgaagtgggcccgggaccatggagaatctttagataaagctagcatcgaatccacaagctcttacaccctgcttattgttggaaatgtaaacagatttgacagtggcaaatatatactaactgtagaaaatagttcaggcagcaagtctgcatttgtcaatgttagagttctcgatacaccaggccccccacaggatctgaaggtaaaagaggtcactaagacatctgtcacactcacatgggacccacctctccttgatggaggttcaaaaatcaagaactatattgttgaaaagcgggaatcaacaagaaaagcatattcaactgttgcaacaaactgccacaagacttcctggaaggtagaccagcttcaagaaggctgtagctactatttcagggttctcgcagaaaatgaatatggcattgggctgcctgctgaaaccgcagaatctgtgaaagcatcagaacgacctcttcctccaggaaaaataactttgatggatgtcacaagaaatagtgtgtcactctcttgggagaaaccagagcatgatggaggcagccgaattctaggctacattgtggagatgcagaccaaaggcagtgacaaatgggccacgtgtgccacagtcaaggtcactgaagccactatcactggattaattcagggtgaagaatactctttccgtgtttcagctcagaatgaaaagggcatcagtgatcctagacaactgagtgtgccagtgatcgccaaagatcttgtcattccaccagccttcaaactcctgttcaatactttcactgtactggcaggtgaagacctaaaagttgatgttccattcattggccgccctaccccagctgtaacctggcataaagataatgtaccactgaagcagacaactagagtaaatgcagagagcacagaaaataattcactactgacaataaaggacgcctgccgagaagatgttggccattatgtggttaaactgactaactcagctggtgaagctattgaaacccttaatgttatcgttcttgacaaaccagggcctccaactggaccagttaaaatggatgaagtgacagctgatagtattactctttcctggggcccacccaagtatgatggtggaagttctatcaataattacattgttgagaaacgggacacttccacaaccacctggcaaattgtatcagctacagttgcaaggacaacaataaaggcttgcagactgaagactggatgtgaatatcagtttagaattgcagctgaaaacagatatgggaagagtacctacctcaattcagagcctactgtagcccaatatccattcaaagttcctggtcctcctggcactccagttgtcacactgtcctccagggacagcatggaagtacaatggaatgagccaatcagtgatggaggaagtagagtcattggctatcatctagaacgcaaggaaagaaatagcatcctctgggttaagttgaataaaacacctattcctcaaaccaagtttaagacaactggccttgaagaaggtgttgaatatgaatttagagtctctgcagagaacatcgtgggcattggcaagccgagtaaagtatcagaatgttatgtggctcgtgacccatgtgatccaccaggacggccagaggcaatcattgtcacaaggaattctgtgactcttcagtggaagaaacccacctatgacggtggaagcaagatcactggttatattgttgagaagaaagaattacctgagggccgttggatgaaagccagttttacaaatattattgacactcattttgaagtaactggcctagttgaagatcacagatatgagttccgggttatagcccgaaatgccgcaggagtgtttagtgagccttcagaaagcacaggagcaataacagctagagatgaggtagatccaccacgaataagtatggatccaaaatacaaagacacaatcgtggttcatgctggtgaatcattcaaggttgatgcagatatttatggcaaaccaataccaaccattcagtggataaaaggtgatcaggagctttcaaacacagctcgattagaaataaagagcaccgactttgccaccagtctcagtgtaaaagatgcagtacgtgtcgacagtggaaattacatactgaaggccaaaaatgttgcaggagaaagatcagttactgtgaatgtcaaggttcttgacagaccagggccacctgaaggacctgttgttatctcaggagttacagcagaaaaatgcacactagcttggaaacccccacttcaggatggtgggagtgacatcataaattatattgtggaaaggagagaaaccagccgcttagtttggactgtggttgatgccaatgtgcagactctcagctgcaaggttactaagcttcttgaaggcaatgaatatactttccgtataatggcagtaaacaaatatggtgttggtgaacctcttgaatctgagccagtagttgccaagaatccatttgtagtaccagatgcaccaaaagctccagaagtcacaacagtgaccaaggactcaatgattgttgtatgggaaagaccagcatctgatggtggtagtgaaattcttggatatgttcttgagaaacgggataaagaaggcattagatggacaagatgccataagcgtctgattggagagttgcgcctgagagtaactggactcatagaaaatcacgattatgagttcagagtttctgctgagaatgctgctggacttagtgaaccaagccctccttctgcttaccaaaaggcttgtgatcctatttataaaccaggacccccaaacaaccccaaagtcatagacataaccagatcttcagtattcctttcttggagcaaaccaatatatgatggtggctgtgaaattcaaggatacattgttgaaaaatgtgatgtgagtgttggtgaatggacaatgtgcactccaccaacaggaattaataaaacaaacatagaagtagagaagctgttggaaaagcatgaatacaacttccgtatctgtgctattaataaagctggagttggagaacatgctgacgtccctggacctattatagttgaagaaaaattagaagcaccagacattgatcttgacctagaactaaggaaaatcataaatataagggcaggtggctccttaaggttatttgttcctataaaaggtcgtcctacaccagaagttaaatggggaaaggtggatggtgaaatccgagatgcagctataattgatgtcactagcagtttcacctctcttgttcttgacaatgtcaaccgatatgatagtggaaaatatacgcttacattagaaaacagcagtggaacaaagtctgcctttgttactgtgagagttctggacacgccaagtccacctgttaacctgaaagtcacagaaatcaccaaagactcagtatcaattacatgggaacctcctttgttggatgggggatccaaaataaaaaattacattgttgagaaacgtgaagccacaagaaaatcatatgctgctgttgtaactaactgccataagaattcttggaaaatcgatcagctccaagaaggttgcagttattactttagagtcacagctgagaatgagtatggtattggccttcctgcccagactgctgatccaattaaggttgcagaagtgccacaacctcctggaaaaataactgtggatgatgtcaccagaaacagtgtctctctgagttggacaaaacctgaacatgatggtggcagtaaaatcattcagtatattgtggaaatgcaagctaaacacagtgagaaatggtcagagtgtgctcgagtaaagtctcttcaggcagtaattaccaacctaactcaaggggaagaatatctttttagagttgttgctgtaaatgaaaaggggagaagtgatcctcggtcccttgcagttccaatagttgccaaagatctggtaattgagccagatgtaaaacctgcattcagtagttacagtgtacaggttggccaagatttgaaaatagaagtgccaatttctggacgtcctaagccaaccattacctggactaaagatggtctcccactgaagcagaccacaagaatcaatgttaccgattcactggatctcaccacactcagtattaaagaaactcataaggatgatggtggacaatatggaatcacagttgccaatgttgttggtcagaagacagcatccatcgaaattgtaactctagataaacctgatcctccaaaaggacctgttaaatttgatgacgtcagtgctgaaagtattacattatcttggaaccctccattatatacagggggctgccaaatcaccaactacattgttcagaaaagagatacaaccaccacagtatgggatgttgtttctgctactgttgctagaactacactcaaagtgaccaaactgaaaactggtacagaataccaatttagaatatttgccgaaaacagatatggacaaagctttgccttagagtctgatccaattgtagctcaatatccctacaaagaaccaggccctccaggtacaccatttgccacagccatttccaaagactccatggtcatacagtggcatgaaccagtcaacaatggtggaagccccgtcataggttaccacctggagagaaaagaaagaaacagtattttgtggacaaaggtcaacaaaactattattcatgacacccaattcaaagcacagaatcttgaagaaggcattgaatatgaattcagagtgtatgctgaaaatattgttggtgtaggcaaagcaagcaagaattctgaatgctatgtagccagagatccctgtgacccaccaggaaccccagaaccaataatggttaaaagaaatgaaatcactttacagtggaccaaacctgtgtatgatggtggaagtatgattacaggctacattgtagagaaacgtgatttgcctgatggtcgttggatgaaagctagctttacaaatgtcattgaaactcaatttactgtgtcaggtcttactgaagatcaaagatatgaattcagagtcattgcaaagaatgcagctggtgcaataagtaaaccctctgacagtactggaccaataactgccaaggatgaggttgaactcccaagaatttcaatggatccaaaattcagagacacaattgtggtaaatgctggagaaacattcagacttgaggctgatgtccatggaaagcccctacctaccattgagtggttaagaggagataaggaaattgaagaatctgctagatgtgaaataaagaacacagatttcaaggctttacttattgtaaaagatgcaattagaattgatggtgggcagtatattttaagagcttccaatgttgcaggttctaagtcattcccagtaaatgtaaaagtattagatagaccaggacctccagaagggccagtccaggttactggagtcacttctgaaaaatgctctttaacatggtctccaccacttcaagatggtggcagtgacatttctcactatgttgttgaaaagcgagaaaccagtcgacttgcctggactgttgttgcttcagaagttgtgaccaattctctgaaagttaccaaactcttagaaggtaatgaatatgttttccgtataatggctgtcaacaaatatggtgttggagagcctttggaatctgcaccagtactaatgaaaaatccatttgtgcttcctggaccaccaaaaagcttggaagtcacaaatattgccaaagactccatgaccgtctgttggaaccgtccagatagtgatggtggaagtgagattattggttacattgtagagaaaagagacagaagtggcattcgatggataaaatgtaataaacgccgcattacagatttgcgtctaagagtgacaggattaacagaagatcatgagtatgaattcagggtctctgcagaaaatgctgctggagttggggaaccaagtccagctacagtttattataaagcctgtgatcctgtgttcaaacctggcccacctaccaatgcacacattgtagacaccactaaaaattcaatcacacttgcctggggtaaacccatctatgatggcggcagtgagatcttgggatatgtagtagaaatctgtaaagcagatgaagaagaatggcaaatagttactccacagactggcctgagagtcactcgatttgaaatttcaaaactcactgaacaccaagagtataaaatacgagtctgtgccctcaacaaagttggtttaggtgaggctacatcagttcctggtactgtgaaaccagaagataaacttgaagcacctgaacttgaccttgactccgaattaagaaaaggaattgttgtaagagctggtggatctgccagaattcacattccattcaaaggtcgtccaacgcctgagatcacttggtctcgagaggaaggtgaattcacagataaggtccaaattgaaaagggagtaaactatacccaactatcaatagataactgtgatagaaatgatgctggaaaatacattcttaagttggaaaacagcagtggatcaaagtctgcttttgtaactgtgaaagttcttgacactccaggaccaccacagaatttggcagtcaaagaagtgagaaaagattctgccttcctggtatgggagccacccatcattgatggaggggcaaaggtcaagaactatgtgattgacaaacgtgagtcaaccagaaaagcgtatgctaatgtgagtagtaaatgcagcaaaacaagttttaaagtggaaaaccttacagaaggagccatttattacttcagagtcatggctgaaaatgaatttggagttggtgttccagtggaaactgttgatgccgtgaaagctgctgaacctccttccccaccaggaaaggttacactcactgatgtgtcccagaccagtgcatcacttatgtgggagaaacctgaacatgatggcggtagcagagtcctggggtacgttgttgaaatgcagcccaaaggaactgaaaaatggagcattgtggctgaatccaaagtctgtaatgcagttgttactggtttgagttctggacaagaatatcagttccgtgtcaaggcttataatgagaaaggaaaaagcgatccaagagtgttgggtgttcctgtcatagccaaggacttgactatacagcctagtttaaagttaccatttaacacatatagtatccaagctggagaagatcttaaaatagaaattccagttataggccgaccaagacctaacatttcttgggtcaaagatggtgagcctcttaaacagacaacaagagtaaacgttgaagaaacagctacctcaactgttttgcacattaaagaaggtaacaaagatgactttggaaaatacaccgtaacggcaacaaatagtgcaggcacagcaacagaaaatctcagtgttatcgttttagaaaagcctggacctccagttggcccagttcggtttgatgaagttagtgcagactttgtagtcatatcttgggaacctccagcctatactggtggctgccaaataagcaactacattgtagagaagcgagatacaaccaccaccacttggcacatggtatcagcaacagttgcaagaacaacaattaaaataaccaaactgaaaacaggcacggagtaccagtttagaatttttgctgaaaacaggtatggaaaaagtgccccactggattctaaggcagttattgtacaatatccatttaaagaacctggaccacctggaactccttttgtgacatcaatctcaaaagatcagatgcttgtgcaatggcatgagccagtgaatgatggaggcaccaaaattattggctaccatcttgaacagaaagaaaagaacagtattttatgggtcaagttaaataagacccccattcaggacaccaaattcaaaacaactgggcttgatgagggccttgagtatgagttcaaagtttctgctgaaaatattgttggcattggcaagcctagcaaagtgtcagaatgctttgttgctcgtgatccatgtgacccacctggtcgccctgaagccattgttattacaagaaacaatgtcacactgaaatggaagaaacctgcctatgatggtggtagcaaaataacaggttatattgtagaaaagaaagatctacctgatggccgctggatgaaagccagctttaccaacgtattagaaactgaatttacagtgagtggacttgtagaagaccaaagatatgaatttagagtaattgcaagaaatgcagctggaaactttagtgaaccatctgatagtagtggtgccattactgcaagagatgaaattgatgcaccaaatgcctctctggatccaaaatataaagatgtcatcgttgttcatgcaggagagacttttgttcttgaagccgacatccgtggcaaacctatacctgatgttgtttggtcaaaagatggaaaagaacttgaagaaacagctgctagaatggaaattaaatctactattcagaaaacaactcttgttgtcaaagactgtatacggactgatggaggacaatatattctgaaactcagcaatgttggtggtacaaagtctatacccatcactgtaaaggtacttgacaggccagggcctcctgaagggcctctgaaagttactggagttactgcggaaaaatgttacctggcatggaacccacctttgcaagatggtggtgctaatatttcacattacatcattgaaaagagggagacaagccgactctcttggacccaggtttcaactgaggtacaggcccttaactacaaagttactaaacttcttcctggtaatgagtacattttccgtgtcatggctgtgaataaatatggaattggagagcccttggaatctgggcctgttacggcctgtaatccttataagccaccaggtcctccctcaacacctgaagtctcagcaatcaccaaagattctatggtagtaacatgggcacgcccagtagacgacggaggtaccgaaattgagggctacattcttgaaaaacgagataaggaaggcgttagatggaccaagtgcaacaagaaaacattaacggatctgcggctcagggtaactggtcttaccgaaggccattcctatgaattcagagttgctgctgaaaatgcagctggtgtgggagaacctagtgagccatctgttttctaccgtgcgtgtgatgccttgtatccaccaggtcccccaagcaatccaaaagtgacggacacttccagatcttctgtctccctggcatggagtaagccaatttatgatggtggcgcacctgttaaaggctatgttgtagaggtcaaagaagctgctgcggatgaatggacaacctgcactccaccaacaggattacaaggaaagcagttcacagtgaccaagcttaaagaaaacactgaatataacttccgtatttgtgccatcaattctgaaggtgtaggtgaacctgcaactctacctggctcagtggttgctcaggagaggatagagccaccagaaatagaactcgatgctgatctcagaaaggtggtcgttctgcgtgcaagtgctactttacgcttatttgtcactatcaaaggtcgaccagaacccgaagttaaatgggaaaaggcagaaggcattctcactgacagggctcagatagaggtgaccagctcatttacaatgttggtgattgataatgttaccagatttgacagtggtcggtataatctgacattagaaaataatagtggctccaaaacagcttttgttaacgtcagagttcttgactcaccaagtgcccctgtgaatttgaccataagagaagtgaagaaagactcagtgacgttgtcctgggaaccaccacttattgatggtggagctaagattacaaactacattgtcgaaaaacgagaaactacaagaaaagcctatgctaccattacaaataattgcactaaaactactttcagaattgaaaatctacaagaaggatgttcttactacttccgagtcttggcttccaatgaatatgggattggtttgccagctgaaacaacagaacccgttaaagtgtctgaaccacccctcccacctggaagagtaactcttgttgatgtgacccgtaatacagctacaattaagtgggagaaaccagaaagtgatggtggcagcaaaattactggttatgtggttgaaatgcagactaaagggagtgaaaagtggagcacctgcacacaagttaagactctagaagcaactatatctggcttaactgcaggagaagagtatgtcttcagggtagctgcagttaacgaaaagggaagaagtgatccaagacaacttggagtgccagtaattgcaagggatattgaaataaagccttcagttgagcttcctttccatactttcaatgtaaaggctagagaacaacttaagattgatgtgccattcaaaggaagacctcaagctactgtgaactggagaaaagatggtcagactcttaaagagacaactagagtcaatgtttcttcttcaaagactgtaacatcactatctattaaggaagcttcaaaggaagatgttggaacttatgaattatgtgtttcaaacagtgctggatccataacagttcctattactataattgtccttgacagaccaggacctccaggtcctatacgtattgatgaggttagttgtgacagcataaccatttcttggaatcctccagaatatgatggtggctgccaaattagcaattacattgttgaaaagaaagaaaccacctctacaacatggcacatagtttcacaagcagttgcaagaacatccattaaaatagttcgcctgacaacaggaagtgagtatcagttccgtgtttgtgcagaaaaccgctatggaaagagctcctacagtgaatcttcagctgttgttgcagagtatccattcagtcccccaggtcctcctggtactcctaaagttgtgcatgccacaaaatctaccatgcttgtaacctggcaagtgccagttaatgatggaggaagtcgagtaattggctatcatcttgagtataaagaaagaagcagcattctttggtcaaaagcaaataaaatcctcattgctgatactcaaatgaaagtctccggccttgatgaaggactgatgtatgagtatcgtgtatatgctgaaaatattgctggaattggtaaatgcagtaaatcttgtgaaccagtccctgcaagagatccttgtgaccctcctggacaacctgaagtcacaaatatcacaagaaaatcagtgtcacttaaatggtctaaaccacattatgatggtggagctaagatcacaggatacattgttgaacgcagagaactaccagatggccggtggctgaagtgcaattatactaatatacaagaaacatactttgaagtaactgaacttactgaagatcagcgttatgaattccgggtttttgcaaggaatgctgctgactcagttagtgagccatctgaatccactgggcctattatagttaaagatgatgttgagcctccaagagttatgatggatgtcaagttccgagacgttattgttgtcaaagctggagaggtccttaagataaatgcagacattgcagggcgacctctgccagtaatttcctgggccaaggatggtatagaaattgaagaaagagcaagaacagaaatcatctcaacagacaatcatactttgttaacagttaaagactgtataagacgagacactgggcaatatgtactaacactgaagaatgttgccggcactcggtctgtggccgttaattgcaaagtacttgataagcctggtccaccagcaggaccacttgaaataaatggcctcactgctgagaaatgctctctttcctggggacgtccccaagaagatggtggtgcagatatcgactattacatcgtagaaaaacgtgaaacaagccaccttgcatggacaatatgtgaaggagagttacagatgacatcctgtaaagtaaccaagttactcaaaggcaatgaatatatatttagagtaactggtgttaataaatatggtgttggtgagcccctagagagtgtagctataaaggcactagatccatttacagttccaagtccacccacgtctttggaaattacttctgtgaccaaagaatctatgacactttgctggtcaagacccgagagtgatggaggtagtgaaatatctggatatataattgaaaggcgagagaaaaatagcctaagatgggtgcgtgtaaacaaaaaaccagtttatgatctaagagtgaaatcaacaggacttcgggaaggatgtgaatatgaatatcgtgtttatgcagaaaatgctgctggcctaagtcttccaagtgaaacctctcccttaattagggcagaagatccagtgttcctaccatctcctccatccaaacccaaaattgtggactcaggcaagacaactataactattgcctgggttaagccgctgtttgatggtggggccccgataactggatatactgtagaatacaaaaaatctgatgacactgactggaaaacttccattcagagcttacgagggacagaatatacaataagcggactaacaacaggagctgaatatgttttcagagtaaaatctgtcaataaggttggtgctagtgaccccagtgatagctctgaccctcagatagcaaaggaaagagaagaagaacctttatttgatattgacagtgaaatgaggaagaccttgattgtcaaggctggtgcctcatttaccatgactgtgcctttccgaggaagaccagtacccaatgtcttgtggagtaagccagacactgacctccgtactagagcttatgttgataccacagactctcgtacatcactgaccattgaaaatgccaacagaaatgactctggaaagtacacattaacaattcagaatgttttgagtgctgcttcactgaccttagttgtcaaagttttagataccccaggtcctccaaccaacattactgtgcaagatgtaaccaaagagtctgcagtgttatcctgggatgttcctgaaaacgatggtggagcaccagtgaagaattaccacatagaaaaacgtgaggccagcaagaaagcatgggtctctgtgaccaacaactgtaaccgcctctcctacaaagttaccaatttacaagaaggagctatctattacttcagagtctctggagaaaatgagtttggtgttggtataccagctgaaacaaaggaaggagtaaaaataacagaaaaaccaagcccacctgaaaaacttggagtaacaagtatatccaaagacagtgtttccctgacctggctgaagcctgaacatgatggcggaagcagaattgtacactatgtcgttgaagcactagaaaaaggacagaaaaactgggttaaatgtgcagtggcaaagtcaacccatcacgttgtttccggtctgagagagaattctgaatactttttccgagtgtttgctgaaaatcaagctggcctgagtgacccgagagagcttctgcttcctgttcttattaaggagcaactagaaccacctgaaattgatatgaagaatttcccaagtcacactgtatatgttagagctggttcaaaccttaaagttgacattccaatctctggaaaaccacttcccaaagtgaccttatcaagagatggtgtcccccttaaggcaaccatgagatttaataccgaaattactgctgagaacctgaccatcaatctcaaagaaagtgttacagctgacgctgggagatatgaaatcactgctgccaactccagtggtacaaccaaagctttcattaacattgttgtgctagacaggcctggtcctccaactggccctgttgttattagtgatataactgaagaaagtgtgactctcaaatgggagccacctaagtatgacggtggaagtcaagttaccaactacattctactcaaaagagaaacaagtactgcagtgtggactgaagtgtctgcaacagttgcaagaaccatgatgaaagtcatgaaactgaccacaggagaagaataccaattccgcatcaaggcagaaaaccgctttggcatcagtgatcatatagattcagcttgtgtgactgtcaaactaccatacacaacacctggaccaccatctacaccatgggtcactaatgttactcgagaaagcatcactgtgggctggcatgaaccagtgtcaaatggaggcagtgcagtcgtaggctatcacctggaaatgaaagacagaaacagtattttatggcaaaaagccaacaaactggtcatccgcacaactcacttcaaagtcacaacaatcagtgctggacttatttatgaattcagggtgtatgcagaaaatgctgctggagttggaaaacctagccatccttctgaaccagtcttggcaattgatgcttgtgaacccccaagaaatgttcgtatcactgatatttcaaagaactctgtcagcctttcatggcaacaaccagctttcgatggaggtagcaagattacaggctacattgttgagagacgtgaccttccagatggcagatggaccaaggccagcttcaccaatgttactgaaactcaattcatcatctctggcttgactcagaattcccagtatgaattccgtgtctttgctaggaatgctgttggttccattagcaatccatctgaggttgtagggcccattacttgcatcgattcttatggtggtcctgtaattgatttgcctctagaatatacagaagttgtcaaatacagagcaggtacatctgtgaagctcagagctggcatttctggcaaacctgcgcctactattgagtggtataaagatgataaagaattacaaaccaatgcactggtgtgtgttgaaaataccacggacctcgcatctatactcatcaaagatgccgatcgccttaatagtggatgctatgaattaaaactaaggaatgccatgggctcagcctcagccaccatcagagtacagatccttgacaaaccaggcccacctggtggaccaattgaatttaagactgtaactgctgagaagatcacccttctctggcggcctccagctgatgatggtggtgcaaaaatcactcactacattgtggaaaagcgtgagacaagccgcgttgtgtggtctatggtgtctgaacatttggaagagtgcatcattacaaccaccaaaattatcaaaggaaatgaatacatcttccgggtccgagccgtgaacaaatatggaattggcgagccactggaatctgattccgttgtagccaagaacgcatttgttacacctgggccaccaggcataccagaagtgacaaagattaccaagaattcgatgactgttgtatggagcaggccaattgcagatggcggtagtgatataagtggctatttccttgaaaaacgagacaagaagagcctaggatggtttaaagtactaaaagagactatccgtgacaccagacaaaaagtaacaggactcacagaaaacagtgactatcaatacagagtttgtgctgtaaacgctgctggacagggtccattttctgaaccatctgaattctacaaagctgctgatcctattgatcctccaggtccacctgctaagataagaatcgcagattcaaccaagtcatccatcacccttggctggagtaagcctgtctatgatgggggcagtgctgttactgggtatgttgtcgagataagacaaggagaggaagaggaatggactactgtctctaccaaaggagaggtcagaactacagaatatgtggtatccaacctgaaacctggagtcaattactacttccgggtatctgctgtaaactgtgctggacaaggagaacctatagaaatgaatgaacctgtacaagctaaagatatacttgaggcaccagagattgacctggatgtggctctcagaacttctgttattgccaaagctggtgaagatgtacaagtgttgattccctttaaaggcagacctccacctactgtcacatggagaaaagatgagaagaatcttggcagtgatgccagatacagcattgaaaacactgattcatcctcattactcaccattcctcaagttactcgcaatgatacaggaaaatatattctcacaatagaaaatggagttggtgaacctaagtcttcaactgtgagtgttaaagtgcttgacacaccagctgcctgccagaaactacaggttaaacatgtttctcgaggcacagtcactttgctctgggatcctcctctcattgatggaggatctccaataattaattatgtcattgaaaagagagatgccaccaagagaacatggtctgtcgtgtcacacaaatgttctagcacatccttcaagctaatagatttgtcggagaagactccattcttcttcagagttcttgcagaaaatgaaattggaattggggaaccctgtgaaactacagagccagtgaaggctgctgaagtaccagctcctatacgtgatctctcaatgaaagactcaacaaagacatctgtcatcctcagctggaccaaacctgactttgatggtggtagcgtcatcacagaatatgttgtagaaaggaaaggtaaaggtgaacagacgtggtcccacgctggcataagtaagacatgtgaaattgaggttagccaacttaaggagcagtcagtcctggagttcagagtgtttgccaaaaatgagaaaggactgagtgatcctgtcactattgggccaattacagtgaaagaacttattattacacctgaagttgacctgtcagatatccctggggcacaagtcactgtgagaattgggcacaatgtgcaccttgaattaccttataagggaaaacccaaaccatccatcagttggctgaaagatggcttgccactgaaagaaagtgaatttgttcgcttcagtaaaactgaaaacaaaattactttgagtattaagaatgccaagaaggagcatggaggaaaatacactgttattcttgataatgcagtgtgtagaattgcagtccccattacagtcatcacccttggcccaccatcaaagcccaaaggacccattcgatttgatgaaatcaaggctgatagtgtcatcctgtcatgggatgtacctgaagataatggaggaggagaaattacttgttacagcatcgagaagcgggaaacttcacaaactaactggaagatggtgtgttcaagtgttgccagaacgactttcaaagttcctaatctagtcaaagatgctgagtaccagtttagagtgagagcagaaaacagatacggagtcagccaaccacttgtctcaagcattattgtggcaaaacaccagttcaggattcctggtcccccaggaaagccagttatatacaatgtgacttctgatggcatgtcactaacttgggatgctccagtttatgatggtggttcagaagttactggattccatgttgaaaagaaagaaagaaatagcatcctctggcaaaaagttaatacatcaccaatctctggaagagaatatagagccactggactggtagaaggtctggattaccaattccgtgtatatgctgaaaattctgctggcctaagctcacctagtgacccaagcaaatttaccttagctgtttctccagtagacccacctggcactcctgactacattgatgtcacccgggaaaccatcacacttaaatggaacccaccattgcgtgatggaggcagtaagattgtgggctatagcattgagaaacggcaaggaaatgaacgctgggtgagatgcaactttactgacgtcagtgaatgtcagtacacagttacaggactcagtcctggggatcgctatgagttcagaataattgcaagaaatgctgttggaactataagcccgccctcacagtcttctggcattattatgacaagagatgaaaatgttccaccaatagtagagtttggccctgaatactttgatggtctcattattaagtccggagagagccttagaattaaagctttggtacaaggaagaccagtgcctcgagtaacttggttcaaagatggagtggaaatcgaaaagaggatgaatatggaaataaccgacgtacttggatccaccagcctatttgttagagatgctactcgggaccatcgtggtgtatacacagtggaagccaaaaatgcatctggttctgcaaaagcagaaattaaagtgaaagtacaagatacaccaggaaaagtagttgggccaataagattcaccaatattactggggagaagatgacctgtggtgggatgccccactcaatgacggttgtgctcccataacccactacatcattgaaaaacgggaaaccagcagacttgcctgggcactaattgaggataaatgtgaagcccaaagttacactgccattaaactaataaacggcaatgaataccaattccgtgtttctgcagttaacaagtttggtgttggcaggccacttgattctgatccagtggttgctcaaatacaatatactgttcctgatgcccctggcattccagaacctagcaacataacaggcaacagcattaccctgacatgggcaaggccagaatcagatggtggcagtgaaattcaacagtatatccttgaaagaagagaaaagaaaagcacaagatgggtaaaagtgatcagcaaacgaccaatctctgaaacaagattcaaagtcactggtctgacagaaggcaatgagtatgaattccatgtcatggctgaaaatgctgcaggagttggacctgcaagtggcatctcaagactcattaaatgtagagagcccgtcaacccaccaggtcctcccacagtggtcaaagtaacagacacatcaaagacaactgtgagcttagaatggtccaaaccagtgtttgatggtggcatggaaataattgggtatattattgaaatgtgtaaggccgacttaggagactggcacaaggtgaatgcagaggcatgtgtgaaaacaagatatacagtcactgatctacaagcaggtgaagaatacaaattccgagttagtgctatcaatggtgctggaaaaggcgacagctgtgaagtgactggcacaattaaagcagttgaccggttaacagctcctgagttagacatagatgcaaacttcaaacagactcatgttgttagagctggggccagtattcgcctcttcattgcctaccaaggtagacctactcctacagctgtgtggagcaaaccagactctaaccttagccttcgggctgatatccatacaacagattccttcagcaccctcactgtggaaaactgcaacagaaatgatgcagggaaatatacccttactgtggaaaacaacagtggtagtaagtcaatcacattcaccgtgaaagtgctagacactccaggcccacctggcccaattaccttcaaagatgtgacccggggatctgctacattgatgtgggatgcccctcttcttgacggtggtgcccgaatccatcattatgtggtagagaaacgagaggcaagtcgccgtagttggcaggttatcagtgaaaaatgcactcgtcagatcttcaaggtcaatgacctggccgaaggtgttccgtactatttccgtgtttctgcagtaaatgagtatggtgttggtgagccctatgaaatgccagaaccaattgtagccacagaacagcctgctccacctaggagacttgatgttgttgatactagcaaatcctccgcagtcttagcttggcttaaacctgaccacgatggaggcagccggatcactggctacctgcttgaaatgagacaaaagggatctgacttctgggttgaagctggtcacaccaaacagctaactttcacagtagagcgtcttgttgagaaaactgaatatgaattccgtgtgaaggccaagaatgatgctggctatagtgaacccagagaagccttctcttctgtcatcattaaggagcctcaaatcgagcccactgctgacctcactggaattaccaatcagcttataacttgcaaagcaggaagcccatttaccattgacgtaccaatcagtggtcgtcctgcccccaaagtaacatggaaactggaagaaatgagacttaaagagacagatcgagtgagcattacaacaacaaaagacagaaccacactgactgtaaaggacagcatgagaggtgactctggaagatacttcttgaccctggaaaatacagctggtgttaaaacatttagcgtcacagttgtggtcattggaaggccaggtccagtaaccggccccattgaggtctcatctgtctcagctgaatcgtgtgtcctgtcatggggagaacctaaagatggaggaggcactgaaattactaattacatagttgaaaagcgtgaatcgggtacaacagcttggcagcttgtcaattccagtgtcaagcgcactcaaattaaagtcactcatctcacaaaatacatggaatattctttccgtgtcagttcagagaacagatttggtgtcagcaaacctctagaatcagcaccaataattgctgaacatccatttgtcccaccaagcgctcctaccagacctgaggtctaccatgtgtctgccaatgccatgtctattcgttgggaagaaccctaccacgatggtggcagtaaaatcattggctactgggttgagaagaaagaacgtaatacaattctttgggtgaaagaaaacaaagtgccatgcttagagtgcaactacaaagtaactggtttagtagaaggactggaatatcagttcagaacttatgcactcaatgctgcaggtgttagcaaggccagcgaagcttcaagacctataatggctcaaaatccagttgatgcaccaggcagaccagaggtgacagatgtcacaagatcaacagtatcactgatttggtctgccccagcgtatgatggaggcagcaaggttgtgggctacatcatagagcgtaagccagtcagtgaggtaggagatggtcgctggctgaagtgcaactacaccattgtatctgacaatttcttcaccgtgactgctctcagtgaaggagacacttatgagttccgtgtgttagccaagaatgcagcaggcgtaattagcaaagggtctgaatctacaggccctgtcacttgccgagatgaatacgctccacccaaagccgaactggatgcccgattacacggtgatctggttaccatcagagcaggttctgatcttgttctggatgctgcagttggtggcaaacctgaacccaaaattatctggaccaaaggagacaaggagctagatctctgtgaaaaagtctctttgcagtatactggcaaacgagcaactgctgtgatcaagttctgtgacagaagtgacagtggaaaatacactttaacagtgaaaaatgccagcgggaccaaggccgtgtctgtcatggtcaaagtgcttgattcccctggcccatgtggaaagctcaccgtcagcagagtaacacaggagaagtgcactttagcctggagccttccgcaggaagacggaggagcagaaatcactcactacatcgtggaaagacgcgagactagcaggctcaactgggtgattgttgaaggcgaatgcccaaccctatcctatgtcgttaccaggctcatcaagaacaatgagtacatattccgagtgagggcagtaaacaaatatggccctggtgtgcctgttgaatcagagccaattgtagccagaaactcattcactattccatcaccacccggcatacctgaagaagttgggactggcaaagagcatatcatcattcagtggacaaaacctgaatctgatggtggcaatgaaatcagcaactacctagtagacaaacgtgagaagaagagcctgcgctggacacgtgtcaacaaagactatgtggtgtatgataccaggctgaaggtgaccagcctgatggagggttgtgattaccagttccgggtgaccgcagtgaatgcagctggtaacagtgagcccagcgaagcttccaacttcatctcatgcagagaaccatcatatacccctggaccaccttctgctccaagagttgtggataccaccaaacacagcattagtttggcatggaccaaacccatgtacgatggtggtactgacattgtaggatatgttctggaaatgcaagagaaggacactgatcagtggtaccgagtgcataccaatgccacaataagaaatactgaattcactgtgccagaccttaaaatgggccagaaatattccttcagagttgctgccgtgaacgtgaagggtatgagcgaatacagcgaatcaattgctgaaattgagcccgtggaaagaatagaaataccagatcttgagcttgcagatgatctaaagaagactgtgaccatcagggctggggcctccttgcgcttgatggtgtctgtatctggaagaccacctcctgtcataacgtggagcaagcagggcattgaccttgcaagccgggcaattattgacaccactgagagctactcattgctaatagtggacaaagttaatcggtacgatgctggaaaatacacaattgaagctgaaaaccaatctggcaagaaatcagcaacagtccttgttaaagtctatgatactcctggtccctgtccttcagtgaaagttaaggaagtatcaagagattctgtgactataacttgggaaattcccacgattgatggtggagctccagtcaacaattacatcgttgagaagcgtgaagctgctatgagagcattcaaaacagtaactaccaaatgcagcaagacactttacagaatttctggacttgtagaaggaaccatgtactatttcagagtgctgccagaaaatatttatggcattggagaaccttgtgaaacatctgatgcagtactggtctcagaagtgcctttggtgcctgcaaagctagaagtggtcgatgtcaccaaatccactgttacccttgcctgggaaaaaccactctacgatggtggtagccgactcactggatatgttctcgaggcctgcaaagctggcacagagagatggatgaaggttgtcaccttaaaacccacagtcctagagcacactgttacttccttaaatgaaggtgaacaatacttatttagaataagggcacaaaatgagaaaggtgtgtcagaaccaagagagactgtcacagccgtgactgtacaagacctcagagtgttgccaacaatcgatctttctacaatgcctcagaagaccatccatgtcccagctggcagaccagtagagctggtgatacctattgctggccgtccacctcctgctgcttcctggttctttgctggttctaaactgagagaatcagagcgtgtcacagttgaaactcacactaaagtagctaaattaaccatccgtgaaaccactatcagagatactggagaatacacacttgaattgaagaatgttaccggaactacttcagaaaccattaaagttatcattcttgacaagcctggtccaccaacaggacctattaagattgatgaaattgatgctacatcaattaccatttcctgggaaccacctgaattggacggtggtgctccactgagtggttatgtggtagaacaacgtgacgctcatcgtccaggatggctgcccgtttctgaatcagtgactaggtccacgtttaagtttaccagactcaccgaaggaaatgagtatgtgttccgtgtggctgcaacaaaccgcttcgggattggctcttacttgcagtctgaggtcatagagtgtcgcagcagcatccgtattcctggacccccagaaacattacagatatttgatgtttcccgtgatggcatgacacttacttggtacccaccagaggatgacggtggctcccaagtgactggatatattgtggagcgcaaagaagtgagagcagatcgatgggtccgtgtaaataaagtacctgtgacaatgacacggtaccgctccactggccttactgaaggcttagaatatgaacaccgtgtcacagccattaatgcaagagggtctgggaaaccaagtcgtccttccaaacccatcgttgccatggatccaattgctcctccaggaaagccacaaaacccaagagttactgatacaacaaggacatcagtctccctggcctggagtgttccagaagatgaaggaggatctaaagtcacaggctacttgattgaaatgcaaaaagtagatcaacatgaatggaccaagtgtaacaccactccaaccaagattcgagagtatactctaacacacctacctcagggtgcagaatacaggttccgcgtcctagcttgtaatgctggtggacctggtgagcctgctgaggtaccaggaacagtcaaagtcactgaaatgcttgaatatcctgattatgaacttgatgaaagataccaagaaggtatctttgtaaggcaaggtggcgtcatcagacttaccataccaatcaaaggaaaaccattcccaatatgtaaatggaccaaggaaggccaggatattagtaagcgtgccatgattgcaacatctgaaacacacactgagcttgtgatcaaagaagcagacaggggtgattctggcacttatgacctggttctggaaaataaatgtggcaagaaggctgtctacatcaaggtcagggtgataggaagtcccaacagtccagaagggccactggaatatgatgacatccaagtccgctctgtgagggtcagctggagacctcctgctgatgatggtggtgctgacatcttaggctacatcctcgagagacgagaagtgcctaaagccgcctggtataccattgattccagagtccgaggtacatctctggtggtaaaaggcctcaaagagaatgtagaataccatttccgtgtttcagcagaaaaccagtttggcataagcaaacccttgaaatctgaggaaccagtcacaccaaaaacaccattgaatcctccagaacctccaagcaatcctccagaagtactcgatgtaaccaagagttctgttagcttgtcctggtcccggcccaaagatgatggtggttctagagtcacaggctactacatcgaacgcaaagagacatccactgacaagtgggtcagacacaacaagactcagatcaccaccacaatgtacactgtcacagggcttgttcccgatgctgagtatcagttccgcatcatcgcacagaatgatgttggcctgagtgagaccagccctgcttctgaaccagttgtttgcaaagatccatttgataaaccaagccaaccaggagaacttgagattctttcaatatccaaagatagtgtcactctacagtgggagaaacctgaatgtgatggtggtaaagaaattcttggatactgggttgaatatagacagtctggagacagtgcctggaagaagagcaataaggaacgtattaaggacaagcaattcacaataggaggtttgctggaagctactgagtatgaattcagggtttttgctgagaatgagactgggctgagcagacctcgcagaactgctatgtctataaagactaaactcacatctggagaggccccaggaatacgcaaagaaatgaaggatgttaccacaaaattgggtgaagctgctcaactctcatgccagattgttggaaggcctcttcctgacattaaatggtacagatttggtaaagagctcatacaaagccggaaatacaaaatgtcttcagatggacgcacacacactcttacagtaatgacagaggaacaggaagatgaaggtgtttatacctgcatagccaccaatgaggttggagaagtagaaaccagtagtaagcttctcctgcaagcaacaccgcagttccatcctggttacccactgaaagagaaatattatggagctgtgggttccacacttcggcttcatgttatgtacattggtcgtccagtacctgccatgacttggttccatggtcagaaacttttgcaaaactcagaaaacattactattgaaaacactgagcactatactcatcttgtcatgaagaatgtccaacgtaagactcatgctgggaaatacaaagtccagctcagcaatgtttttggaacagttgatgccatccttgatgtggaaatacaagataaaccagacaaacctacaggaccaattgtgatcgaagctctattgaagaactccgcagtgatcagctggaaaccacccgcagatgacggaggctcctggatcaccaactatgtggtggaaaaatgtgaggccaaggagggggctgaatggcaattggtgtcttcagccatctcagtgacaacctgtagaattgtgaacctcacagaaaatgctggctattacttccgggtttcagctcagaacactttcggcatcagtgaccctctagaagtgtcctcagttgtgatcattaagagtccatttgaaaagccaggtgctcctggcaaaccaactattactgctgtcacaaaagattcttgtgttgtggcctggaagccacctgccagtgatggaggtgcaaagattagaaattactaccttgagaagcgtgagaagaagcagaataaatggatttctgtgacaacagaagaaattcgagaaactgtcttttcagtgaaaaaccttattgaaggtcttgaatacgagtttcgtgtgaaatgtgaaaatctaggtggggaaagtgaatggagtgaaatatcagaacccatcactcccaaatctgatgtcccaattcaggcaccacactttaaagaggaactgagaaatctaaatgtcagatatcagagcaatgctaccttggtctgcaaagtgactggtcatccaaaacctatcgtcaaatggtacagacaaggcaaagaaatcattgcagatggattaaaatataggattcaagaatttaagggtggctaccaccagctcatcattgcaagtgtcacagatgatgatgccacagtttaccaagtcagagctaccaaccaagggggatctgtgtctggcactgcctccttggaagtggaagttccagctaagatacacttacctaaaactcttgaaggcatgggagcagttcatgctctccgaggtgaagtggtcagcatcaagattcctttcagtggcaaaccagatcctgtgatcacctggcagaaaggacaagatctcattgacaataatggccactaccaagttattgtcacaagatccttcacatcacttgttttccccaatggggtagagagaaaagatgctggtttctatgtggtctgtgctaaaaacagatttggaattgatcagaagacagttgaactggatgtggctgatgttcctgacccacccagaggagtcaaagttagtgatgtctcacgagattctgtcaacttaacatggactgagccagcctctgatggtggcagcaaaatcaccaactacattgttgaaaaatgtgcaactactgcagaaagatggctccgtgtaggacaggcccgagaaacacgttataccgtgatcaacttatttggaaaaacaagttaccagttccgggtaatagctgaaaataaatttggtctgagcaagccttcagagccttcagaaccaaccataaccaaagaagataagaccagagctatgaactatgatgaagaggtagatgaaaccagggaagtctccatgactaaagcatctcactcttcaaccaaggaactctatgagaaatatatgattgctgaagatcttgggcgtggtgagtttggaattgtccatcgttgtgttgaaacatcctcaaagaagacatacatggccaaatttgttaaagtcaaagggactgatcaggttttggtaaagaaggaaatttccattctgaatattgctaggcatagaaacatcttacacctccatgaatcatttgaaagcatggaagaattagttatgatctttgagtttatatcaggacttgacatatttgagcgcattaacacaagtgcttttgaacttaatgaaagagaaattgtaagttatgttcaccaggtctgtgaagcacttcagtttttacacagtcataatattggacactttgacattagaccagaaaatatcatttaccaaaccagaagaagctctaccattaaaatcatagaatttggtcaagcccgtcagctgaaaccaggggacaacttcaggcttctattcactgccccagaatactatgcacctgaagtccaccagcatgatgttgtcagcacagccacagacatgtggtcacttggaacactggtatatgtgctattgagtggtatcaacccattcctggctgaaactaaccaacagatcattgagaatatcatgaatgctgaatatactttcgatgaggaagcattcaaagagattagcattgaagccatggattttgttgaccggttgttagtgaaagagaggaaatctcgcatgacagcatcggaggctctccagcacccatggttgaagcagaagatagaaagagtcagtactaaagttatcagaacattaaaacaccggcgttattaccacaccctgatcaagaaagacctcaacatggttgtgtcagcagcccggatctcctgtggtggtgcaattcgatctcagaagggagtgagtgttgctaaagttaaagtggcatccattgaaattggcccagtttctgggcagataatgcatgcagttggtgaagaaggaggacatgtcaaatatgtatgcaaaattgaaaattatgatcagtctacccaagtgacttggtactttggcgtccgacagctggagaacagtgagaaatacgaaatcacctacgaagatggagtggccatcctctatgtcaaagacattaccaaattagatgatggtacctacagatgcaaagtagtcaatgactatggtgaagacagttcttatgcagagctatttgttaaaggtgtgagagaagtctatgactattactgccgtagaaccatgaagaaaattaagcgcagaacagacacaatgagactcctggaaaggccaccagaatttaccctgcctctctataataagacagcttatgtaggtgaaaatgtccggtttggagtaactataactgtccacccagagcctcatgtaacatggtataaatcaggtcagaaaatcaaaccaggtgacaatgacaagaagtacacatttgagtcagacaagggtctttaccaattaacaatcaacagtgtcactacagatgatgacgctgaatatactgttgtggcaaggaacaaatatggtgaagacagctgtaaagcaaagctgacagtaaccctacacccacctccaacagatagtaccttaagacccatgttcaaaaggttactggcaaatgcagaatgccaagaaggccaaagtgtctgctttgagatcagagtgtctggcatccccccaccaacattaaaatgggagaaagatggtcagccactgtccctcgggcctaacattgaaattatccatgaaggcttggattattatgctctgcacatcagggacactttgcctgaagacacgggttattatagagtcacagccactaacacagctgggtccaccagctgccaggctcacctacaagtggaacgcctgaggtacaagaaacaggaattcaagagtaaggaggagcatgagcgacacgtacaaaaacaaattgacaaaaccctcagaatggctgaaattctttctggaactgaaagtgtaccactgacacaggtagctaaagaggctctgagagaagctgctgtcctttataaaccggctgtaagcaccaagactgtaaaaggggaattcagacttgagatagaagaaaagaaggaggagagaaaactccggatgccttatgatgtaccagagccacgcaagtataagcagactaccatagaagaagaccaacgcatcaagcagttcgtgcccatgtctgacatgaagtggtataaaaagatacgtgatcagtatgaaatgcctgggaaacttgacagagttgtacagaaacgacccaagcgcatccgcctttcaagatgggaacagttctatgtgatgcctcttccacgcattacagatcaatacagacctaaatggcgtattcctaaactgtcccaagatgatcttgagatagtgagaccagcccgccggcgtacaccttctcctgattatgacttttactaccgacctagaagacgttctcttggggacatctctgatgaagaattactcctccccattgatgactacttagcaatgaaaagaacagaggaagagaggctgcgtcttgaagaagagcttgagttaggtttttcagcttcacccccaagtcgaagccctccacactttgagctttctagcctacgttactcttcaccacaagctcatgtcaaggtggaggaaacaagaaaagacttcaggtattcaacctatcacatcccaacgaaggctgaagctagtacaagttatgcagaactgagggaacggcatgcccaggctgcgtacagacagccaaagcaacggcaaagaatcatggctgagagggaggatgaagagttgcttcgcccagttacgaccacccagcatctctcagaatacaaaagcgaacttgacttcatgtcaaaggaggaaaagtctagaaagaaatcaaggcgacaaagagaagtgacagaaataacagaaattgaggaagaatacgaaatctcaaaacatgctcaaagagaatcatcctcatctgcgtctagactactgagacgacggcgctccctgtctccaacttatattgagttaatgaggccagtgtctgagctgatccggtcacgtccacaaccggctgaggaatacgaagatgacacagaaagaaggtcacctactccagagagaactcgcccacgatcccccagccctgtgtctagtgagagatcactctcgagatttgagaggtctgcaagatttgatatcttttccaggtatgagtccatgaaagctgctttaaaaactcagaagacatcagaaaggaagtatgaagttttgagtcagcagcctttcacactggaccatgcccctcgaatcacactgagaatgcgctcgcacagggtaccatgtggccaaaatacacgttttattttaaatgttcagtctaagccaactgccgaggttaaatggtaccacaatggtgtggaactccaagaaagcagtaagattcattacaccaacacgagtggagtcctcaccctggaaattctggactgtcatactgatgacagtggaacctaccgtgctgtgtgcaccaactacaagggcgaagcttctgactatgcaacgttggacgtgacaggaggggattataccacctatgcttcccaacgcagagatgaagaggtccccagatctgttttccctgagctgacaagaacagaggcgtatgctgtttcatcatttaagaaaacatctgagatggaagcttcgtcttctgtcagggaagtgaaatcacagatgacggagacaagggaaagtctctcctcatatgaacactctgcatctgcagaaatgaaaagtgctgcattagaagaaaagtcactggaagaaaaatccacaaccagaaagatcaagacgactttggcagcaagaattctaacaaagccacggtccatgaccgtctacgagggcgagtctgcaaggttttcttgtgacaccgatggtgagccggtaccaactgtgacctggctgcgtaaaggacaagtgctaagtacttctgcccgccaccaagtgaccaccacaaagtacaaatcaacctttgagatctcttcagtccaggcttccgatgagggcaattacagcgtggtggtagaaaacagtgaagggaaacaagaagcagagttcactctgactattcaaaaggccagggtaactgaaaaggctgtgacatcaccaccaagagtcaaatccccagagcctcgggtgaaatccccagaagcagttaagtctccaaaacgagtgaaatctccagaaccttctcacccgaaagccgtatcacccacagagacaaaaccaacaccaacagagaaagttcagcacctcccagtctctgccccaccaaagattactcagttcctgaaagcagaagcttctaaagagattgcaaaactgacctgtgtggttgaaagcagtgtattaagggcaaaagaggtcacctggtataaagatggcaagaaactgaaggaaaatgggcatttccagtttcattattcagcagatggtacctatgagctcaaaatcaataacctcactgaatctgatcaaggagaatatgtttgtgagatttctggtgaaggtggaacgtctaaaaccaacttacaatttatggggcaagcctttaagagtatccatgagaaggtatcaaaaatatcagaaactaagaaatcagatcagaaaaccactgagtcaacagtaaccagaaaaactgaaccaaaagctcctgaaccaatttcctcaaaaccagtaattgttactgggttgcaggatacaactgtttcttcagacagtgttgctaaatttgcagttaaggctactggagaaccccggccaactgccatctggacaaaagatggaaaggccattacacaaggaggtaaatataaactctctgaagacaagggagggttcttcttagaaattcataagactgatacttctgacagtggactttatacttgtacagtaaaaaattcagctggatctgtgtcctctagctgcaaattaacaataaaagctataaaagatactgaggcacagaaagtctctacacaaaagacttctgaaattacacctcagaagaaagctgttgtccaagaggaaatttcccaaaaagccctaaggtctgaagaaattaagatgtcagaggcaaaatctcaagaaaagttagccctcaaagaggaagcttcaaaggttctgatttctgaagaagtcaagaaatcagcagcaacctccctggaaaaatccattgtccatgaggaaatcactaaaacatcacaggcatcagaagaagtcagaactcatgctgagattaaagcattttctactcagatgagcataaacgaaggtcaaagactggttttaaaagccaacattgctggtgccactgatgtgaaatgggtactgaatggcgtagagcttaccaactctgaggagtaccgatatggtgtctcaggcagcgatcagaccctaaccatcaagcaagccagtcacagagatgaaggaatcctcacctgcataagcaaaaccaaggaaggaatcgtcaagtgtcagtatgatttgacactgagcaaagaactctcagatgctccagccttcatctcacagcctagatctcaaaatattaatgaaggacaaaatgttctctttacttgtgaaatcagtggcgagccatcccctgaaatcgaatggtttaaaaacaacctgccaatttctatttcttcaaatgtcagcataagccgctccagaaatgtatactcccttgaaatccgaaatgcatcagtcagcgacagtggaaagtacacaattaaggccaaaaatttccgtggccagtgttcagctacagcttccttaatggtccttcctctagttgaagaaccttccagagaggtagtattgagaacaagtggtgacacaagcttgcaaggaagcttctcgtctcagtcagtccaaatgtctgcctccaagcaggaggcctccttcagcagtttcagcagcagcagtgctagcagcatgactgagatgaaatttgcaagcatgtctgcccaaagcatgtcctccatgcaagagtcctttgtagaaatgagttccagcagctttatgggaatatctaatatgacacaactggaaagctcaactagtaaaatgcttaaagcaggcataagaggaattccgcctaaaattgaagctcttccatctgatatcagcattgatgaaggcaaagttctaacagtagcctgtgctttcacgggtgagcctaccccagaagtaacatggtcctgtggtggaagaaaaatccacagtcaagaacaggggaggttccacattgaaaacacagatgacctgacaaccctgatcatcatggacgtacagaaacaagatggtggactttataccctgagtttagggaatgaatttggatctgactctgccactgtgaatatacatattcgatccatttaagagggcctgtgcccttatactctacactcattcttaacttttcgcaaacgtttcacacggactaatctttctgaactgtaaatatttaaagaaaaaaaagtagttttgtatcaacctaaatgagtcaaagttcaaaaatattcatttcaatcttttcataattgttgacctaagaatataatacatttgctagtgacatgtacatactgtatatagccggattaacggttataaagttttgtaccatttattttatgacattttacaatgtaagttttgaaactaactgttggtaggagaaagtttcttatggaacgaataccctgctcaacatttaatcaatctttgtgcctcaacatactgttgatgtctaagtatgcctcagtgggttgagaaaatccccattgaagatgtcctgtccacctaaaagagaatgatgctgtgcatatcacttgatatgtgcaccaatacctactgaatcagaaatgtaaggcattggtgatgtttgcatttaccctcctgtaagcaacactttaacgtcttacattttctctgatgatgtcacacaaaattatcatgacaaatattaccagagcaaagtgtaacggccaacactttgttcgctcattttacgctgtctctgacataaggagtgcctgaatagcttggaaaagtaacatctcctggccatcccttcatttaaccaagctattcaagtattcctatgccagagcagtgccaactcttggaggtcccagagtgcagccaatgcctttgtgtggtagttctaaattttaattgcacctgaaaaacctgggcacctaagcaatgagccacagcaaaaagtaaagaacaacaacaaaataaagctgttgttaaattttaaacaatattactaattgcccaaaatgtcaatttgatgtagttcttttcatgcaagtataaattcaattgttagttataattgttggacctccttgagatagtaacaacaaaataaagcaagctatctgcacctcaaaa

SEQ ID NO: 5012 - DNA, 1940 bp, Homo sapiens; identical to SEQ ID NO: 681

SEQ ID NO: 5013 - DNA, 3545 bp, Homo sapiens
gccgcactttcactctccgtcagccgcattgcccgctcggcgtccggcccccgacccgcgctcgtccgcccgcccgcccgcccgcccgcgccatgaacgccaaggtcgtggtcgtgctggtcctcgtgctgaccgcgctctgcctcagcgacgggaagcccgtcagcctgagctacagatgcccatgccgattcttcgaaagccatgttgccagagccaacgtcaagcatctcaaaattctcaacactccaaactgtgcccttcagattgtagcccggctgaagaacaacaacagacaagtgtgcattgacccgaagctaaagtggattcaggagtacctggagaaagctttaaacaagaggttcaagatgtgagagggtcagacgcctgaggaacccttacagtaggagcccagctctgaaaccagtgttagggaagggcctgccacagcctcccctgccagggcagggccccaggcattgccaagggctttgttttgcacactttgccatattttcaccatttgattatgtagcaaaatacatgacatttatttttcatttagtttgattattcagtgtcactggcgacacgtagcagcttagactaaggccattattgtacttgccttattagagtgtctttccacggagccactcctctgactcagggctcctgggttttgtattctctgagctgtgcaggtggggagactgggctgagggagcctggccccatggtcagccctagggtggagagccaccaagagggacgcctgggggtgccaggaccagtcaacctgggcaaagcctagtgaaggcttctctctgtgggatgggatggtggagggccacatgggaggctcacccccttctccatccacatgggagccgggtctgcctcttctgggagggcagcagggctaccctgagctgaggcagcagtgtgaggccagggcagagtgagacccagccctcatcccgagcacctccacatcctccacgttctgctcatcattctctgtctcatccatcatcatgtgtgtccacgactgtctccatggccccgcaaaaggactctcaggaccaaagctttcatgtaaactgtgcaccaagcaggaaatgaaaatgtcttgtgttacctgaaaacactgtgcacatctgtgtcttgtttggaatattgtccattgtccaatcctatgtttttgttcaaagccagcgtcctcctctgtgaccaatgtcttgatgcatgcactgttccccctgtgcagccgctgagcgaggagatgctccttgggccctttgagtgcagtcctgatcagagccgtggtcctttggggtgaactaccttggttcccccactgatcacaaaaacatggtgggtccatgggcagagcccaagggaattcggtgtgcaccagggttgaccccagaggattgctgccccatcagtgctccctcacatgtcagtaccttcaaactagggccaagcccagcactgcttgaggaaaacaagcattcacaacttgtttttggtttttaaaacccagtccacaaaataaccaatcctggacatgaagattctttcccaattcacatctaacctcatcttcttcaccatttggcaatgccatcatctcctgccttcctcctgggccctctctgctctgcgtgtcacctgtgcttcgggcccttcccacaggacatttctctaagagaacaatgtgctatgtgaagagtaagtcaacctgcctgacatttggagtgttccccttccactgagggcagtcgatagagctgtattaagccacttaaaatgttcacttttgacaaaggcaagcacttgtgggtttttgttttgtttttcattcagtcttacgaatacttttgccctttgattaaagactccagttaaaaaaaattttaatgaagaaagtggaaaacaaggaagtcaaagcaaggaaactatgtaacatgtaggaagtaggaagtaaattatagtgatgtaatcttgaattgtaactgttcttgaatttaataatctgtagggtaattagtaacatgtgttaagtattttcataagtatttcaaattggagcttcatggcagaaggcaaacccatcaacaaaaattgtcccttaaacaaaaattaaaatcctcaatccagctatgttatattgaaaaaatagagcctgagggatctttactagttataaagatacagaactctttcaaaaccttttgaaattaacctctcactataccagtataattgagttttcagtggggcagtcattatccaggtaatccaagatattttaaaatctgtcacgtagaacttggatgtacctgcccccaatccatgaaccaagaccattgaattcttggttgaggaaacaaacatgaccctaaatcttgactacagtcaggaaaggaatcatttctatttctcctccatgggagaaaatagataagagtagaaactgcagggaaaattatttgcataacaattcctctactaacaatcagctccttcctggagactgcccagctaaagcaatatgcatttaaatacagtcttccatttgcaagggaaaagtctcttgtaatccgaatctctttttgctttcgaactgctagtcaagtgcgtccacgagctgtttactagggatccctcatctgtccctccgggacctggtgctgcctctacctgacactcccttgggctccctgtaacctcttcagaggccctcgctgccagctctgtatcaggacccagaggaaggggccagaggctcgttgactggctgtgtgttgggattgagtctgtgccacgtgtttgtgctgtggtgtgtccccctctgtccaggcactgagataccagcgaggaggctccagagggcactctgcttgttattagagattacctcctgagaaaaaaggttccgcttggagcagaggggctgaatagcagaaggttgcacctcccccaaccttagatgttctaagtctttccattggatctcattggacccttccatggtgtgatcgtctgactggtgttatcaccgtgggctccctgactgggagttgatcgcctttcccaggtgctacacccttttccagctggatgagaatttgagtgctctgatccctctacagagcttccctgactcattctgaaggagccccattcctgggaaatattccctagaaacttccaaatcccctaagcagaccactgataaaaccatgtagaaaatttgttattttgcaacctcgctggactctcagtctctgagcagtgaatgattcagtgttaaatgtgatgaatactgtattttgtattgtttcaattgcatctcccagataatgtgaaaatggtccaggagaaggccaattcctatacgcagcgtgctttaaaaaataaataagaaacaactctttgagaaacaacaatttctactttgaagtcataccaatgaaaaaatgtatatgcacttataattttcctaataaagttctgtactcaaatgtagccaccaa

SEQ ID NO: 5014 - DNA, 8704 bp, Homo sapiens; identical to SEQ ID NO: 162

SEQ ID NO: 5015 - DNA, 8728 bp, Homo sapiens
gaatgcaggtgagaaaaggcacggactctgcggctgcgaacccaaacttgggcaccgcacggtgcgcactgctcagccttcgcccccgtgggcgaaaggctgctgcggtttcaggcggctgcttcgtgactaatgaccttgcgcagagttgttaagaaaaaagagaaacccgcgctctccggggtgagaagggactgactctgggcgtctctgaagatggctcgggcttctctttggcgcgccggggggaccctgacactgaccgctctgtgacgcgagtagtctcccctgcaccgtgcccgaagcgacgtgccgggggatttttcattctcgatctgttgactggctcccccgctgcatgagcagagtcggagttgagactggcttgttgctggccccagcgcctggtgcaggaagcgactcacgtttgtctgggtggccggagccggagcagagcctgggtttggagtgagtgcctggaacgtgaattggactcaactcgagtagcagcaaagaccagcgggctggcaggcgggggaggctgcaggctcattccccacctcttcccagccccactgcccgtctgccggagcggttctggccccttccgacagagcggggactagagccggggattctccgcccgctgaggggatgactctgggttgggggagcgccgaacccgcggcgcgcagtgtcccgtgaactgtgagtactgcgactgaacggcggcaggcgagcgggcgattagcacccattgcatgaattatgaaacaataactttcggaagaagcaggaggaaaaaaagaagcatctatcgctgccctcccacccccattcccggccaactctccacgccgcttttgccccctccctcccctccctctcgctccttcctttccgggagaggggagaggactcgggggagggcaggcggccggccccggaggaggggggcgccgagggggctgtggttagaaggagcagtagcagcagcagcaggagaagatgctgaggatgcggaccgcgggatgggcgcgcggctggtgcttgggctgctgcctcctcctgccgctctcgctcagcctggcggccgccaagcagctcctccggtaccggctggccgaggagggccccgccgacgtccgcatcggcaacgtggcttcagacctgggcatcgtgaccggatcgggtgaggtgactttcagcctggagtccggttccgagtacctgaagatcgacaacctcactggcgagctgagcacgagcgagcggcgcatcgaccgcgagaagctgccccagtgtcagatgatcttcgacgagaacgagtgcttcctggacttcgaggtgtcggtgatcgggccctcgcagagctgggtggacctgtttgagggtcaggtcatcgtgcttgacatcaacgacaacacgcccaccttcccgtcgcccgtgctcacgctcacggtggaggagaatcggccggtgggcacactttacctgctgcccacagccaccgaccgcgacttcggccgcaacggcatcgagcgctacgagctgctccaggagcccggaggcggcggcagcggcggcgagagccggcgcgccggggcggccgacagcgccccctaccccgggggcggcgggaacggcgcgagcggcggcggctcgggaggctccaagcggcggctggacgcatcagagggcggcggcggcaccaaccccggcggccgcagcagcgtgttcgagctgcaggtggcggacaccccggacggcgagaagcagccgcagctgatcgtgaagggggcgctggaccgcgagcagcgcgactcctacgagctgaccctgcgagtgcgcgacggcggcgacccgcctcgctcctcgcaggccatcctacgggtcctcatcaccgacgtgaacgacaacagcccccgcttcgagaagagcgtgtacgaggccgacttggctgagaacagcgccccggggacccccatcctgcaactgcgcgcagccgacttggacgtgggggtcaacgggcagatcgaatacgtgttcggggcggccaccgagtcggtgaggcggctgctgcgccttgacgagacgtccggctggctcagcgtcctgcaccggatcgaccgcgaggaggtgaaccagctgcgcttcacggtcatggcccgcgaccgcgggcagccccccaagaccgacaaggccaccgtggtccttaacatcaaagacgagaacgacaacgtgccgtccattgaaatccgcaagattgggcgcatccccctcaaggacggggtggccaacgtggccgaggacgttctggtcgacacccccatcgctctggtgcaggtgtccgaccgagaccaaggcgagaacggggtggtcacctgcaccgtggtgggcgacgtgcccttccagctcaagccagccagcgacaccgagggcgaccagaacaagaaaaagtacttcttgcacacctcgacccctctggactatgaggccacccgggagttcaacgtggtcatcgtggcggtggactcaggcagccccagcctctcgagcaacaactccctgattgtcaaggtgggagacaccaacgacaacccgcccatgttcggccagtcggtggtggaggtttacttccctgagaacaacatcccgggcgagagggtggccacggtgctggcgacagacgcagacagcggtaagaacgccgagatcgcctactcgctggactcctctgtgatggggatctttgccatcgatcccgattctggggacatcctggtcaataccgtgctggaccgcgagcagactgacaggtatgagtttaaagttaacgccaaagacaaaggcatccccgtgctgcagggcagcactacggtgattgtgcaggtggctgataaaaatgacaatgaccctaagtttatgcaggacgtcttcaccttttatgtgaaagaaaacttgcagcccaacagccctgtggggatggtcaccgtgatggatgctgacaaggggcggaatgcagagatgagcctgtacatagaggagaacaataacattttttctattgaaaatgacacggggaccatttactccacaatgtcttttgaccgggaacatcagaccacatacactttcagagtcaaggctgtggatgggggagatcctcccagatctgccacagctacagtctcgctttttgtgatggatgaaaatgacaatgctcccacagttacccttcccaaaaacatttcctacactttactgccaccttcgagtaatgtcaggacagtagtagctacagtgttggcaacagacagtgatgatggcatcaatgcagacctgaactacagcattgtgggaggaaatcccttcaagctgtttgaaattgatcccactagtggtgtggtttccttagtgggaaaactcacccaaaagcattatggcttgcacaggttggtggtgcaagtgaatgacagtgggcagccttcccagtccaccacgactctggtgcacgtgtttgtcaatgaaagtgtttctaatgcaactgcgattgactcccagatagctagaagtttgcacatcccactcacccaggatatagctggtgacccaagctatgaaattagcaaacagagactcagtattgtcattggcgtggttgctggcattatgacggtgattctaatcatcttaattgtagtgatggcaaggtactgcaggtccaaaaataaaaatggctatgaagccggcaaaaaagatcacgaagacttttttacaccccaacagcatgacaaatctaaaaagcctaaaaaggacaagaaaaacaaaaaatctaagcagcctctctacagcagcattgtcactgtggaggcttctaagccaaatggacagaggtatgatagtgtcaatgagaagctgtcagacagcccaagcatggggcgatacaggtccgttaatggtgggcccggcagtcctgacctggcaaggcattacaaatctagttccccattgcctactgttcagcttcatccccagtcaccaactgcaggaaaaaaacaccaggccgtacaagatctaccaccagccaacacatttgtgggagcaggagacaacatttcaattggatcagatcactgctctgagtacagctgtcaaaccaataacaagtacagcaaacagccatttcgtagagtgacgttttctgttgtgagtcagcctcaggacccacatcaggggtcactgcagagttgctatgacagcgggctggaggagtcagaaacaccaagcagtaagagttcatcagggccaagactgggtgcgcttccactcccagaggacaactatgaaaggaccacgccggatggcagtgttggtgaggcagagcatatggaaaatgattcaaggcctcttccagatgtagccctgactgggaagtgcactcgtgagtgtgatgagtatggccactcagactcctgctggatgccggtccgcacttctccggagaggaagaagagccagcctaaactgtccactttcatgcctgttgatgaacgaggaagccaggaaaagctggccaatggggaggccgccatcatgggtgaccgcaacagaaacctcctgaacaaaaagttgacctcatcctatgagaccttcagtgcagctagtttcagcaaaaatgaggaagccaaccctgaggatattccccttacaaaaacaggggaatataagccatctcctgtcaatactctcactagaagagaagtttacctgtaggctataaaggagcaacagcaaagttctttacatgtatgaaaaggagaataaggggcaaaaaccttacaaagcaaaacgtttaatcacaaagagggggctaccaaagagacaaagctttgcctgccacttctgcctccagatcaggcctttagtgatactgttagcctgattctactgtacaatgtagaaaccatccttgttacttgcatgtctaaccccttcactgattcccaacactcactttctcttccccacccctctccaaaaaaaaaaaaacaaaaagaaaagaaaaaaaaagggggatagttgcaagtttctttcacagtaactgtacgaagcctgattagcagaacacaacacaccctcattatccctaagctgaagcatgattttagtcactttgattttgttcgagtgtcatctggctggtcaaaaataagcaggacagataaaatgtatttcagacataccatcagaaaatggtttatcaccatcaaaggcaatcctttgaaagtgatagagtccctctaaaggtacagtccttagaaagagggactgtattaaaaagtattttgggaatatcaaagctttaatattccaacaaagactaagagaaaaacaatactcagtgggtgattgcagtcctaaattgtcatatgttgttattttcaggtcaagagcatcaacttcaattccatacattcaccaaatattctcagtatacacacagtcttgattacatgtatcaatttcaccagttatgacttctaaaaattatatatattttttcagaacaagaccactattattaactaacttgaacaattgtatcatccaaaggccaaagatcatatggcagatcagggaagtcatgaagttgatttggtcttgacgtggaaaaccattaaacaacaaaagcaactgaacccatgtatgcacagaaacaatcaaacactagttcattttatagtgcccaggaaaatgttccttcttttaaaatggattttatttgaaagcgcagaaaatgaaaactagtgagatatatttttggtattataataggcaattggttgaggttcaagtttagtttcaggtaatattatcagggaagattccatgttttaaaatagtatttatggatcatgggtaggttaagaaagatgcattggcatatagtcttgatagttaagtccacgattatcattttagaatccaggctatgcttgctgctctttttatccacattttaaattacaattgcattttttacttgttcagtgcacactttgatgcaccacaagtgcattaattttgaatcgtgtgcaatatagaaatattttgagactcacaacattgaaacaaggtgacaccctagttgactttatcactaatgtgatttgaacattatttaaacaaatctagactgaacatgaaagaaaggagttttgggcagtgacatttttcacagaatgtatatctcaaaggtgaaagcagagtttttccagtgcaataaaaagaaacagaatatgcagattttgagctactcactctatagaggataacctaacacggctgaaaattgagctgggacattcagacgaaagtgacaatccatggacagaatagggaataacaggtgtgaagagaacaaacttatcactgaatgtttgcaagctggttaaggcatagccttgatggctctctagcaaactgtagaaacaatgtagctttgggtagtttcatgctttgcagaatttcttagactataaagtgacacagcctggaatataggttgataattcactataggtcttcaaaatacttatctttgaaaaccgcttctctgtttggtggggtacaatttgggggtcatttccttatgctctttcttaaatggagttttcattttgatgttagtttatgtataataggtaggatgcaaaaagatatgtaattgaaacaaaaaacattggactaaaatatcagtaattgaacatgtttatgtttgattattatttacactatggaaagatgcaattctagtactttgttaggaaactgcattaaagcagttctgccttgtataatctgtaagtacctattaagacaaaatacttctaaagatacttatgaaatgtatacacattttttcttgcacgttacaaagaaaatactcaattgcataacacggatgtttgacaaacttttttttttttaatgcatttctttctttcatgagacattgaaaccactgatagctcatttcaccctatcttaaacccttctcttgtctataaaactaatacgggtcacaccggaccttcggattaattggatccacattccccaatgatgtttgcaccccattcaagatagccatgccattgtcatttaactcgtgaacctctctttaaaactaaaatggatgtgaaagaataaaattcagtgtactgtaagtattcacagtaattctagtagaattagctgtcataacatgtttattatataatgagctggcatgacacagaaatatattttgtgtttgtatgacttttattttaaataggttaaatctggtgccactccatatatagagtgcttttgaaaaaaaatcaataaaaagaaacaaaaaaaataaatgagtgaatgcaaaataagcaactgtgccttttatacctgttgttacggtaaaaaaacggttgttgggtttggacaatgaggggaaatgggctattcccaacttttttgatcctgtatatttgtccatgtttattttctgaacataataaataatatattaaaaatttgccttctgacaaactcagataatggaccagtcttaaatattgttatgtcataaagcaaagttaaggcattaatatgggctgcttaaatctgactagaagatgaaagcgtttattgtaagtgtaacacagagatactatcaggagtgaaatcagtccatttggcaaggtaaaatactgatttagagttttattctttatttcttttttgttgtgtttctttcagctatggtttcattttggttgtacagtatataaaccatatttgttttctgtacacaagactctcaagtgaattttgcatgcattatacattaggacacatttataaattaatgagtaactatataaatttatgtgtattaaaacgtctgtagcttcaatctaaaatctactgctctttctgaatctccagatatcatttctgtatggtttctgactggcctgctgcctgagtttcagaaaacaagggaggcattatttttatgggaggaggaactaagatggtactgaggatgtctgactgaaacactaccctaggaagctgtcttgtaggaaaatagaataaaacacacagaccagaagaaattgtcaagaagcaaacagccatccaaaaacagtcatgagaaatctaaagacctaaataatcttaggtatatgctctcagtgagaaataagaaaatgtgtccttaagcaaaaataaataaataaataaataaataaataaataataaaaagtgagcatgatcatgaatatagtaaatcttgtgagttgtgacctaggtgaaggtgtaatgataacatctggaggaagcatcatttgttcagctacctagggtttactttcagacttttcctacagtttaaagcacttgcgttcagtgtggtacgatctgtttgtaatgttaatcattgactattgttctgctacttggatgttgatagtgaagcagagaacaatttatcatcgtttattatgagtcactatgcacgcaactatgcttaacatggcgaaatgtattaaacactcgtccaactatttatgaaatactttgcataatttaatttgcttttgtacagttttatgtaaataaattgcttgtcatttttgtctctgcaaattaaaatataacatggtcaaatggttt

SEQ ID NO: 5016 - DNA, 1743 bp, Homo sapiens; identical to SEQ ID NO: 691

SEQ ID NO: 5017 - DNA, 1257 bp, Homo sapiens
ctggggagagtatatactgaatttagcttctgagacatgatgctcttcctttttaattaacccagaacttagcagcttatctatttctctaatctcaaaacatccttaaactgggggtgatacttgagtgagagaattttgcaggtattaaatgaactatcttcttttttttttttctttgagacagagtcttgctctgtcacccaggctggagtgcagtggcgtgatctcagctcactgcaacctccgcctcccgggttcaagtgattctcctgcctcagcctcctgagtagctgggattacagtcccaggacatcaaagctctgcagaaagaactcgagcaatttgccaagctcctgaagcagaagaggatcaccctgggatatacacaggccgatgtggggctcaccctgggggttctatttgggaaggtattcagccaaacgaccatctgccgctttgaggctctgcagcttagcttcaagaacatgtgtaagctgcggcccttgctgcagaagtgggtggaggaagctgacaacaatgaaaatcttcaggagatatgcaaagcagaaaccctcgtgcaggcccgaaagagaaagcgaaccagtatcgagaaccgagtgagaggcaacctggagaatttgttcctgcagtgcccgaaacccacactgcagcagatcagccacatcgcccagcagcttgggctcgagaaggatgtggtccgagtgtggttctgtaaccggcgccagaagggcaagcgatcaagcagcgactatgcacaacgagaggattttgaggctgctgggtctcctttctcagggggaccagtgtcctttcctctggccccagggccccattttggtaccccaggctatgggagccctcacttcactgcactgtactcctcggtccctttccctgagggggaagcctttccccctgtctccgtcaccactctgggctctcccatgcattcaaactgaggtgcctgcccttctaggaatgggggacagggggaggggaggagctagggaaagaaaacctggagtttgtgccagggtttttgggattaagttcttcattcactaaggaaggaattgggaacacaaagggtgggggcaggggagtttggggcaactggttggagggaaggtgaagttcaatgatgctcttgattttaatcccacatcatgtatcacttttttcttaaataaagaagcctgggacacagtagatagacacacttaaaaaaaaaaa

SEQ ID NO: 5018 - DNA, 3233 bp, Homo sapiens; identical to SEQ ID NO: 1576

SEQ ID NO: 5019 - DNA, 5358 bp, Homo sapiens; identical to SEQ ID NO: 805

SEQ ID NO: 5020 - DNA, 3638 bp, Homo sapiens; identical to SEQ ID NO: 2444

SEQ ID NO: 5021 - DNA, 2774 bp, Homo sapiens; identical to SEQ ID NO: 122

SEQ ID NO: 5022 - DNA, 2696 bp, Homo sapiens
agttctcaagtcagatctcttctcataagggcactgtgtggagcttctgagatctgtggaggtttttctctgcaaatgcaggaagaaatcaggtggatggatgcataattatggccctgctcctggtctctttgctggcattcctgagcttgggctcaggatgtcatcatcggatctgtcactgctctaacagggtttttctctgccaagagagcaaggtgacagagattccttctgacctcccgaggaatgccattgaactgaggtttgtcctcaccaagcttcgagtcatccaaaaaggtgcattttcaggatttggggacctggagaaaatagagatctctcagaatgatgtcttggaggtgatagaggcagatgtgttctccaaccttcccaaattacatgaaattagaattgaaaaggccaacaacctgctctacatcaaccctgaggccttccagaaccttcccaaccttcaatatctgttaatatccaacacaggtattaagcaccttccagatgttcacaagattcattctctccaaaaagttttactatggctgaataagaatgggattcaagaaatacacaactgtgcattcaatggaacccaactagatgagctgaatctaagcgataataataatttagaagaattgcctaatgatgttttccacggagcctctggaccagtcattctagatatttcaagaacaaggatccattccctgcctagctatggcttagaaaatcttaagaagctgagggccaggtcgacttacaacttaaaaaagctgcctactctggaaaagcttgtcgccctcatggaagccagcctcacctatcccagccattgctgtgcctttgcaaactggagacggcaaatctctgagcttcatccaatttgcaacaaatctattttaaggcaagaagttgattatatgactcaggctaggggtcagagatcctctctggcagaagacaatgagtccagctacagcagaggatttgacatgacgtacactgagtttgactatgacttatgcaatgaagtggttgacgtgacctgctcccctaagccagatgcattcaacccatgtgaagatatcatggggtacaacatcctcagagtcctgatatggtttatcagcatcctggccatcactgggaacatcatagtgctagtgatcctaactaccagccaatataaactcacagtccccaggttccttatgtgcaacctggcctttgctgatctctgcattggaatctacctgctgctcattgcatcagttgatatccataccaagagccaatatcacaactatgccattgactggcaaactggggcaggctgtgatgctgctggctttttcactgtctttgccagtgagctgtcagtctacactctgacagctatcaccttggaaagatggcataccatcacgcatgccatgcagctggactgcaaggtgcagctccgccatgctgccagtgtcatggtgatgggctggatttttgcttttgcagctgccctctttcccatctttggcatcagcagctacatgaaggtgagcatctgcctgcccatggatattgacagccctttgtcacagctgtatgtcatgtccctccttgtgctcaatgtcctggcctttgtggtcatctgtggctgctatatccacatctacctcacagtgcggaaccccaacatcgtgtcctcctctagtgacaccaggatcgccaagcgcatggccatgctcatcttcactgacttcctctgcatggcacccatttctttctttgccatttctgcctccctcaaggtgcccctcatcactgtgtccaaagcaaagattctgctggttctgtttcaccccatcaactcctgtgccaaccccttcctctatgccatctttaccaaaaactttcgcagagatttcttcattctgctgagcaagtgtggctgctatgaaatgcaagcccaaatttataggacagaaacttcatccactgtccacaacacccatccaaggaatggccactgctcttcagctcccagagtcaccagtggttccacttacatacttgtccctctaagtcatttagcccaaaactaaaacacaatgtgaaaatgtatctgagtattgaatgataattcagtcttgcctttgaagggtatgtcacaaagagctgacagtgcttctacacatttcatctaatttaatattcctggcatacctttaaggtaaattggtcaggaactattaattccatgtgatacattaggaagctgaattattagtaacaacaataataattaaagaatgcaatactgtattacatattttatccttatatatgttatttttgcacgttatgttcaaagtgcttttgttcagatatctcaagtgatccctgttaaataagcaggacagggattattcttggagttttacaaatgaggaaaccacgactcaaagagttaagtgacttgttcaaaattgtttagtttgtaagaggcagagccaggattaggtattccgactcccagagaatttcccagagaagcaccatggtattcattcattcattcattcaacaaatattaattgaacacccatctgaagcctttgtaatgcgtcagtgtggataggctgaaatacatttcccagatttcccttcctcatgtgttt

SEQ ID NO: 5023 - DNA, 3189 bp, Homo sapiens; identical to SEQ ID NO: 1468

SEQ ID NO: 5024 - DNA, 5949 bp, Homo sapiens; identical to SEQ ID NO: 2528

SEQ ID NO: 5025 - DNA, 3757 bp, Homo sapiens; identical to SEQ ID NO: 145

SEQ ID NO: 5026 - DNA, 1086 bp, Homo sapiens
catggcgggacacctggcttcagatttcgccttctcgccccctccaggtggtggaggtgatgggccaggggggccggagccgggctgggttgatcctcggacctggctaagcttccaaggccctcctggagggccaggaatcgggccgggggttgggccaggctctgaggtgtgggggattcccccatgccccccgccgtatgagttctgtggggggatggcgtactgtgggccccaggttggagtggggctagtgccccaaggcggcttggagacctctcagcctgagggtgaagcaggagtcggggtggagagcaactccgatggggcctccccggagccctgcaccgtcacccctggcgccgtgaagctggagaaggagaagctggagcaaaacccggaggagtcccaggacatcaaagctctgcagaaagaactcgagcaatttgccaagctcctgaagcagaagaggatcaccctgggatatacacaggccgatgtggggctcaccctgggggttctatttgggaaggtattcagccaaacgaccatctgccgctttgaggctctgcagcttagcttcaagaacatgtgtaagctgcggcccttgctgcagaagtgggtggaggaagctgacaacaatgaaaatcttcaggagatatgcaaagcagaaaccctcgtgcaggcccgaaagagaaagcgaaccagtatcgagaaccgagtgagaggcaacctggagaatttgttcctgcagtgcccgaaacccacactgcagcagatcagccacatcgcccagcagcttgggctcgagaaggatgtggtccgagtgtggttctgtaaccggcgccagaagggcaagcgatcaagcagcgactatgcacaacgagaggattttgaggctgctgggtctcctttctcagggggaccagtgtcctttcctctggccccagggccccattttggtaccccaggctatgggagccctcacttcactgcactgtactcctcggtccctttccctgagggggaagcctttccccctgtctctgtcaccactctgggctctcccatgcattcaaactgagg

SEQ ID NO: 5027 - DNA, 1086 bp, Homo sapiens
catggcgggacacctggcttcagatttcgccttctcgccccctccaggtggtggaggtgatgggccaggggggccggagccgggctgggttgatcctcggacctggctaagcttccaaggccctcctggagggccaggaatcgggccgggggctgggccaggctctgaggtgtgggggattcccccatgccccccgccgtatgagttctgtggggggatggcgtactgtgggccccaggttggagtggggctagtgccccaaggcggcttggagacctctcagcctgagggtgaagcaggagtcggggtggagagcaactccgatggggcctccccggagccctgcaccgtcacccctggtgccgtgaagctggagaaggagaagctggagcaaaacccggaggagtcccaggacatcaaagctctgcagaaagaactcgagcaatttgccaagctcctgaagcagaagaggatcaccctgggatatacacaggccgatgtggggctcaccctgggggttctatttgggaaggtattcagccaaacgaccatctgccgctttgaggctctgcagcttagcttcaagaacatgtgtaagctgcggcccttgctgcagaagtgggtggaggaagctgacaacaatgaaaatcttcaggagatatgcaaagcagaaaccctcgtgcaggcccgaaagagaaagcgaaccagtatcgagaaccgagtgagaggcaacctggagaatttgttcctgcagtgcccgaaacccacactgcagcagatcagccacatcgcccagcagcttgggctcgagaaggatgtggtccgagtgtggttctgtaaccggcgccagaagggcaagcgatcaagcagcgactatgcacaacgagaggattttgaggctgctgggtctcctttctcagggggaccagtgtcctttcctctggccccagggccccattttggtaccccaggctatgggagccctcacttcactgcactgtactcctcggtccctttccctgagggggaagcctttccccctgtctctgtcaccactctgggctctcccatgcattcaaactgagg

SEQ ID NO: 5028 - DNA, 1086 bp, Homo sapiens
catggcgggacacctggcttcagatttcgccttctcgccccctccaggtggtggaggtgatgggccaggggggccggagccgggctgggttgatcctcggacctggctaagcttccaaggccctcctggagggccaggaatcgggccgggggttgggccaggctctgaggtgtgggggattcccccatgccccccgccgtatgagttctgtggggggatggcgtactgtgggccccaggttggagtggggctagtgccccaaggcggcttggagacctctcagcctgagggtgaagcaggagtcggggtggagagcaactccgatggggcctccccggagccctgcaccgtcacccctggtgccgtgaagctggagaaggagaagctggagcaaaacccggaggagtcccaggacatcaaagctctgcagaaagaactcgagcaatttgccaagctcctgaagcagaagaggatcaccctgggatatacacaggccgatgtggggctcaccctgggggttctatttgggaaggtattcagccaaacgaccatctgccgctttgaggctctgcagcttagcttcaagaacatgtgtaagctgcggcccttgctgcagaagtgggtggaggaagctgacaacaatgaaaatcttcaggagatatgcaaagcagaaaccctcgtgcaggcccgaaagagaaagcgaaccagtatcgagaaccgagtgagaggcaacctggagaatttgttcctgcagtgcccgaaacccacactgcagcagatcagccacatcgcccagcagcttgggctcgagaaggatgtggtccgagtgtggttctgtaaccggcgccagaagggcaagcgatcaagcagcgactatgcacaacgagaggattttgaggctgctgggtctcctttctcagggggaccagtgtcctttcctctggccccagggccccattttggtaccccaggctatgggagccctcacttcactgcactgtactcctcggtccctttccctgagggggaagcctttccccctgtctctgtcaccactctgggctctcccatgcattcaaactgagg

SEQ ID NO: 5029 - DNA, 1086 bp, Homo sapiens
catggcgggacacctggcttcagatttcgccttctcgccccctccaggtggtggaggtgatgggccaggggggccggagccgggctgggttgatcctcggacctggctaagcttccaaggccctcctggagggccaggaatcgggccgggggttgggccaggctctgaggtgtgggggattcccccatgccccccgccgtatgagttctgtggggggatggcgtactgtgggccccaggttggagtggggctagtgccccaaggcggcttggagacctctcagcctgagggtgaagcaggagtcggggtggagagcaactccgatggggcctccccggagccctgcaccgtcacccctggtgccgtgaagctggagaaggagaagctggagcaaaacccggaggagtcccaggacatcaaagctctgcagaaagaactcgagcaatttgccaagctcctgaagcagaagaggatcaccctgggatatacacaggccgatgtggggctcaccctgggggttctatttgggaaggtattcagccaaacgaccatctgccgctttgaggctctgcagcttagcttcaagaacatgtgtaagctgcggcccttgctacagaagtgggtggaggaggctgacaacaatgaaaatcttcaggagatatgcaaagcagaaaccctcgtgcaggcccgaaagagaaagcgaaccagtatcgagaaccgagtgagaggcaacctggagaatttgttcctgcagtgcccgaaacccacactgcagcagatcagccacatcgcccagcagcttgggctcgagaaggatgtggtccgagtgtggttctgtaaccggcgccagaagggcaagcgatcaagcagcgactatgcacaacgagaggattttgaggctgctgggtctcctttctcagggggaccagtgtcctttcctctggccccagggccccattttggtaccccaggctatgggagccctcacttcactgcactgtactcctcggtccctttccctgagggggaagcctttccccctgtctctgtcaccactctgggctctcccatgcattcaaactgagg

SEQ ID NO: 5030 - DNA, 1086 bp, Homo sapiens
catggcgggacacctggcttcagatttcgccttctcgccccctccaggtggtggaggtgatgggccaggggggccggagccgggctgggttgatcctcggacctggctaagcttccaaggccctcctggagggccaggaatcgggccgggggttgggccaggctctgaggtgtgggggattcccccatgccccccgccgtatgagttctgtggggggatggcgtactgtgggccccaggttggagtggggctagtgccccaaggcggcttggagacctctcagcctgagggtgaagcaggagtcggggtggagagcaactccgatggggcctccccggagccctgcaccgtcacccttggtgccgtgaagctggagaaggagaagctggagcaaaacccggaggagtcccaggacatcaaagctctgcagaaagaactcgagcaatttgccaagctcctgaagcagaagaggatcaccctgggatatacacaggccgatgtggggctcaccctgggggttctatttgggaaggtattcagccaaacgaccatctgccgctttgaggctctgcagcttagcttcaagaacatgtgtaagctgcggcccttgctgcagaagtgggtggaggaagctgacaacaatgaaaatcttcaggagatatgcaaagcagaaaccctcgtgcaggcccgaaagagaaagcgaaccagtatcgagaaccgagtgagaggcaacctggagaatttgttcctgcagtgcccgaaacccacactgcagcagatcagccacatcgcccagcagcttgggctcgagaaggatgtggtccgagtgtggttctgtaaccggcgccagaagggcaagcgatcaagcagcgactatgcacaacgagaggattttgaggctgctgggtctcctttctcagggggaccagtgtcctttcctctggccccagggccccattttggtaccccaggctatgggagccctcacttcactgcactgtactcctcggtccctttccctgagggggaagcctttccccctgtctctgtcaccactctgggctctcccatgcattcaaactgagg

SEQ ID NO: 5031 - DNA, 1086 bp, Homo sapiens
catggcgggacacctggcttcagatttcgccttctcgccccctccaggtggtggaggtgatgggccaggggggccggagccgggctgggttgatcctcggacctggctaagcttccaaggccctcctggagggccaggaatcgggccgggggttgggccaggctctgaggtgtgggggattcccccatgccccccgccgtatgagttctgtggggggatggcgtactgtgggccccaggttggagtggggctagtgccccaaggcggcttggagacctctcagcctgagggtgaagcaggagtcggggtggagagcaactccgatggggcctccccggagccctgcaccgtcacccctggtgccgtgaagctggagaaggagaagctggagcaaaacccggaggagtcccaggacatcaaagctctgcagaaagaactcgagcaatttgccaagctcctgaagcagaagaggatcaccctgggatatacacaggccgatgtggggctcgccctgggggttctatttgggaaggtattcagccaaacgaccatctgccgctttgaggctctgcagcttagcttcaagaacatgtgtaagctgcggcccttgctgcagaagtgggtggaggaagctgacaacaatgaaaatcttcaggagatatgcaaagcagaaaccctcgtgcaggcccgaaagagaaagcgaaccagtatcgagaaccgagtgagaggcaacctggagaatttgttcctgcagtgcccgaaacccacactgcagcagatcagccacatcgcccagcagcttgggctcgagaaggatgtggtccgagtgtggttctgtaaccggcgccagaagggcaagcgatcaagcagcgactatgcacaacgagaggattttgaggctgctgggtctcctttctcagggggaccagtgtcctttcctctggccccagggccccattttggtaccccaggctatgggagccctcacttcactgcactgtactcctcggtccctttccctgagggggaagcctttccccctgtctctgtcaccactctgggctctcccatgcattcaaactgagg

SEQ ID NO: 5032 - DNA, 1086 bp, Homo sapiens
catggcgggacacctggcttcagatttcgccttctcgccccctccaggtggtggaggtgatgggccaggggggccggagccgggctgggttgatcctcggacctggctaagtttccaaggccctcctggagggccaggaatcgggccgggggttgggccaggctctgaggtgtgggggattcccccatgccccccgccgtatgagttctgtggggggatggcgtactgtgggccccaggttggagtggggctagtgccccaaggcggcttggagacctcacagcctgagggtgaagcaggagtcggggtggagagcaactccgatggggcctccccggagccctgcaccgtcacccctggtgccgtgaagctggagaaggagaagctggagcaaaacccggaggagtcccaggacatcaaagctctgcagaaagaactcgagcaatttgccaagctcctgaagcagaagaggatcaccctgggatatacacaggccgatgtggggctcaccctgggggttctatttgggaaggtattcagccaaacgaccatctgccgctttgaggctctgcagcttagcttcaagaacatgtgtaagctgcggcccttgctgcagaagtgggtggaggaagctgacaacaatgaaaatcttcaggagatatgcaaagcagaaaccctcgtgcaggcccgaaagagaaagcgaaccagtatcgagaaccgagtgagaggcaacctggagaatttgttcctgcagtgcccgaaacccacactgcagcagatcagccacatcgcccagcagcttgggctcgagaaggatgtggtccgagtgtggttctgtaaccggcgccagaagggcaagcgatcaagcagcgactatgcacaacgagaggattttgaggctgctgggtctcctttctcagggggaccagtgtcctttcctctggccccagggccccattttggtaccccaggctatgggagccctcacttcactgcactgtactcctcggtccctttccctgagggggaagcctttccccctgtctctgtcaccactctgggctctcccatgcattcaaactgagg

SEQ ID NO: 5033 - DNA, 1086 bp, Homo sapiens
catggcgggacacctggcttcagatttcgccttctcgccccctccaggtggtggaggtgatgggccaggggggccggagccgggctgggttgatcctcggacctggctaagcttccaaggccctcctggagggccaggaatcgggccgggggttgggccaggctctgaggcgtgggggattcccccatgccccccgccgtatgagttctgtggggggatggcgtactgtgggccccaggttggagtggggctagtgccccaaggcggcttggagacctctcagcctgagggtgaagcaggagtcggggtggagagcaactccgatggggcctccccggagccctgcaccgtcacccctggtgccgtgaagctggagaaggagaagctggagcaaaacccggaggagtcccaggacatcaaagctctgcagaaagaactcgagcaatttgccaagctcctgaagcagaagaggatcaccctgggatatacacaggccgatgtggggctcaccctgggggttctatttgggaaggtattcagccaaacgaccatctgccgctttgaggctctgcagcttagcttcaagaacatgtgtaagctgcggcccttgctgcagaagtgggtggaggaagctgacaacaatgaaaatcttcaggagatatgcaaagcagaaaccctcgtgcaggcccgaaagagaaagcgaaccagtatcgagaaccgagtgagaggcaacctggagaatttgttcctgcagtgcccgaaacccacactgcagcagatcagccacatcgcccagcagcttgggctcgagaaggatgtggtccgagtgtggttctgtaaccggcgccagaagggcaagcgatcaagcagcgactatgcacaacgagaggattttgaggctgctgggtctcctttctcagggggaccagtgtcctttcctctggccccagggccccattttggtaccccaggctatgggagccctcacttcactgcactgtactcctcggtccctttccctgagggggaagcctttccccctgtctctgtcaccactctgggctctcccatgcattcaaactgagg

SEQ ID NO: 5034 - DNA, 1086 bp, Homo sapiens
catggcgggacacctggcttcagatttcgccttctcgccccctccaggtggtggaggtgatgggccaggggggccggagccgggctgggttgatcctcggacctggctaagcttccaaggccctcctggagggccaggaatcgggccgggggttgggccaggctctgaggtgtgggggattcccccatgccccccgccgtatgagttctgtggggggatggcgtactgtgggccccaggttggagtggggctagtgccccaaggcggcttggagacctctcagcctgagggtgaagcaggagtcggggtggagagcaactccgatggggcctccccggagccctgcaccgtcacccctggtgccgtgaagctggagaaggagaagctggagcaaaacccggaggagtcccaggacatcaaagctctgcagaaagaactcgagcaatttgccaagctcctgaagcagaagaggatcaccctgggatatacacaggccgatgtggggctcaccctgggggttctatttgggaaggtattcagccaaacgaccatctgccgctttgaggctctgcagcttagcttcaagaacatgtgtaagctgcggcccttgctgcagaagtgggtggaggaagctgacaacaatgaaaatcttcaggagatatgcaaagcagaaaccctcgtgcaggcccgaaagagaaagcgaaccagcatcgagaaccgagtgagaggcaacctggagaatttgttcctgcagtgcccgaaacccacactgcagcagatcagccacatcgcccagcagcttgggctcgagaaggatgtggtccgagtgtggttctgtaaccggcgccagaagggcaagcgatcaagcagcgactatgcacaacgagaggattttgaggctgctgggtctcctttctcagggggaccagtgtcctttcctctggccccagggccccattttggtaccccaggctatgggagccctcacttcactgcactgtactcctcggtccctttccctgagggggaagcctttccccctgtctctgtcaccactctgggctctcccatgcattcaaactgagg

SEQ ID NO: 5035 - DNA, 1086 bp, Homo sapiens
catggcgggacacctggcttcagatttcgccttctcgccccctccaggtggtggaggtgatgggccaggggggccggagccgggctgggttgatcctcggacctggctaagcttccaaggccctcctggagggccaggaatcgggccgggggttgggccaggctctgaggtgtgggggattcccccatgccccccgccgtatgagttctgtggggggatggcgtactgcgggccccaggttggagtggggctagtgccccaaggcggcttggagacctctcagcctgagggtgaagcaggagtcggggtggagagcaactccgatggggcctccccggagccctgcaccgtcacccctggtgccgtgaagctggagaaggagaagctggagcaaaacccggaggagtcccaggacatcaaagctctgcagaaagaactcgagcaatttgccaagctcctgaagcagaagaggatcaccctgggatatacacaggccgatgtggggctcaccctgggggttctatttgggaaggtattcagccaaacgaccatctgccgctttgaggctctgcagcttagcttcaagaacatgtgtaagctgcggcccttgctgcagaagtgggtggaggaagctgacaacaatgaaaatcttcaggagatatgcaaagcagaaaccctcgtgcaggcccgaaagagaaagcgaaccagtatcgagaaccgagtgagaggcaacctggagaatttgttcctgcagtgcccgaaacccacactgcagcagatcagccacatcgcccagcagcttgggctcgagaaggatgtggtccgagtgtggttctgtaaccggcgccaggagggcaagcgatcaatcagcgactatgcacaacgagaggattttgaggctgctgggtctcctttctcagggggaccagtgtcctttcctctggccccagggccccattttggtaccccaggctatgggagccctcacttcactgcactgtactcctcggtccctttccctgagggggaagcctttccccctgtctctgtcaccactctgggctctcccatgcattcaaactgagg

SEQ ID NO: 5036 - DNA, 1086 bp, Homo sapiens
catggcgggacacctggcttcagatttcgccttctcgccccctccaggtggtggaggtgatgggccaggggggccggagccgggctgggttgatcctcggacctggctaagcttccaaggccctcctggagggccaggaatcgggccgggggttgggccaggctctgaggtgtgggggattcccccatgccccccgccgtatgagttctgtggggggatggcgtactgtgggccccaggttggagtggggctagtgccccaaggcggcttggagacctctcagcctgagggtgaagcaggagtcggggtggagagcaactccgatggggcctccccggagccctgcaccgtcacccctggtgctgtgaagctggagaaggagaagctggagcaaaacccggaggagtcccaggacatcaaagctctgcagaaagaactcgagcaatttgccaagctcctgaagcagaagaggatcaccctgggatatgcacaggccgatgtggggctcaccctgggggttctatttgggaaggtattcagccaaacgaccatctgccgctttgaggctctgcagcttagcttcaagaacatgtgtaagctgcggcccttgctgcagaagtgggtggaggaagctgacaacaatgaaaatcttcaggagatatgcaaagcagaaaccctcgtgcaggcccgaaagagaaagcgaaccagtatcgagaaccgagtgagaggcaacctggagaatttgttcctgcagtgcccgaaacccacactgcagcagatcagccacatcgcccagcagcttgggctcgagaaggatgtggtccgagtgtggttctgtaaccggcgccagaagggcaagcgatcaagcagcgactatgcacaacgagaggattttgaggctgctgggtctcctttctcagggggaccagtgtcctttcctctggccccagggccccattttggtaccccaggctatgggagccctcacttcactgcactgtactcctcggtccctttccctgagggggaagcctttccccctgtctctgtcaccactctgggctctcccatgcattcaaactgagg

SEQ ID NO: 5037 - DNA, 1086 bp, Homo sapiens
catggcgggacacctggcttcagatttcgccttctcgccccctccaggtggtggaggtgatgggccaggggggccggagccgggctgggttgatcctcggacctggctaagcttccaaggccctcctggagggccaggaatcgggccgggggttgggccaggctctgaggtgtgggggattcccccatgccccccgccgtatgagttctgtggggggatggcgtactgtgggccccaggttggagtggggctagtgccccaaggcggcttggagacctctcagcctgagggtgaagcaggagtcggggtggagagcaactccgatggggcctccccggagccctgcaccgtcacccctggtgccgtgaagctggagaaggagaagctggagcaaaacccggaggagtcccaggacatcaaagctctgcagaaagaactcgagcaatttgccaagctcctgaagcagaagaggatcaccctgggatatacacaggccgatgtggggctcaccctgggggttctatttgggaaggtattcagccaaacgaccatctgccgctttgaggctctgcagcttagcttcaagaacatgtgtaagctgcggcccttgctgcagaagtgggtggaggaagctgacaacaatgaaaatcttcaggagatatgcaaagcagaaaccctcgtgcaggcccgaaagagaaagcgaaccagtatcgagaaccgagtgagaggcaacctggagagtttgttcctgcagtgcccgaaacccacactgcagcagatcagccacatcgcccagcagcttgggctcgagaaggatgtggtccgagtgtggttctgtaaccggcgccagaagggcaagcgatcaagcagcgactatgcacaacgagaggattttgaggctgctgggtctcctttctcagggggaccagtgtcctttcctctggccccagggccccattttggtaccccaggctatgggagccctcacttcactgcactgtactcctcggtccctttccctgagggggaagcctttccccctgtctctgtcaccactctgggctctcccatgcattcaaactgagg

SEQ ID NO: 5038 - DNA, 1086 bp, Homo sapiens
catggcgggacacctggcttcagatttcgccttcttgccccctccaggtggtggaggtgatgggccaggggggccggagccgggctgggttgatcctcggacctggctaagcttccaaggccctcctggagggccaggaatcgggccgggggttgggccaggctctgaggtgtgggggattcccccatgccccccgccgtatgagttctgtggggggatggcgtactgtgggccccaggttggagtggggctagtgccccaaggcggcttggagacctctcagcctgagggtgaagcaggagtcggggtggagagcaactccgatggggcctccccggagccctgcaccgtcacccctggtgccgtgaagctggagaaggagaagctggagcaaaacccggaggagtcccaggacatcaaagctctgcagaaagaactcgagcaatttgccaagctcctgaagcagaagaggatcaccctggggtatacacaggccgatgtggggctcaccctgggggttctatttgggaaggtattcagccaaacgaccatctgccgctttgaggctctgcagcttagcttcaagaacatgtgtaagctgcggcccttgctgcagaagtgggtggaggaagctgacaacaatgaaaatcttcaggagatatgcaaagcagaaaccctcgtgcagacccgaaagagaaagcgaaccagtatcgagaaccgagtgagaggcaacctggagaatttgttcctgcagtgcccgaaacccacactgcagcagatcagccacatcgcccagcagcttgggctcgagaaggatgtggtccgagtgtggttctgtaaccggcgccagaagggcaagcgatcaagcagcgactatgcacaacgagaggattttgaggctgctgggtctcctttctcagggggaccagtgtcctttcctctggccccagggccccattttggtaccccaggctatgggagccctcacttcactgcactgtactcctcggtccctttccctgagggggaagcctttccccctgtctctgtcaccactctgggctctcccatgcattcaaactgagg

SEQ ID NO: 5039 - DNA, 1086 bp, Homo sapiens
catggcgggacacctggcttcagatttcgccttctcgccccctccaggtggtggaggtgatgggccaggggggccggagccgggctgggttgatcctcggacctggctaagcttccaaggccctcctggagggccaggaatcgggccgggggttgggccaggctctgaggtgtgggggattcccccatgccccccgccgtatgagttctgtggggggatggcgtactgtgggccccaggttggagtggggctagtgccccaaggcggcttggagacctctcagcctgagggtgaagcaggagtcggggtggagagcaactccgatggggcctccccggagccctgcaccgtcacccctggtgccgtgaagctggagaaggagaagctggagcaaaacccggaggagtcccaggacatcaaagctctgcaggaagaactcgagcaatttgccaagctcctgaagcagaagaggatcaccctgggatatacacaggccgatgtggggctcaccctgggggttctatttgggaaggtattcagccaaacgaccatctgccgctttgaggctctgcagcttagcttcaagaacatgtgtaagctgcggcccttgctgcagaagtgggtggaggaagctgacaacaatgaaaatcttcaggagatatgcaaagcagaaaccctcgtgcaggcccgaaagagaaagcgaaccagtatcgagaaccgagtgagaggcaacctggagaatttgttcctgcagtgcccgaaacccacactgcagcagatcagccacatcgcccagcagcttgggctcgagaaggatgtggtccgagtgtggttctgtaaccggcgccagaagggcaagcgatcaagcagcgactatgcacaacgagaggattttgaggctgctgggtctcctttctcagggggaccagtgtcctttcctctggccccagggccccattttggtaccccaggctatgggagccctcacttcactgcactgtactcctcggtccctttccctgagggggaagcctttccccctgtctctgtcaccactctgggctctcccatgcattcaaactgagg

SEQ ID NO: 5040 - DNA, 1086 bp, Homo sapiens; identical to SEQ ID NO: 5028

SEQ ID NO: 5041 - DNA, 1086 bp, Homo sapiens
catggcgggacacctggcttcagatttcgccttctcgccccctccaggtggtggaggtgatgggccaggggggccggagccgggctgggttgatcctcggacctggctaagcttccaaggccctcctggagggccaggaatcgggccgggggttgggccaggctctgaggtgtgggggattcccccatgccccccgccgtatgagttctgtggggggatggcgtactgtgggccccaggttggagtggggctagtgccccaaggcggcttggagacctctcagcctgagggtgaagcaggagtcggggtggagagcaactccgatggggcctccccggagccctgcaccgtcacccctggtgccgtgaagctggagaaggagaagctggagcaaaacccggaggagtcccaggacatcaaagctctgcagaaagaactcgagcaatttgccaagctcctgaagcagaagaggatcaccctgggatatacacaggccgatgtggggctcaccctgggggttctatttgggaaggtattcagccaaacgaccatctgccgctttgaggctctgcagcttagcttcaagaacatgtgtaagctgcggcccttgctgcagaagtgggtggaggaagctgacaacaatgaaaatcttcaggagatatgcaaagcagaaaccctcgtgcaggcccgaaagagaaagcgaaccagtatcgagaaccgagtgagaggcaacctggagaatttgttcctgcagtgcccgaaacccacactgcagcagatcagccacatcgcccagcagcttgggctcgagaaggatgtggtccgagtgtggttctgtaaccggcgccagaagggcaagcgatcaagcagcgactatgcacaacgagaggattttgaggctgctgggtctcctttctcagggggaccagcgtcctttcctctggccccagggccccattttggtaccccaggctatgggagccctcacttcactgcactgtactcctcggtccctttccctgagggggaagcctttccccctgtctctgtcaccactctgggctctcccatgcattcaaactgagg

SEQ ID NO: 5042 - DNA, 1086 bp, Homo sapiens
catggcgggacacctggcttcggatttcgccttctcgccccctccaggtggtggaggtgatgggccaggggggccggagccgggctgggttgatcctcggacctggctaagcttccaaggccctcctggagggccaggaatcgggccgggggttgggccaggctctgaggtgtgggggattcccccatgccccccgccgtatgagttctgtgaggggatggcgtactgtgggccccaggttggagtggggctagtgccccaaggcggcttggagacctctcagcctgagggcgaagcaggagtcggggtggagagcaactccgatggggcctccccggagccctgcaccgtcacccccggtgccgtgaagctggagaaggagaagctggagcaaaacccggaggagtcccaggacatcaaagctctgcagaaagaactcgagcaatttgccaagctcctgaagcagaagaggatcaccctgggatatacacaggccgatgtggggctcaccctgggggttctatttgggaaggtattcagccaaacgaccatccgccgctttgaggctctgcagcttagcttcaagaacatgtgtaagctgcggcccttgctgcagaagtgggtggaggaagctgacaacaatgaaaatcttcaggagatatgcaaagcagaaaccctcgtgcaggcccgaaagagaaagcgaaccagtatcgagaaccgagtgagaggcaacctggagaatttgttcctgcagtgcccgaaacccacactgcagcagatcagccacatcgcccagcagcttgggctcgagaaggatgtggtccgagtgtggttctgtaaccggcgccagaagggcaagcgatcaagcagcgactatgcacaacgagaggattttgaggctgctgggtctcctttctcagggggaccagtgtcctttcctctggccccagggccccattttggtaccccaggctatgggagccctcacttcaccgcactgtactcctcggtccctttccctgagggggaagcctttccccctgtctctgtcaccactctgggctctcccatgcattcaaactgagg

SEQ ID NO: 5043 - DNA, 1086 bp, Homo sapiens
catggcgggacacctggcttcagattttgccttctcgccccctccaggtggtggaggtgatgggccaggggggccggagccgggctgggttgatcctcggacctggctaagcttccaaggccctcctggagggccaggaatcgggccgggggttgggccaggctctgaggtgtgggggattcccccatgccccccgccgtatgagttctgtggggggatggcgtactgtgggccccaggttggagtggggctagtgccccaaggcggcttggagacctctcagcctgagggcgaagcaggagtcggggtggagagcaactccgatggggcctccccggagccctgcaccgtcacccctggcgccgtgaagctggagaaggagaagctggagcaaaacccggaggagtcccaggacatcaaagttctgcagaaagaactcgagcaatttgccaagctcctgaagcagaagaggatcaccctgggatatacacaggccgatgtggggctcaccctgggggttctatttgggaaggtattcagccaaacgaccatctgccgctttgaggctctgcagcttagcttcaagaacatgtgtaagctgcggcccttgctgcagaagtgggtggaggaagctgacaacaatgaaaatcttcaggagatatgcaaagcagaaaccctcgtgcaggcccgaaagagaaagcgaaccagtatcgagaaccgagtgagaggcaacctggagaatttgttcctgcagtgcccgaaacccacactgcagcagatcagccacatcgcccagcagcttgggctcgagaaggatgtggtccgagtgtggttctgtaaccggcgccagaagggcaagcgatcaagcagcgactatgcacaacgagaggattttgaggctgctgggtctcctttctcagggggaccagtgtcctttcctctggccccagggccccattttggtaccccaggctatgggagccctcacttcactgcactgtactcctcggtccctttccctgagggggaagcctttccccctgtctctgtcaccactctgggctctcccatgcattcaaactgagg

SEQ ID NO: 5044 - DNA, 1086 bp, Homo sapiens
catggcgggacacctggcttcagattttgccttctcgccccctccaggtggtggaggtgatgggccaggggggccggagccgggctgggttgatcctcggacctggctaagcttccaaggccctcctggagggccaggaatcgggccgggggttgggccaggctctgaggtgtgggggattcccccatgccccccgccgtatgagttctgtggggggatggcgtactgtgggccccaggttggagtggggctagtgccccaaggcggcttggagacctctcagcctgagggcgaagcaggagtcggggtggagagcaactccgatggggcctccccggagccctgcaccgtcacccctggtgccgtgaagctggagaaggagaagctggagcaaaacccggaggagtcccaggacatcaaagctctgcagaaagaactcgagcaatttgccaagctcctgaagcagaagaggatcaccctgggatatacacaggccgatgtggggctcaccctgggggttctatttgggaaggtattcagccaaacgaccatctgccgctttgaggctctgcagcttagcttcaagaacatgtgtaagctgcggcccttgctgcagaagtgggtggaggaagctgacaacaatgaaaatcttcaggagatatgcaaagcagaaaccctcgtgcaggcccgaaagagaaagcgaaccagtatcgagaaccgagtgagaggcaacctggagaatctgttcctgcagtgcccgaaacccacactgcagcagatcagccacatcgcccagcagcttgggctcgagaaggatgtggtccgagtgtggttctgtaaccggcgccagaagggcaagcgatcaagcagcgactatgcacaacgagaggattttgaggctgctgggtctcctttctcagggggaccagtgtcctttcctctggccccagggccccattttggtaccccaggctatgggagccctcacttcactgcactgtactcctcggtccctttccctgagggggaagcctttccccctgtctctgtcaccactctgggctctcccatgcattcaaactgagg

SEQ ID NO: 5045 - DNA, 1086 bp, Homo sapiens
catggcgggacacctggcttcggatttcgccttctcgccccctccaggtggtggaggtgatgggccaggggggccggagccgggctgggttgatcctcggacctggctaagcttccaaggccctcctggagggccaggaatcgggccgggggttgggccaggctctgaggtgtgggggattcccccatgccccccgccgtatgagttctgtggggggatggcgtactgtgggccccaggttggagtggggctagtgccccaaggcggcttggagacctctcagcctgagggcgaagcaggagtcggggtggagagcaactccgatggggcctccccggagccctgcaccgtcacccctggtgccgtgaagctggagaaggagaagctggagcaaaacccggaggagtcccaggacatcaaagctctgcagaaagaactcgagcaatttgccaagctcctgaagcagaagaggatcaccctgggatatacacaggccgatgtggggctcaccctgggggctctatttgggaaggtattcagccaaacgaccatctgccgctttgaggctctgcagcttagcttcaagaacatgtgtaagctgcggcccttgctgcagaagtgggtggaggaagctgacaacaatgaaaatcttcaggagatatgcaaagcagaaaccctcgtgcaggcccgaaagagaaagcgaaccagtatcgagaaccgagtgagaggcaacctggagaatttgttcctgcagtgcccgaaacccacactgcagcagatcagccacatcgcccagcagcttgggctcgagaaggatgtggtccgagtgtggttctgtaaccggcgccagaagggcaagcgatcaagcagcgactatgcacaacgagaggattttgaggctgctgggtctcctttctcagggggaccagtgtcctttcctctggccccagggccccattttggtaccccaggctatgggagccctcacttcactgcactgtactcctcggtccctttccctgagggggaagcctttccccctgtctctgtcaccactctgggctctcccatgcattcaaactgagg

SEQ ID NO: 5046 - DNA, 1086 bp, Homo sapiens
catggcgggacacctggcttcggatttcgccttctcgccccctccaggtggtggaggtgatgggccaggggggccggagccgggctgggttgatcctcggacctggctaagcttccaaggccctcctggagggccaggaatcgggccgggggttgggccaggctctgaggtgtgggggattcccccatgccccccgccgtatgagttctgtggggggatggcgtactgtgggccccaggttggagtggggctagtgccccaaggcggcttggagacctctcagcctgagggcgaagcaggagtcggggtggagagcaactccgatggggcctccccggagccctgcaccgtcacccctggtgccgtgaagctggagaaggagaagctggagcaaaacccggaggagtcccaggacatcaaagctctgcagaaagaactcgagcaatttgccaagctcctgaagcagaagaggatcaccctgggatatacacaggccgatgtggggctcaccctgggggttctatttgggaaggtattcagccaaacgaccatctgccgctttgaggctctgcagcttagcttcaagaacatgtgtaagctgcggcccttgctgcagaagtgggtggaggaagctgacaacaatgaaaatcttcaggagatatgcaaagcagaaaccctcgtgcaggcccgaaagagaaagcgaaccagtatcgagaaccgagtgagaggcaacctggagaatttgttcctgcagtgcccgaaacccacactgcagcagatcagccacatcgcccagcagcttgggctcgagaaggatgtggtccgagtgtggttctgtaaccggcgccagaagggcaagcgatcaagcagcgactatgcacaacgagaggattttgaggctgctgggtctcctttctcagggggaccagtgtcctttcctctggccccagggccccattttggtaccccaggctatgggagccctcacttcactgcactgtactcctcggtccctttccctgagggggaagcctttccccctgtctctgtcaccactctgggctctcccatgcattcaaactgagg

SEQ ID NO: 5047 - DNA, 1087 bp, Homo sapiens
catggcgggacacctggcttcggatgcctgccttcttgccccctccaggcggtggaggtgatgggccaggggggccggagccgggctgggttgatcctcggacctggctaagcttccaaggccctcctggagggccaagaatcgggccgggagttgggtcaggctctgaggtgtgggggattccccccatgccccccgctgtatgagttctgtggggggatggcgtactgtgggcctcaggttggagtgcggctagtgccccaaggcggcttggagacctctcagcctgagggcgaagcaggagtcagggtggagagcaactccgatggcacctccctggagccctgcaccgtcccccctggtgccgtgaaactggagaaggagaagctggagcaaaacccgcaggagtcccagaacatcaaagctctgcagaaagaactcgaacaatttgccaagctcctgaagcagaagaggatcaccctgggatatacacaggccgatgtggggctcaccctgggggttctatttgggaaggtgttcagccaaacgaccatctgccgctttgagggtctgcagcttagcttcaagaacatgtgtaagctgcggcccttgctgcagaagtgggtggaggaagctgacaacaatgaaaatcttcaggagacatgcaaagcagaaaccctcttgcaggctcgaaagagaaagcgaaccagtatcgagaaccgagtgagaggcaacctggagaatttgttcctgcagtgcccgaaacccacactgcagcagatcagccacatcgcccagcagcttgggctcgagaaggatgtggtccgagtgtggttctgtaaccggtgccagaaaggcaagcaatcaagcagcgactatgcataacgagaggattttgaggctgctgggtctcctttctcaggggtaccagtatcctttcctctggccccagggccccattttggtaccccaggctatgggagccctcacttcactgcactgtactcctcggtccctttccctgagggggaagcctttcccccgtctccgtcaccaccctgggctctcccatgcattcaaactgagg

SEQ ID NO: 5048 - DNA, 1086 bp, Homo sapiens
catggcgggacacctggcttcggatgcctgccttcttgccccctccaggcggtggaggtgatgggccaggggggccggagccgggctgggttgatcctcggacctggctaagcttccaaggccctcctggagggccaggaatcgggccgggagttgggtcaggctctgaggtgtgggggattcccccatgccccccgctgtatgagttctgtggggggatggcgtactgtgggcctcaggttggagtgcggctagtgccccaaggcggcttggagacctctcagcctgagggcgaagcaggagtcagggtggagagcaactccgatggcacctccctggagccctgcaccgtcccccctggtgccgtgaaactggagaaggagaagctggagcaaaacccgcaggagtcccagaacatcaaagctctgcagaaagaactcgaacaatttgccaagctcctgaagcagaagaggatcaccctgggatatacacaggccgatgtggggctcaccctgggggttctatttgggaaggtgttcagccaaacgaccatctgccgctttgagggtctgcagcttagcttcaagaacatgtgtaagctgcggcccttgctgcagaagtgggtggaggaagctgacaacaatgaaaatcttcaggagacatgcaaagcagaaaccctcttgcaggctcgaaagagaaagcgaaccagtatcgagaaccgagtgagaggcaacctggagaaattgttcctgcagtgcccgaaacccacactgcagcagatcagccacatcgcccagcagcttgggctcgagaaggatgtggtccgagtgtggttctgtaaccggtgccagaaaggcaagcaatcaagcagcgactatgcataacgagaggattttgaggctgctgggtctcctttctcaggggtaccagtatcctttcctctggccccagggccccattttggtaccccaggctatgggagccctcacttcactgcactgtactcctcggtccctttccctgagggggaagcctttcccccgtctccgtcaccaccctgggctctcccatgcattcaaactgagg

SEQ ID NO: 5049 - DNA, 1083 bp, Homo sapiens
catggcgggacacctggcttcggatttcgccttctcgccccctccaggcggtgggggtgatgggccatggggggcggagccgggctgggttgatcctctgacctggctaagcttccaaggccctcctggagggccaggaatcgggccgggggttgggccaggctctgaggtgtgggggattcccccttgccccccgccgtatgagttatgtggggggatggcgtactgtgggcctcaggttggagtggggctagtgccccaaggcggcttggagacctctcagcctgagagcgaagcaggagtcggggtggagagcaactccaatggggcctccccggaaccctgcaccgtcccccctggtgccgtgaagctggagaaggagaagctagagcaaaacccggagaagtcccaggacatcaaagctctgcagaaagaactcgagcaatttgccaagctcctgaagcagaagaggatcaccctgggatatacacaggccgatgtggggcccatcctgggggttctatttgggaaggtgttcagccaaaagaccatctgccgctttgaggctctgcagcttagcttcaagaacatgtgtaagctgcggcccttgctgcagaagtgggtggaggaagctgacaacaatgaaaatcttcaggagatatgcaaagcagaaaccctcatgcaggcccgaaagagaaagcgaaccagtatcgagaaccgagtgagaggcaacctggagaatttgttcctgcagtgcccgaaacccacactgcagatcagccacatcgcccagcagcttgggctcgagaaggatgtggtccgagtgtggttctgtaaccggcgccagaagggcaagcgatcaagcagcgactatgcacaacgagaggattttgaggctgctgggtctcctttctcagggggaccagtgtcctttcctccggccccagggccccattttggtaccccaggctatgggagccctcacttcactgcactgtactcctcagtccctttccctgagggggaagtctttcccccagtctccgtcatcactctgggctctcccatgcattcaaactgagg

SEQ ID NO: 5050 - DNA, 1086 bp, Homo sapiens
catggcgggacacctggcttcggatgcctgccttcttgccccctccaggcggtggaggtgatgggccaggggggccggagccgggctgggttgatcctcggacctggctaagcttccaaggccctcctggagggccaggaatcgggccgggagttgggtcaggctctgagatgtgggggattcccccatgccccccgctgtatgagttctgtggggggatggcgtactgtgggcctcaggttggagtgcggctagtgccccaaggcggcttggagacctctcagcctgagggcgaagcaggagtcagggtggagagcaactccgatggcacctccctggagccctgcaccgtcccccctggtgccgtgaaactggagaaggagaagctggagcaaaacccgcaggagtcccagaacatcaaagctctgcagaaagaactcgaacaatttgccaagctcctgaagcagaagaggatcaccctgggatatacacaggccgatgtggggctcaccctgggggttctatttgggaaggtgttcagccaagcgaccatctgccgctttgagggtctgcagcttagcttcaagaacatgtgtaagctgcggcccttgctgcagaagtgggtggaggaagctgacaacaatgaaaatcttcaggagacatgcaaagcagaaaccctcttgcaggctcgaaagagaaagcgaaccagtatcgagaaccgagtgagaggcaacctggagaatttgttcctgcagtgcccgaaacccacactgcagcagatcagccacatcgcccagcagcttgggctcgagaaggatgtggtccgagtgtggttctgtaaccggtgccagaaaggcaagcaatcaagcagcgactatgcataacgagaggattttgaggctgctgggtctcctttctcaggggtaccagtatcctttcctctggccccagggccccattttggtaccccaggctatgggagccctcacttcactgcactgtactcctcggtccctttccctgagggggaagcctttcccccgtctccgtcaccaccctgggctctcccatgcattcaaactgagg

SEQ ID NO: 5051 - DNA, 1084 bp, Homo sapiens
catggcgggacacctggcttcggatttcgccttctcaccccctccaggcggtggaggtgatgggccaggggggccggagccgggctgggttgatcctcggacctggctaagcttccaaggccctcctggagggccaggagtcgggccggggtttgggccaggctctgaggagtgggggattcccccatgtcccccgccgtatgagttctgcggggggatggcgtactgtgggcctcagactggagtggggctagtgccccaagacggcttggagacctctcagcctgagggcgaagcaggagtcggggtggagagcaactccgatggggcctccccggagccctgcaccgtcccctctggtgccgtgaagctggagaaggagaagctggagcaaaacccgaaggagtcccaggacatcaaagctctgcagaaagaactcgagcaatttgccaagctcctgaagcagaagaggatcaccctgggatatacacaggccgatgtggctcaccctgggggttctatttgggaaggtgttcagccaaacgaccatctgccgctttgaggctctgcagcttagcttcaagaacatgtgtgagctgcggcccttgctgcagaagtgggtggaggaagctgacaacaatgaaaatcttcaggagatatgcaaagcagaaaccctcgtgcaggccggaaagagaaagcgaaccagtatcgagaaccaagtgagaggcaacctggagaatttgttcctgcggtgcccgaaacccacactgcagcagatcagccacatcgcccagcagcttgggctggagaaggatgtggtccgagtgtggttctgtaaccggtgccagaagggcaagcgatcaagcagtggctatgcacaacgagaggattttgaggctgttgggtctcctttctcagggggaccagtgtcctttcctctggccccagggccccattttggtaccccaggctatgggagccctcacttcactgcactgtactcctcggtccctttccctgagggggaagcctttccccctgtctccgtcaccactctgggctctcccatgcattcaaactgagg

SEQ ID NO: 5052 - DNA, 1084 bp, Homo sapiens
catggcgggacacctggcttcggatttcgccttctcaccccctccaggcggtggaggtgatgggccaggggggccggagccgggctgggttgatcctcggacctggctaagcttccaaggccctcctggagggccaggaatcgggccggggtttgggccaggctctgaggagtgggggattcccccatgtcccccgccgtatgagttctgcggggggatggcgtactgtgggcctcagactggagtggggctagtgccccaagacggcttggagacctctcagcctgagggcgaagcaggagtcggggtggagagcaactccgatggggcctccccggagccctgcaccgtcccctctggtgccgtgaagctggagaaggagaagctggagcaaaacccgaaggagtcccaggacatcaaagctctgcagaaagaactcgagcaatttgccaagctcctgaagcagaagaggatcaccctgggatatacacaggccgatgtggctcaccctgggggttctatttgggaaggtgttcagccaaacgaccatctgccgctttgaggctctgcagcttagcttcaagaacatgtgtgagctgcggcccttgctgcagaagtgggtggaggaagctgacaacaatgaaaatcttcaggagatatgcaaagcagaaaccctcgtgcaggccggaaagagaaagcgaaccagtatcgagaaccaagtgagaggcaacctggagaatttgttcctgcggtgcccgaaacccacactgcagcagatcagccacatcgcccagcagcttgggctggagaaggatgtggtccgagtgtggttctgtaaccggcgccagaagggcaagcgatcaagcagtggctatgcacaacgagaggattttgaggctgttgggtctcctttctcagggggaccagtgtcctttcctctggccccagggccccattttggtaccccaggctatgggagccctcacttcactgcactgtactcctcggtccctttccctgagggggaagcctttccccctgtctccgtcaccactctgggctctcccatgcattcaaactgagg

SEQ ID NO: 5053 - DNA, 1086 bp, Homo sapiens
catggcgggacacctggcttcggatgcctgccttcttgccccctccaggcggtggaggtgatgggccaggggggccggagccgggctgggttgatcctcggacctggctaagcttccaaggccctcctggagggccaggaatcgggccgggagttgggtcaggctctgaggtgtgggggattcccccatgccccccgctgtatgagttctgtggggggatggcgtactgtgggcctcaggttggagtgcggctagtgccccaaggcggcttggagacctctcagcctgagggcgaagcaggagtcagggtggagagcaactccgatggcacctccctggagccctgcaccgtcccccctggtgccgtgaaactggagaaggagaagctggagcaaaacccgcaggagtcccagaacatcaaagctctgcagaaagaactcgaacaatttgccaagctcctgaagcagaagaggatcaccctgggatatacacaggccgatgtggggctcaccctgggggttctatttgggaaggtgttcagccaaacgaccatctgccgctttgagggtctgcagcttagcttcaagaacatgtgtaagctgcggcccttgctgcagaagtgggtggaggaagctgacaacaatgaaaatcttcaggagacatgcaaagcagaaaccctcttgcaggctcgaaagagaaagcgaaccagtatcgagaaccgagtgagaggcaacctggagaatttgttcctgcagtgcccgaaacccacactgcagcagatcagccacatcgcccagcagcttgggctcgagaaggatgtggtccgagtgtggttctgtaaccggtgccagaaaggcaagcaatcaagcagcgactatgcataacgagaggattttgaggctgctgggtctcctttctcaggggtaccagtatcctttcctctggccccagggccccattttggtaccccaggctatgggagccctcacttcactgcactgtactcctcggtccctttccctgagggggaagcccttcccccgtctccgtcaccaccctgggctctcccatgcattcaaactgagg

SEQ ID NO: 5054 - DNA, 1083 bp, Homo sapiens
catggcgggacacctggcttcggatttcgccttctcaccccctccaggcggtggaggtgatgggccaggggggccggagccgggctgggttgatcctctgacctggctaagcttccaaggccctcctggagggccaggaatcgggccgggggttgggccaggctctgaggtgtgggggattcccccttgccccccgccgtatgagttatgtggggggatggcgtactgtgggcctcaggttggagtggggctagtgccccaaggcggcttggagacctctcagcctgagagcgaagcaggagtcggggtggagagcaactccaatggggcctccccggaaccctgcaccgtcccccctggtgccgtgaagctggagaaggagaagctagagcaaaacccggagaagtcccaggacatcaaagctctgcagaaagaactcgagcaatttgccaagctcctgaagcagaagaggatcaccctgggatatacacaggccgatgtggggctcatcctgggggttctatttgggaaggtgttcagccaaaagaccatctgccgctttgaggctctgcagcttagcttcaagaacatgtgtaagctgcggcccttgctgcagaagtgggtggaggaagctgacaacaatgaaaatcttcaggagatatgcaaagcagaaaccctcatgcaggcccgaaagagaaagcgaaccagtatcgagaaccgagtgagaggcaacctggagaatttgttcctgcagtgcccgaaacccacactgcagatcagccacatcgcccagcagcttgggctcgagaaggatgtggtccgagtgtggttctgtaaccggcgccagaagggcaagcgatcaagcagcgactatgcacaacgagaggattttgaggctgctgggtctcctttctcagggggaccagtgtcctttcctccggccccagggccccattttggtaccccaggctatgggagccctcacttcactgcactgtactcctcagtccctttccctgagggggaagtctttcccccagtctccgtcatcactctgggctctcccatgcattcaaactgagg

SEQ ID NO: 5055 - DNA, 1083 bp, Homo sapiens
catggcgggacacctggcttcagatttcgccttctcgccccctccaggcggtgggggtgatgggccatggggggcggagccgggctgggttggtcctctgacctggctaagcttccaaggccctcctggagggccaggaatcgggccgggggttgggccaggctctgaggtgtgggggattcccccttgccccccgccgtatgagttatgtggggggatggcgtactgtgggcctcaggttggagtggggctagtgccccaaggcggcttggagacctctcagcctgagagcgaagcaggagtcggggtggagagcaactccaatggggcctccccggaaccctgcaccgtcccccctggtgccgtgaagctggagaaggagaagctagagcaaaacccggagaagtcccaggacatcaaagctctgcagaaagaactcgagcaatttgccaagctcctgaagcagaagaggatcaccctgggatatacacaggccgatgtggggctcatcctgggggttctatttgagaaggtgttcagccaaaagaccatctgccgctttgaggctctgcagcttagcttcaagaacatgtgtaagctgcggcccttgctgcagaagtgggtggaggaagctgacaacaatgaaaatcttcaggagatatgcaaagcagaaaccctcatgcaagcccgaaagagaaagcgaaccagtatccagaaccgagtgagaggcaacctggagaatttgttcctgcagtgcccgaaacccacactgcagatcagccacatcgcccagcagcttgggctcgagaaggatgtggtccgagtgtggttctgtaaccggcgccagaagggcaagcgatcaagcagcgactatgcacaacgagaggattttgaggctgctgggtctcctttctcagggggaccagtgtcctttcctccggccccagggccccattttggtaccccaggctatgggagccctcacttcactgcactgtactcctcagtccctttccctgagggggaagtctttcccccagtctccgtcatcactctgggctctcccatgcattcaaactgagg

SEQ ID NO: 5056 - DNA, 1083 bp, Homo sapiens
catggcgggacacctggcttcggatttcgccttctcgccccctccaggcggtgggggtgatgggccatggggggcggagccgggctgggttgatcctctgacctggctaagcttccaaggccctcctggagggccaggaatcgggccgggggttgggccaggctctgaggtgtgggggattcccccttgccccccgccgtatgagttatgtggggggatggcgtactgtgggcctcaggttggagtggggctagtgccccaaggcggcttggagacctctcagcctgagagcgaagcaggagtcggggtggagagcaactccaatggggcctccccggaaccctgcaccgtcccccctggtgccgtgaagctggagaaggagaagctagagcaaaacccggagaagtcccaggacatcaaagctctgcagaaagaactcgagcaatttgccaagctcctgaagcagaagaggatcaccctgggatatacacaggccgatgtggggctcatcctgggggttctatttgggaaggtgttcagccaaaagaccatctgccgctttgaggctctgcagcttagcttcaagaacatgtgtaagctgcggcccttgctgcagaagtgggtggaggaagctgacaacaatgaaaatcttcaggagatatgcaaagcagaaaccctcatgcaggcccgaaagagaaagcgaaccagtatcgagaaccgagtgagaggcaacctggagaatttgttcctgcagtgcccgaaacccacactgcagatcagccacatcgcccagcagcttgggctcgagaaggatgtggtccgagtgtggttctgtaaccggcgccagaagggcaagcgatcaagcagcgactatgcacaacgagaggattttgaggctgctgggtctcctttctcagggggaccagtgtcctttcctccggccccagggccccattttggtaccccaggctatgggagccctcacttcaccgcactgtactcctcagtccctttccctgagggggaagtctttcccccagtctccgtcatcactctgggctctcccatgcattcaaactgagg

SEQ ID NO: 5057 - DNA, 1084 bp, Homo sapiens
catggcgggacacctggcttcggatttcgccttctcaccccctccaggcggtggaggtgatgggccaggggggccggagcggggctgggttgatcctcggacctggctaagcttccaaggccctcctggagggccaggaatcgggccggggtttgggccaggctctgaggagtgggggattcccccatgtcccccgccgtatgagttctgcggggggatggcgtactgtgggcctcagactggagtggggctagtgccccaagacggcttggagacctctcagcctgagggcgaagcaggagtcggggtggagagcaactccgatggggcctccccggagccctgcaccgtcccctctggtgccgtgaagctggagaaggagaagctggagcaaaacccgaaggagtcccaggacatcaaagctctgcggaaagaactcgagcaatttgccaagctcctgaagcagaaggggatcaccctgggatatacacaggccgatgtggctcaccctgggggttctatttgggaaggtgttcagccaaacgaccatctgccgctttgaggctctgcagcttagcttcaagaacatgtgtgagctgcggcccttgctgcagaagtgggtggaggaagctgacaacaatgaaaatcttcaggagatatgcaaagcagaaaccctcgtgcaggccggaaagagaaagcgaaccagtatcgagaaccaagtgagaggcaacctggagaatttgttcctgcggtgcccgaaacccacactgcagcagatcagccacatcgcccagcagcttgggctggagaaggatgtggtccgagtgtggttctgtaaccggcgccagaagggcaagcgatcaagcagtggctatgcacaacgagaggattttgaggctgttgggtctcctttctcagggggaccagtgtcctttcctctggccccagggccccattttggtaccccaggctatgggagccctcacttcactgcactgtactcctcggtcccttcccctgagggggaagcctttccccctgtctccgtcaccactctgggctctcccatgcattcaaactgagg

SEQ ID NO: 5058 - DNA, 1083 bp, Homo sapiens
catggcgggacacctggcttcggatttcgccttctcgccccctccaggcggtgggggtgatgggccatggggggcggagccgggctgggttgttcctctgacctggctaagcttccaaggccctcctggagggccaggaatcgggccgggggttgggccaggctctgaggtgtgggggattcccccttgccccccgccgtatgagttatgtggggggatggcgtactgtgggcctcaggttggagtggggctagtgccccaaggcggcttggagacctctcagcctgagagcgaagcaggagtcggggtggagagcaactccaatggggcctccccggaaccctgcaccgtcccccctggtgccgtgaagctggagaaggagaagctagagcaaaacccggagaagtcccaggacatcaaagctctgcagaaagaactcgagcaatttgccaagctcctgaagcagaagaggatcaccctgggatatacacaggccgatgtggggctcatcctgggggttctatttgggaaggtgttcagccaaaagaccatctgccgctttgaggctctgcagcttagcttcaagaacatgtgtaagctgcggcccttgctgcagaagtgggtggaggaagctgacaacaatgaaaatcttcaggagatatgcaaagcagaaaccctcatgcaggcccgaaagagaaagcgaaccagtatcgagaaccgagtgagaggcaacctggagaatttgttcctgcagtgcccgaaacccacactgcagatcagccacatcgcccagcagcttgggctcgagaaggatgtggtccgagtgtggttctgtaaccggcgccagaagggcaagcgatcaagcagcgactatgcacaacgagaggattttgaggctgctgggtctcctttctcagggggaccagtgtcctttcctccggccccagggccccattttggtaccccaggctatgggagccctcacttcactgcactgtactcctcagtccctttccctgtgggggaagtctttcccccagtctccgtcatcactctgggctctcccatgcattcaaactgagg

SEQ ID NO: 5059 - DNA, 1084 bp, Homo sapiens
catggcgggacacctggcttcggatttcgccttctcaccccctccaggcggtggaggtgatgggccaggggggccggagccgggctgggttgatcctcggacctggctaagcttccaaggccctcctggagggccaggaatcgggccggggtttgggccaggctctgaggagtgggggattcccccatgtcccccgccgtatgagttctgcggggggatggcgtactgtgggcctcagactggagtggggctagtgccccaagacggcttggagacctctcagcctgagggcgaagcaggagtcggggtggagagcaactccgatggggcctccccggagccctgcaccgtcccctctggtgccgtgaagctggagaaggagaagctggagcaaaacccgaaggagtcccaggacatcaaagctctgcagaaagaactcgagcaatttgccaagctcctggagcagaagaggatcaccctgggatatacacaggccgatgtggctcaccctgggggttctatttgggaaggtgttcagccaaacgaccatctgccgctttgaggctctgcagcttagcttcaagaacatgtgtgagctgcggcccttgctgcagaagtgggtggaggaagctgacaacaatgaaaatcttcaggagatatgcaaagcagaaaccctcgtgcaggccggaaagagaaagcgaaccagtatcgagaaccaagtgagaggcaacctggagaatttgttcctgcggtgcccgaaacccacactgcagcagatcagccacatcgcccagcagcttgggctggagaaggatgtggtccgagtgtggttctgtaaccggcgccagaagggcaagcgatcaagcagtggctatgcacaacgagaggattttgaggctgttgggtctcctttctcagggggaccagtgtcctttcctctggccccagggccccattttggtaccccaggctatgggagccctcacttcactgcactgtactcctcggtccctttccctgagggggaagcctttccccctgtctccgtcaccactctgggctctcccatgcattcaaactgagg

SEQ ID NO: 5060 - DNA, 1084 bp, Homo sapiens
catggcgggacacctggcttcggatttcgccttctcaccccctccaggcggtggaggtgatgggccaggggggccggagccgggctgggttgatcctcggacctggctaagcttccaaggccctcctggagggccaggaatcgggccggggtttgggccaggctctgaggagtgggggattcccccatgtcccccgccgtatgagttctgcggggggatggcgtactgtgggcctcagactggagtggggctagtgccccaagacggcttggagacctctcagcctgagggcgaagcaggagtcggggtggagagcaactccgatggggcctccccggagccctgcaccgtcccctctggtgccgtgaagctggggaaggagaagctggagcaaaacccgaaggggtcccaggacatcagagctctgcagaaagaactcgagcaatttgccaagctcctgaagcagaagaggatcaccctgggatatacacaggccgatgtggctcaccctgggggttctatttgggaaggtgttcagccaaacgaccatctgccgctttgaggctctgcagcttagcttcaagaacatgtgtgagctgcggcccttgctgcagaagtgggtggaggaagctgacaacaatgagaatcttcaggagatatgcaaagcagaaaccctcgtgcaggccggaaagagaaagcgaaccagaatcgagaaccaagtgagaggcaacctggagaatttgttcctgcggtgcccgaaacccacactgcagcagatcagccacatcgcccagcagcatgggctggagaaggatgtggtccgagtgtggttctgtaaccggcgccagaagggcaagcgatcaagcagtggctatgcacaacgagaggattttgaggctgttgggtctcctttctcagggggaccagtgtcctttcctctggccccagggccccattttggtaccccaggctatgggagccctcacttcactgcactatactcctcggtccctttccctgagggggaagcctttccccctgtctccgtcaccactctgggctctcccatgcattcaaactgagg

SEQ ID NO: 5061 - DNA, 1086 bp, Homo sapiens
catggcgggacacctggcttcggatgcctgccttcttgccccctccaggcggtggaggtgatgggccaggggggccggagccgggctgggttgatcctcggacctggctaagcttccaaggccctcctggagggccaggaatcgggccgggagttgggtcaggctctgaggtgtgggggattcccccatgccccccgctgtatgagttctgtggggggatggcgtactgtgggcctcaggttggagtgcggctagtgccccaaggcggcttggagacctctcagcctgagggcgaagcaggagtcagggtggagagcaactccgatggcacctccctggagccctgcaccgtcccccctggtgccgtgaaactggagaaggagaagctggagcaaaacccgcaggagtcccagaacatcaaagctctgcagaaagaactcgaacaatttgccaagctcctgaagcagaagaggatcaccctgggatatacacaggccgatgtggggctcaccctgggggttctatttgggaaggtgttcagccaaacgaccatctgccgctttgagggtctgcagcttagcttcaagaacatgtgtaagctgcggcccttgctgcagaagtgggtggaggaagctgacaacaatgaaaatcttcaggagacatgcaaagcagaaaccctcttgcaggctcgaaagagaaagcgaaccagtatcgagaaccgagtgagaggcaacctggagaatttgttcctgcagtgcccgaaacccacactgcagcagatcagccacatcgcccagcagcttgggctcgagaaggatgtggtccgagtgtggttctgtaaccggtgccagaaaggcaagcaatcaagcagcgactatgcataacgagaggattttgaggctgccgggtctcctttctcaggggtaccagtatcctttcctctggccccagggccccattttggtaccccaggctatgggagccctcacttcactgcactgtactcctcggtccctttccctgagggggaagcctttcccccgtctccgtcaccaccctgggctctcccatgcattcaaactgagg

SEQ ID NO: 5062 - DNA, 1086 bp, Homo sapiens
catggcgggacacctggcttcggatgcctgccttcttgccccctccaggcggtggaggtgatgggccaggggggccggagccgggctgggttgatcctcggacctggctaagcttccaaggccctcctggagggccaggaatcgggccgggagttgggtcaggctctgaggtgtgggggattcccccatgccccccgctgtatgagttctgtggggggatggcgtactgtgggcctcaggttggagtgcggctagtgccccaaggcggcttggagacctctcagcctgagggcgaagcaggagtcagggtggagagcaactccgatggcacctccctggagccctgcaccgtcccccctggtgccgtgaaactggagaaggagaagttggagcaaaacccgcaggagtcccagaacatcaaagctctgcagaaagaactcgaacaatttgccaagctcctgaagcagaagaggatcaccctgggatatacacaggccgatgtggggctcaccctgggggttctatttgggaaggtgttcagccaaacgaccatctgccgctttgagggtctgcagcttagcttcaagaacatgtgtaagctgcggcccttgctgcagaagtgggaggaggaagctgacaacaatgaaaatcttcaggagacatgcaaagcagaaaccctcttgcaggctcgaaagagaaagcgaaccagtatcgagaaccgagtgagaggcaacctggagaatttgttcctgcagtgcccgaaacccacactgcagcagatcagccacatcgcccagcagcttgggctcgagaaggatgtggtccgagtgtggttctgtaaccggtgccagaaaggcaagcaatcaagcagcgactatgcataacgagaggattttgaggctgctgggtctcctttctcaggggtaccagtatcctttcctctggccccagggccccattttggtaccccaggctatgggagccctcacttcactgcactgtactcctcggtccctttccctgagggggaagcctttcccccgtctccgtcaccaccctgggctctcccatgcattcaaactgagg

SEQ ID NO: 5063 - DNA, 1086 bp, Homo sapiens
catggcgggacacctggcttcggatgcctgccttcttgccccctccaggcggtggaggtgatgggccaggggggccggagccgggctgggttgatcctcggacctggctaagcttccaaggccctcctggagggccaggaatcgggccgggagttgggtcaggctctgaggtgtgggggattcccccatgccccccgctgtatgagttctgtggggggatggcgcactgtgggcctcaggttggagtgcggctagtgccccaaggcggcttggagacctctcagcctgagggcgaagcaggagtcagggtggagagcaactccgatggcacctccctggagccctgcaccgtcccccctggtgccgtgaaactggagaaggagaagctggagcaaaacccgcaggagtcccagaacatcaaagctctgcagaaagaactcgaacaatttgccaagctcctgaagcagaagaggatcaccctgggatatacacaggccgatgtggggctcaccctgggggttctatttgggaaggtgttcagccaaacgaccatctgccgctttgagggtctgcagcatagcttcaaggacatgtgtaagctgcggcccttgctgcagaagtgggtggaggaagctgacaacaatgaaaatcttcaggagacatgcaaagcagaaaccctcttgcaggctcgaaagagaaagcgaaccagtatcgagaaccgagcgagaggcaacctggagaatttgttcctgcagtgcccgaaacccacactgcagcagatcagccacatcgcccagcagcttgggctcgagaaggatgtggtccgagtgtggttctgtaaccggtgccagaaaggcaagcaatcaagcagcgactatgcataacgagaggattttgaggctgctgggtctcctttctcaggggtaccagtatcctttcctctggccccagggccccattttggtaccccaggctatgggagccctcacttcactgcactgtactcctcggtccctttccctgagggggaagcctttcccccgtctccgtcaccaccctgggctctcccatgcattcaaactgagg

SEQ ID NO: 5064 - DNA, 1086 bp, Homo sapiens
catggcgggacacctggcttcggatgcctgccttcttgccccctccaggcggtggaggtgatgggccaggggggccggagccgggctgggttgatcctcggacctggctaagcttccaaggccctcctggagggccaggaatcgggccgggagttgggtcaggctctgaggtgtgggggattcccccatgccccccgctgtatgagttctgtggggggatggcgtactgtgggcctcaggttggagtgcggctagtgccccaaggcggcttggagacctctcagcctgagggcgaagcaggagtcagggtggagagcaactccgatggcacctccctggagccctgcaccgtcccccctggtgccgtgaaactggagaaggagaagctggagcaaaacccgcaggagtcccagaacatcaaagctctgcagaaagaactcgaacaatttgccaagctcctgaagcagaagaggatcaccctgggatatacacaggccgatgtggggctcaccctgggggttctatttgggaaggtgttcagccaaacgaccatctgccgctttgagggtctgcagcttagcttcaagaacatgtgtaagctgcggcccttgctgcagaagtgggtggaggaagctgacaacaatgaaaatcttcaggagacatgcaaagcagaaaccctcttgcaggctcgaaagagaaagcgaaccagtatcgagaaccgagtgagaggcaacctggagaatttgttcctgcagtgcccgaaacccacactgcagcagatcagccacatcgcccagcagcttgggctcgagaaggatgtggtccgagtgtggttctgtaaccggtgccagaaaggcgagcaatcaagcagcgactatgcataacgagaggattttgaggctgctgggtctcctttctcaggggtaccagtatcctttcctctggccccagggccccattttggtaccccaggctatgggagccctcacttcactgcactgtactcctcggtccctttccctgagggggaagcctttcccccgtctccgtcaccaccctgggctctcccatgcattcaaactgagg

SEQ ID NO: 5065 - DNA, 1086 bp, Homo sapiens
catggcgggacacctggcttcggatgcctgccttcttgccccctccaggcggtggaggtgatgggccaggggggccggagccgggctgggttgatcctcggacctggctaagcttccaaggccctcctggagggccaggaatcgggccgggagttgggtcaggctctgaggtgtgggggattcccccatgccccccgctgtatgagttctgtggggggatggcgtactgtgggcctcaggttggagtgcggctagtgccccaaggcggcttggagacctctcagcctgagggcgaagcaggagtcagggtggagagcaactccgatggcacctccctggagccctgcaccgtcccccctggtgccgtgaaactggagaaggagaagctggagcaaaacccgcaggagtcccagaacatcaaagctctgcagaaagaactcgaacaatttgccaagctcctgaagcagaagaggatcaccctgggatatacacaggccgatgtggggctcaccctgggggttctatttgggaaggtgttcagccaaacgaccatctgccgctttgagggtctgcagcttagcttcaagaacatgtgtaagctgcggcccttgctgcagaaatgggtggaggaagctgacaacaatgaaaatcttcaggagacatgcaaagcagaaaccctcttgcaggctcgaaagagaaagcgaaccagtatcgagaaccgagtgagaggcaacctggagaatttgttcctgcagtgcccgaaacccacactgcagcagatcagccacatcgcccagcagcttgggctcgagaaggatgtggtccgagtgtggttctgtaaccggtgccagaaaggcaagcaatcaagcagcgactatgcataacgagaggattttgaggctgctgggtctcctttctcaggggtaccagtatcctttcctctggccccagggccccattttggtaccccaggctatgggagccctcacttcactgcactgtacttctcggtccttttccttgagggggaagcctttcccccgtctccgtcaccaccctgggctctcccatgcattcaaactgagg

SEQ ID NO: 5066 - DNA, 1086 bp, Homo sapiens
catggcgggacacctggcttcggatgcctgccttcttgccccctccaggcggtggaggtgatgggccaggggggccggagccgggctgggttgatcctcggacctggctaagcttccaaggccctcctggagggccaggaatcgggccgggagttgggtcaggctctgaggtgtgggggattcccccatgccccccgctgtatgagttctgtggggggatggcgtactgtgggcctcaggttggagtgcggctagtgccccaaggcggcttggagacctctcagcctaagggcgaagcaggagtcagggtggagagcaactccgatggcacctccctggagccctgcaccgtcccccctggtgccgtgaaactggagaaggagaagctggagcaaaacccgcaggagtcccagaacatcaaagctctgcagaaagaactcgaacaatttgccaagctcctgaagcagaagaggatcaccctgggatatacacaggccgatgtggggctcaccctgggggttctatttgggaaggtgttcagccaaacgaccatctgccgctttgagggtctgcagcatagcttcaagaacatgtgtaagctgcggcccttgctgcagaagtgggtggaggaagctgacaacaatgaaaatcttcaggagacatgcaaagcagaaaccctcttgcaggctcgaaagagaaagcgaaccagtatcgagaaccgagcgagaggcaacctggagaatttgttcctgcagtgcccgaaacccacactgcagcagaccagccacatcgcccagcagcttgggctcgagaaggatgtggtccgagtgtggttctgtaaccggtgccagaaaggcaagcaatcaagcagcgactatgcataacgagaggattttgaggctgctgggtctcctttctcaggggtaccagtatcctttcctctggccccagggccccattttggtaccccaggctatgggagccctcacttcactgcactgtactcctcggtccctttccctgagggggaagcctttcccccgtctccgtcaccaccctgggctctcccatgcattcaaactgagg

SEQ ID NO: 5067 - DNA, 1083 bp, Homo sapiens
catggcgggacacctggcttcggatttcgccttctcgccccctccaggcggtgggggtgatgggccatggggggcggagccgggctgggttgatcctctgacctggctaagcttccaaggccctcctggagggccaggaatcgggccgggggttgggccaggctctgaggtgtgggggattcccccttgccccccgccgtatgagttatgtggggggatggcgtactgtgggcctcaggttggagtggggctagtgccccaaggcggcttggagacctctcagcctgagagcgaagcaggagtcggggtggagagcaactccaatggggcctccccggaaccctgcaccgtcccccctggtgccgtgaagctggagaaggagaagcaagagcaaaacccggagaagtcccaggacatcaaagctctgcagaaagaactcgagcaatttgccaagctcctgaagcagaagaggatcaccctgggatatgcacaggccgatgtggggctcatcctgggggttctatttgggaaggtgttcagccaaaagaccatctgccgctttgaggctctgcagcttagcttcaagaacatgtgtaagctgcggcccttgctgcagaagtgggtggaggaagctgacaacaatgaaaatcttcaggagatatgcaaagcagaaaccctcatgcaggcccgaaagagaaagcgaaccagtatcgagaaccgagtgagaggcaacctggagaatttgttcccgcagtgcccgaaacccacactgcagatcagccacatcgcccagcagcttgggctcgagaaggatgtggtccgagtgtggttctgtaaccggcgccagaagggcaagcgatcaagcagcgactatgcacaacgagaggattttgaggctgctgggtctcctttctcagggggaccagtgtcctttcctccggccccagggccccattttggtaccccaggctatgggagccctcacttcactgcactgtactcctcagtccctttccctgagggggaagtctttcccccagtctccgtcatcactctgggctctcccatgcattcaaactgagg

SEQ ID NO: 5068 - DNA, 1086 bp, Homo sapiens
catggcgggacacctggcttcggatgcctgccttcttgccccctccaggcggtggaggtgatgggccaggggggccggagccgggctgggttgatcctcggacctggctaagcttccaaggccctcctggagggccaggaatcgggccgggagttgggtcaggctctgaggtgtgggggattcccccatgccccccgctgtatgagttctgtggggggatggcgtactgtgggcctcaggttggagtgcggctagtgccccaaggcggcttggagacctctcagcctgagggcgaagcaggagtcagggtggagagcaactccgatggcacctccctggagccctgcaccgtcccccctggtgccgtgaaactggagaaggagaagctggagcaaaacccgcaggagtcccagaacatcaaagctctgcagaaagaactcgaacaatttgccaagctcctgaagcagaagaggatcaccctgggatatacacaggccgatgtggggctcaccctgggggttctatttgggaaggtgttcagccaaacgaccatctgccgctttgagggtctgcagcatagcttcaagaacatgtgtaagctgcggcccttgctgcagaagtgggtggaggaagctgacaacaatgaaaatcttcaggagacatgcaaagcagaaaccctcttgcaggctcgaaagagaaagcgaaccagtatcgagaaccgagcgagaggcaacctggagaatttgttcctgcagtgcccgaaacccacactgcagcagatcagccacatcgcccagcagcttgggctcgagaaggatgtggtccgagtgtggttctgtaaccggtgccagaaaggcaagcaatcaagcagcgactatgcataacgagaggattttgaggctgctgggtctcctttctcaggggtaccagtatcctttcctctggccccagggccccattttggtaccccaggctatgggagccctcacttcactgcactgtactcctcggtccctttccctgagggggaagcctttcccccgtctccgtcaccaccctgggctctcccatgcattcaaactgagg

SEQ ID NO: 5069 - DNA, 1086 bp, Homo sapiens
catggcgggacacctggcttcggatgcctgccttcttgccccctccaggcggtggaggtgatgggccaggggggccggagccgggctgggttgatcctcggacctggctaagcttccaaggccctcctggagggccaggaatcgggccgggagttgggtcaggctctgaggtgtgggggattcccccatgccccccgctgtatgagttctgtggggggatggcgtactgtgggcctcaggttggagtgcggctagtgccccaaggcggcttggagacctctcagcctgagggcgaagcaggagtcagggtggagagcaactccgatggcacctccctggagccctgcaccgtcccccctggtgccgtgaaactggagaaggagaagctggagcaaaacccgcaggagtcccagaacatcaaagctctgcagaaagaactcgaacaatttgccaagctcctgaagcagaagaggatcaccctgggatatacacaggccgatgtggggctcaccctgggggttctatttgggaaggtgttcagccaaacgaccatctgccgctttgagggtctgcagcttagcttcaagaacatgtgtaagctgcggcccttgctgcagaagtgggtggaggaagctgacaacaatgaaaatcttcaggagacatgcaaagcagaaaccctcttgcaggctcgaaagagaaagcgaaccagtatcgagaaccgagtgagaggcaacctggagaatttgttcctgcagtgcccgaaacccacactgcagcagatcagccacatcgcccagcagcttgggctcgagaaggatgtggtccgagtgtggttctgtaaccggtgccagaaaggcaagcaatcaagcagcgactatgcataacgagaggattttgaggctgctgggtctcctttctcaggggtaccagtatcctttcctctggccccagggccccattttggtaccccaggctatgggagccctcacttcactgcactgtactcctcggtccctttccctgagggggaagcctttcccccgtctccgtcaccaccctgggctctcccatgcattcaaactgagg

SEQ ID NO: 5070 - DNA, 1083 bp, Homo sapiens
catggcgggacacctggcttcggatttcgccttctcgccccctccaggcggtgggggtgatgggccatggggggcggagccgggctgggttgatcctctgacctggctaagcttccgaggccctcctggagggccaggaatcgggccgggggttgggccaggctctgaggtgtgggggattcccccttgccccccgccgtatgagttatgtggggggatggcgtactgtgggcctcaggttggagtggggctagtgccccaaggcggcttggagacctctcagcctgagagcgaagcaggagtcggggtggagagcaactccaatggggcctccccggaaccctgcaccgtcccccctggtgccgtgaagctggagaaggagaagctagagcaaaacccggagaagtcccaggacatcaaagctctgcagaaagaactcgagcaatttgccaagctcctgaagcagaagaggatcaccctgggatatacacaggccgatgtggggcgcatcctgggggttctatttgggaaggtgttcagccaaaagaccatctgccgctttgaggctctgcagcttagcttcaagaacatgtgtaagctgcggcccttgctgcagaagtgggtggaggaagctgacaacaatgaaaatcttcaggagatatgcaaagcagaaaccctcatgcaggcccgaaagagaaagcgaaccagtatcgagaaccgagtgagaggcaacctggagaatttgttcctgcagtgcccgaaacccacactgcagatcagccacatcgcccagcagcttgggctcgagaaggatgtggtccgagtgtggttctgtaaccggcgccagaagggcaagcgatcaagcagcgactatgcacaacgagtggattttgaggctgctgggtctcctttctcagggggaccagtgtcctttcctccggccccagggccccattttggtaccccaggctatgggagccctcacttcactgcactgtactcctcagtccctttccctgagggggaagtctttcccccagtctccgtcatcactctgggctctcccatgcattcaaactgagg

SEQ ID NO: 5071 - DNA, 1086 bp, Homo sapiens; identical to SEQ ID NO: 5068

SEQ ID NO: 5072 - DNA, 1086 bp, Homo sapiens; identical to SEQ ID NO: 5068

SEQ ID NO: 5073 - DNA, 1086 bp, Homo sapiens
catggcgggacacctggcttcggatgcctgccttcttgccccctccaggcggtggaggtgatgggccaggggggccggagccgggctgggttgatcctcggacctggctaagcttccaaggccctcctggagggccaggaatcgggccgggagttgggtcaggctctgaggtgtgggggattcccccatgccccccgctgtatgagttctgtggggggatggcgtactgtgggcctcaggttggagtgcggctagtgccccaaggcggcttggagacctctcagcctgagggcgaagcaggagtcagggtggagagcaactccgatggcacctccctggagccctgcaccgtcccccctggtgccgtgaaactggagaaggagaagctggagcaaaacccgcaggagtcccagaacatcaaagctctgcagaaagaactcgaacaatttgccaagctcctgaagcagaagaggatcaccctgggatatacacaggccgatgtggggctcaccctgggggttctatttgggaaggtgttcagccaaacgaccatctgccgctttgagagtctgcagcttagcttcaagaacatgtgtaagctgcggcccttgctgcagaagtgggtggaggaagctgacaacaatgaaaatcttcaggagacatgcaaagcagaaaccctcttgcaggctcgaaagagaaagcgaaccagtatcgagaaccgagtgagaggcaacctggagaatttgttcctgcagtgcccgaaacccacactgcagcagatcagccacatcgcccagcagcttgggctcgagaaggatgtggtccgagtgtggttctgtaaccggtgccagaaaggcaagcaatcaagcagcgactatgcataacgagaggattttgaggctgctgggtctcctttctcaggggtaccagtatcctttcctctggccccagggccccattttggtaccccaggctatgggagccctcacttcactgcactgtactcctcggtccctttccctgagggggaagcctttcccccgtctccgtcaccaccctgggctctcccatgcattcaaactgagg

SEQ ID NO: 5074 - DNA, 1086 bp, Homo sapiens; identical to SEQ ID NO: 5068

SEQ ID NO: 5075 - DNA, 1086 bp, Homo sapiens
catggcgggacacctggcttcggatgcctgccttcttgccccctccaggcggtggaggtgatgggccaggggggccggagccgggctgggttgatcctcggacctggctaagcttccaaggccctcctggagggccaggaatcgggccgggagttaggtcaggctctgaggtgtgggggattcccccatgccccccgctgtatgagttctgtggggggatggcgtactgtgggcctcaggttggagtgcggctagtgccccaaggcggcttggagacctctcagcctgagggcgaagcaggagtcagggtggagagcaactccgatggcacctccctggagccctgcaccgtcccccctggtgccgtgaaactggagaaggagaagctggagcaaaacccgcaggagtcccagaacatcaaagctctgcagaaagaactcgaacaatttgccaagctcctgaagcagaagaggatcaccctgggatatacacaggccgatgtggggctcaccctgggggttctatttgggaaggtgttcagccaaacgaccatctgccgctttgagggtctgcagcttagcttcaagaacatgtgtaagctgcggcccttgctgcagaagtgggtggaggaagctgacaacaatgaaaatcttcaggagacatgcaaagcagaaaccctcttgcaggctcgaaagagaaagcgaaccagtatcgagaaccgagtgagaggcaacctggagaatttgttcctgcagtgcccgaaacccacactgcagcagatcagccacatcgcccagcagcttgggctcgagaaggatgtggtccgagtgtggttctgtaaccggtgccagaaaggcaagcaatcaagcagcgactatgcataacgagaggattttgaggctgctgggtctcctttctcaggggtaccagtatcctttcctctggccccagggccccattttggtaccccaggctatgggagccctcacttcactgcactgtactcctcggtccctttccctgagggggaagcctttcccccgtctccgtcaccaccctgggctctcccatgcattcaaactgagg

SEQ ID NO: 5076 - DNA, 1086 bp, Homo sapiens; identical to SEQ ID NO: 5069

SEQ ID NO: 5077 - DNA, 1084 bp, Homo sapiens; identical to SEQ ID NO: 5052

SEQ ID NO: 5078 - DNA, 1083 bp, Homo sapiens
catggcgggacacctggcttcggatttcgccttctcgccccctccaggcggtgggggtgatgggccatggggggcggagccgggctgggttgatcctctgacctggctaagcttccaaggccctcctggagggccaggaatcgggccgggggttgggccaggctctgaggtgtgggggattcccccttgccccccgccgtatgagttatgtggggggatggcgtactgtgggcctcaggttggagtggggctagtgccccaaggcggcttggagacctctcagcctgagagcgaagcaggagtcggggtggagagcaactccaatggggcctccccggaaccctgcaccgtcccccctggtgccgtgaagctggagaaggagaagctagagcaaaacccggagaagtcccaggacatcaaagctctgcagaaagaactcgagcaatttgccaagctcctgaagcagaagaggatcaccctgggatatacacaggccgatgtggggctcatcctgggggttctatttgggaaggtgttcagccaaacgaccatctgccgctttgaggctctgcagcttagcttcaagaacatgtgtaagctgcggcccttgctgcagaagtgggtggaggaagctgacaacgatgaaaatcttcaggagatatgcaaagcagaaaccctcatgcaggcccgaaagagaaagcgaaccagtatcgagaaccgagtgagaggcaacctggagaatttgttcctgcagtgcccgaaacccacactgcagatcagccacatcgcccagcagcttgggctcgagaaggatgtggtccgagtgtggttctgtaaccggcgccagaagggcaagcgatcaagcagcgactatgcacaacgagaggattttgaggctgctgggtctcctttctcagggggaccagtgtcctttcctccggccccagggccccattttggtaccccaggctatgggagccctcacttcactgcactgtactcctcagtccctttccctgagggggaagtctttcccccagtctccgtcatcactctgggctctcccatgcattcaaactgagg

SEQ ID NO: 5079 - DNA, 1086 bp, Homo sapiens; identical to SEQ ID NO: 5069

SEQ ID NO: 5080 - DNA, 1083 bp, Homo sapiens
catggcgggacacctggcttcggatttcgccttctcgccccctccaggcggtgggggtgatgggccatggggggcggagccgggctgggttgatcctctgacctggctaagcttccaaggccctcctggagggccaggaatcgggccgggggttgggccaggctctgaggtgtgggggattcccccttgccccccgccgtatgagttatgtggggggatggcgtactgtgggcctcaggttggagtggggctagtgccccaaggcggcttggagacctctcagcctgagagcgaagcaggagtcggggtggagagcaactccaatggggcctccccggaaccctgcaccgtcccccctggtgccgtgaagctggagaaggagaagctagagcaaaacccggagaagtcccaggacatcaaagctctgcagaaagaactcgagcaatttgccaagctcctgaagcagaagaggatcaccctgggatatacacaggccgatgtggggctcatcctgggggttctatttgggaaggtgttcagccaaaagaccatctgccgctttgaggctctgcagcttagcttcaagaacatgtgtaagctgcggcccttgctgcagaagtgggtggaggaaactgacaacaatgaaaatcttcaggagatatgcaaagcagaaaccctcatgcaggcccgaaagagaaagcgaaccagtatcgagaaccgagtgagaggcaacctggagaatttgttcctgcagtgcccgaaacccacactgcagatcagccacatcgcccagcagcttgggctcgagaaggacgtggtccgagtgtggttctgtaaccggcgccagaagggcaagcgatcaagcagcgactatgcacaacgagaggattttgaggctgctgggtctcctttctcagggggaccagtgtcctttcctccggccccagggccccattttggtaccccaggctatgggagccctcacttcactgcactgtactcctcagtccctttccctgagggggaagtctttcccccagtctccgtcatcactctgggctctcccatgcattcaaactgagg

SEQ ID NO: 5081 - DNA, 1086 bp, Homo sapiens; identical to SEQ ID NO: 5069

SEQ ID NO: 5082 - DNA, 1087 bp, Homo sapiens
catggcgggacacctggcttcggatgcctgccttcttgccccctccaggcggtggaggtgatgggccaggggggccggagccgggctgggttgatcctcggacctggctaagcttccaaggccctcctggagggccaggaatcgggccgggagttgggtcaggctctgaggtgtgggggattcccccatgccccccgctgtatgagttctgtggggggatggcgtactgtgggcctcaggttggagtgcggctagtgccccaaggcggcttggagacctctcagcctgagggcgaagcaggagtcagggtggagagcaactccgatggcacctccctggagccctgcaccgtcccccctggtgccgtgaaactggagaaggagaagctggagcaaaacccgcaggagtcccagaacatcaaagctctgcagaaagaactcgaacaatttgccaagctcctgaagcagaagaggatcaccctgggatatacacaggccgatgtggggctcaccctgggggttctatttgggaaggtgttcagccaaacgaccatctgccgctttgagggtctgcagcttagcttcaagaacatgtgtaagctgcggcccttgctgcagaagtgggtggaggaagctgacaacaatgaaaatcttcaggagacatgcaaagcagaaaccctcttgcaggctcgaaagagaaagcgaaccagtatcgagaaccgagtgagaggcaacctggagaatttgttcctgcagtgcccgaaacccacactgcagcagatcagccacatcgcccagcagcttgggctcgagaaggatgtggtccgagtgtggttctgtaaccggtgccagaaaggcaagcaatcaagcagcgactatgcataacgagaggattttgaggctgctgggtctcctttctcaggggtaccagtatcctttcctctggccccagggccccattttggtaccccaggccatgggagccctcacttcactgcactgtactcctcggtccctttccctgagggggaagcctttccccctgtctccgtcaccactctgggctctcccatgcattcaaactgagg

SEQ ID NO: 5083 - DNA, 1083 bp, Homo sapiens; identical to SEQ ID NO: 5078

SEQ ID NO: 5084 - DNA, 1083 bp, Homo sapiens
catggcgggacacctggcttcggatttcgccttctcaccccctccaggcggtggaggtgatgggccaggggggccggagccgggctgggttgatcctcggacctggctaagcttccaaggccctcctggagggccaggaatcgggccgggggttgggccaggctctgaggtgtgggggattcccccatgtcccccgccgtatgagttatgtggggggatggcgtactgtgggcctcaggttggagtggggctagtgccccaaggcggcttggagacctctcagcctgagagcgaagcaggagtcggggtggagagcaactccaatggggcctccccggaaccctgcaccgtcccccctggtgccgtgaagctggagaaggagaagctggagcaaaacccggagaagtcccaggacatcaaagctctgcagaaagaactcgagcaatttgccaagctcctgaagcagaagaggatcaccctgggatatacacaggccgatgtggggctcatcctgggggttctatttgggaaggtgttcagccaaaagaccatctgccgctttgaggctctgcagcttagcttcaagaacatgtgtaagctgcggcccttgctgcagaagtgggtggaggaagctgacaacaatgaaaatcttcaggagatatgcaaagcagaaaccctcatgcaggcccgaaagagaaagcgaaccagtatcgagaaccgagtgagaggcaacctggagaatttgttcctgcagtgcccgaaacccacactgcagatcagccacatcgcccagcagcttgggctcgagaaggatgtggtccgagtgtggttctgtaaccggcgccagaagggcaagcgatcaagcagcgactatgcacaacgagaggattttgaggctgctgggtctcctttctcagggggaccagtgtcctttcctccggccccagggccccattttggtaccccaggctatgggagccctcacttcactgcactgtactcctcagtccctttccctgagggggaagtctttcccccagtctccgtcatcactctgggctctcccatgcattcaaactgagg

SEQ ID NO: 5085 - DNA, 1084 bp, Homo sapiens; identical to SEQ ID NO: 5052

SEQ ID NO: 5086 - DNA, 1083 bp, Homo sapiens
catggcgggacacctggcttcggatttcaccttctcgccccctccaggcggtgggggtgatgggccatggggggcggagccgggctgggttgatcctctgacctggctaagcttccaaggccctcctggagggccaggaatcgggccgggggttgggccaggctctgaggtgtgggggattcccccttgccccccgccgtatgagttatgtggggggatggcgtactgtgggcctcaggttggagtggggctagtgccccaaggcggcttggagacctctcagcctgagagcgaagcaggagtcggggtggagagcaactccaatggggcctccccggaaccctgcaccgtcccccctggtgccgtgaagctggagaaggagaagctagagcaaaacccggagaagtcccagggcatcaaagctctgcagaaagaactcgagcaatttgccaagctcctgaagcagaagaggatcaccctgggatatacacaggccgatgtggggctcatcctgggggttctatttgggaaggtgttcagccaaacgaccatctgccgctttgaggctctgcagcttagcttcaagaacatgtgtaagctgcggcccttgctgcagaagtgggtggaggaagctgacaacgatgaaaatcttcaggagatatgcaaagcagaaaccctcatgcaggcccgaaagagaaagcgaaccagtatcgagaaccgagtgagaggcaacctggagaatttgttcctgcagtgcccgaaacccacactgcagatcagccacatcgcccagcagcttgggctcgagaaggatgtggtccgagtgtggttctgtaaccggcgccagaagggcaagcgatcaagcagcgactatgcacaacgagaggattttgaggctgctgggtctcctttctcagggggaccagtgtcctttcctccggccccagggccccattttggtaccccaggctatgggagccctcacttcactgcactgtactcctcagtccctttccctgagggggaagtctttcccccagtctccgtcatcactctgggctctcccatgcattcaaactgagg

SEQ ID NO: 5087 - DNA, 1084 bp, Homo sapiens
catggcgggacacctggcttcggatttcgccttctcaccccctccaggcggtggaggtgatgggccaggggggccggagccgggctgggttgatcctcggacctggctaagcttccaaggccctcctggagggccaggaatcgggccggggtttgggccaggctctgaggagtgggggattcccccatgtcccccgccgtatgagttctgcggggggatggcgtactgtgggcctcagactggagtggggctagtgccccaagacggcttggagacctctcagcctgagggcgaagcaggagtcggggtggagagcaactccgatggggcctccccggagccctgcaccgtcccctctggtgccgtgaagctggagaaggagaagctggagcaaaacccgaaggagtcccaggacatcaaagctctgcagaaagaactcgagcaatttgccaagctcctgaagcagaagaggatcaccctgggatatacacaggccgatgtggctcaccctgggggttctatttgggaaggtgttcagccaaacgaccatctgccgctttgaggctctgcagcttagcttcaagaacatgtgtgagctgcggcccttgctgcagaagtgggtggaggaagctgacaacaatgaaaatcttcaggagatatacaaagcagaaaccctcgtgcaggccggaaagagaaagcgaaccagtatcgagaaccaagtgagaggcaacctggagaatttgttcctgcggtgcccgaaacccacactacagcagatcagccacgtcgcccagcagcttgggctggagaaggatgtggtccgagtgtggttctgtaaccggcgccagaagggcaagcgatcaagcagtggctatgcacaacgagaggattttgaggctgttgggtctcctttctcagggggaccagtgtcctttcctctggccccagggccccattttggtaccccaggctatgggagccctcacttcactgcactgtactcctcggtccctttccctgagggggaagcctttccccctgtctccgtcaccactctgggctctcccatgcattcaaactgagg

SEQ ID NO: 5088 - DNA, 1084 bp, Homo sapiens
catggcgggacacctggcttcggatttcgccttctcaccccctccaggcggtggaggtgatgggccaggggggccggagccgggctgggttgatcctcggacctggctaagcttccaaggccctcctggagggccaggaatcgggccggggtttgggccaggctctgaggagtgggggattcccccatgtcccccgccgtatgagttctgcggggggatggcgtactgtgggcctcagactggagtggggctagtgccccaagacggcttggagacctctcagcctgagggcgaagcaggagtcggggcggagagcaactccgatggggcctccccggagccctgcaccgtcccctctggtgccgtgaagctggagaaggagaagctggagcaaaacccgaaggagtcccaggacatcaaagctctgcagaaagaactcgagcaatttgccaagctcctgaagcagaagaggatcaccctgggatatacacaggccgatgtggctcaccctgggggttctatttgggaaggtgttcagccaaacgaccatctgccgctttgaggctctgcagcttagcttcaagaacatgtgtgagctgcggcccttgctgcagaagtgggtggaggaagctgacaacaatgaaaatcttcaggagatatgcaaagcagaaaccctcgtgcaggccggaaagagaaagcgaaccagtatcgagaaccaagtgagaggcaacctggagaatttgttcctgcggtgcccgaaacccacactgcagcagatcagccacatcgcccagcagcttgggctggagaaggatgtggtccgagtgtggttctgtaaccggcgccagaagggcaagcgatcaagcagtggctatgcacaacgagaggagtttgaggctgttgggtctcctttctcagggggaccagtgtcctttcctctggccccagggccccattttggtaccccaggctatgggagccctcacttcactgcactgtactcctcggtccctttccctgagggggaagcctttccccctgtctccgtcaccactctgggctctcccatgcattcaaactgagg

SEQ ID NO: 5089 - DNA, 1086 bp, Homo sapiens
catggcgggacacctggcttcggatgcctgccttcttgccccctccaggcggtggaggtgatgggccaggggggccggagccgggctgggttgatcctcggacctggctaagcttccaaggccctcctggagggccaggaatcgggccgggagttgggtcaggctctgaggtgtgggggattcccccatgccccccgctgtatgagttctgtggggggatggcgtactgtgggcctcaggttggagtgcggctagtgccccaaggcggcttggagacctctcagcctgagggcgaagcaggagtcagggtggagagcaactccgatggcacctccctggagccctgcgccgccccccctggtgccgtgaagctggagaaggagaagctggagcaaaacccgcaggagtcccagaacatcaaagctctgcagaaagaactcgaacaatttgccaagctcctgaagcagaagaggatcaccctgggatatacacaggccgatgtggggctcaccctgggggttctatttgggaaggtgttcagccaaacgaccatctgccgctttgagggtctgcagcttagcttcaagaacatgtgtaagctgcggcccttgctgcagaagcgggtggaggaagctgacaacaatgaaaatcttcaggagacatgcaaagcagaaaccctcttgcaggctcgaaagagaaagcgaaccagtatcgagaaccgagtgagaggcaacctggagaatttgttcctgcagtgcccgaaacccacactgcagcagatcagccacatcgcccagcagcttgggctcgagaaggatgtggtccgagtgtggttctgtaaccggtgccagaaaggcaagcaatcaagcagcgactatgcataacgagaggattttgaggctgccgggtctcctttctcaggggtaccagtatcctttcctctggccccagggccccattttggtagcccaggctatgggagccctcacttcactgcactgtactcctcggtccctttccctgagggggaagcctttcccccgtctccgtcaccaccctgggctctcccatgcattcaaactgagg

SEQ ID NO: 5090 - DNA, 1086 bp, Homo sapiens
catggcgggacacctggcttcggatgcctgccttcttgccccctccaggcggtggaggtgatgggccaggggggccggagccgggctgggttgatcctcggacctggctaagcttccaaggccctcctggagggccaggaatcgggccgggagctgggtcaggctctgaggtgtgggggattcccccatgccccccgctgtatgagttctgtggggggatggcgtactgtgggcctcaggttggagtgcggctagtgccccaaggcggcttggagacctctcagcctgagggcgaagcaggagtcagggtggagagcaactccgatggcacctccctggagccctgcaccgtcccccctggtgccgtgaaactggagaaggagaagctggagcaaaacccgcaggagtcccagaacatcaaagctctgcagaaagaactcgaacaatttgccaagctcctgaagcagaagaggatcaccctgggatatacacaggccgatgtggggctcaccctgggggttctatttgggaaggtgttcagccaaacgaccatctgccgctttgagggtctgcagcttagcttcaagaacatgtgtaagctgcggcccttgctgcagaagtgggtggaggaagctgacaacaatgaaaatcttcaggagacatgcaaagcagaaaccctcttgcaggctcgaaagagaaagcgaaccagtatcgagaaccgagtgagaggcaacctggagaatttgttcctgcagtgcccgaaacccacactgcagcagatcagccacatcgcccagcagcttgggctcgagaaggatgtggtccgagtgtggttctgtagccggtgccagaaaggcaagcaatcaagcagcgactatgcataacgagaggattttgaggctgctgggtctcctttctcaggggtaccagtatcctttcctctggccccagggccccattttggtaccccaggctatgggagccctcactccactgcactgtactcctcggtccctttccctgagggggaagcctttcccccgtctccgtcaccaccctgggctctcccatgcattcaaactgagg

SEQ ID NO: 5091 - DNA, 1083 bp, Homo sapiens
catggcgggacacctggcttcggatttcgccttctcgccccctccaggcggtgggggtgatgggccatggggggcggagccgggctgggttgatcctctgacctggctaagcttccaaggccctcctggagggccaggaatcgggccgggggttgggccaggctctgaggtgtgggggattcccccttgccccccgccgtatgagttatgtggggggatggcgtactgtgggcctcaggttggagtggggctagtgccccaaggcggcttggagacctctcagcctgagagcgaagcaggagtcggggtggagagcaactccaatggggcctccccggaaccctgcaccgtcccccctggtgccgtgaagctggagaaggagaagctagagcaaaacccggagaagtcccaggacatcaaagctctgcagaaagaactcgagcaatttgccaagctcctgaagcagaagaggatcaccctgggatatacacaggccgatgtggggctcatcctgggggttctatttgagaaggtgttcagccaaaagaccatctgccgctttgaggctctgcagcttagcttcaagaacatgtgtaagctgcggcccttgctgcagaagtgggtggaggaagctgacaacaatgaaaatcttcaggagatatgcaaagcagaaaccctcatgcaggcccgaaagagaaagcgaaccagtatcgagaaccgagtgagaggcaacctggagaatttgttcctgcagtgcccgaaacccacactgcagatcagccacatcgcccagcagcttgggctcgagaaggatgtggtccgagtgtggttctgtaaccggcgccagaagggcaagcgatcaagcagcgactatgcacaacgagaggattttgaggctgctgggtctcctttctcagggggaccagtgtcctttcctccggccccagggccccattttggtaccccaggctatgggagccctcacttcactgcactgtactcctcagtccctttccctgagggggaagtctttcccccagtctccgtcatcactctgggctctcccatgcattcaaactgagg

SEQ ID NO: 5092 - DNA, 1084 bp, Homo sapiens
catggcgggacacctggcttcggatttcgccttctcaccccctccaggcggtggaggtgatgggccaggggggccggagccgggctgggttgatcctcggacctggctaagcttccaaggccctcctggagggccaggaatcgggccggggtttgggccaggctctgaggagtgggggattcccccatgtcccccgccgtatgagttctgcggggggatggcgtactgtgggcctcagactggagtggggctagtgccccaagacggcttggagacctctcagcctgagggcgaagcaggagtcggggtggagagcaactccgatggggcctccccggagccctgcaccgtcccctctggtgccgtgaagctggagaaggagaagctggagcaaaacccgaaggagtcccaggacatcaaagctctgcagaaagaactcgagcaatttgccaagctcctgaagcagaagaggatcaccctgggatatacacaggccgatgtggctcaccctgggggttctatttgggaaggtgttcagccaaacgaccatctgccgctttgaggctctgcagcttagcttcaagaacatgtgtgagctgcggcccttgctgcagaagtgggtggaggaagctgacaacaatgaaaatcttcaggagatatgcaaagcagaaaccctcgtgcaggccggaaagagaaagcgaaccagtatcgagaaccgagtgagaggcaacctggagaatttgttcctgcagtgcccgaaacccacactgcagcagatcagccacatcgcccagcagcttgggctcgagaaggatgtggtccgagtgtggttctgtaaccggtgccagaaaggcaagcgatcaagcagcgactatgcacaacgagaggattttgaggctgctgggtctcctttctcagggggaccagtgtcctttcctccggccccagggccccattttggtaccccaggctatgggagccctcacttcactgcactgtactcctcagtccctttccctgagggggaagtctttcccccagtctccgtcatcactctgggctctcccatgcattcaaactgagg

SEQ ID NO: 5093 - DNA, 1083 bp, Homo sapiens
catggcgggacacctggcttcggatttcgccttctcgccccctccaggcggtgggggtgatgggccatggggggcggagccgggctgggttgatcctctgacctggctaagcttccaaggccctcctggagggccaggaatcgggccgggggttgggccaggctctgaggtgtgggggattcccccttgccccccgccatatgagttatgtggggggatggcgtactgtgggcctcaggttggagtggggctagtgccccaaggcggcttggagacctctcagcctgagagcgaagcaggagtcggggtggagagcaactccaatggggcctccccggaaccctgcaccgtcccccctggtgccgtgaagctggagaaggagaagctagagcaaaacccggagaagtcccaggacatcaaagctctgcagaaagaactcgagcaatttgccaagctcctgaagcagaagaggatcaccctgggatatacacaggccgatgtggggctcatcctgggggttctatttgggaaggtgttcagccaaaagaccatctgccgctttgaggctctgcagcttagcttcaagaacatgtgtaagctgcggcccttgctgcagaagtgggtggaggaagctgacaacaatgaaaatcttcaggagatatgcaaagcagaaaccctcatgcaggcccgaaagagaaagcgaaccagtatcgagaaccgagtgagaggcaacctggagaatttgttcctgcagtgcccgaaacccacactgcagatcagccacatcgcccagcagcttgggctcgagaaggatgtggtccgagtgtggttctgtaaccggcgccagaagggcaagcgatcaagcagcgactatgcacaacgagaggattttgaggctgctgggtctcctttctcagggggaccagtgtcctttcctccggccccagggccccattttggtaccccaggctatgggagccctcacttcactgcactgtactcctcagtccctttccctgagggggaagtctttcccccagtctccgtcatcactctgggctctcccatgcattcaaactgagg

SEQ ID NO: 5094 - DNA, 1084 bp, Homo sapiens
catggcgggacacctggcttcggatttcgccttctcaccccctccaggcggtggaggtgatgggccaggggggccggagccgggctgggttgatcctcggacctggctaagcttccaaggccctcctggagggccaggaatcgggccggggtttgggccaggctctgaggagtgggggattcccccatgtcccccgccgtatgagttctgcggggggatggcgtactgtgggcctcagactggagtggggccagtgccccaagacggcttggagacctctcagcctgagggcgaagcaggagtcggggtggagagcaactccgatggggcctccccggagccctgcaccgtcccctctggtgccgtgaagctggagaaggagaagctggagcaaaacccgaaggagtcccaggacatcaaagctctgcagaaagaactcgagcaatttgccaagctcctgaagcagaagaggatcaccctgggatatacacaggccgatgtggctcaccctgggggttctatttgggaaggtgttcagccaaacgaccatctgccgctttgaggctctgcagcttagcttcaagaacatgtgtgagctgcggcccttgctgcagaagtgggtggaggaagctgacaacaatgaaaatcttcaggagatatgcaaagcagaaaccctcatgcaggcccgaaagagaaagcgaaccagtatcgagaaccgagtgagaggcaacctggagaatttgttcctgcggtgcccgaaacccacactgcagcagatcagccacatcgcccagcagcttgggctggagaaggatgtggtccgagtgtggttctgtaaccggcgccagaagggcaagcgatcaagcagtggctatgcacaacgagaggattttgaggctgttgggtctcctttctcagggggaccagtgtcctttcctctggccccagggccccattttggtaccccaggctatgggagccctcacttcactgcactgtactcctcggtccctttccctgagggggaagcctttccccctgtctccgtcaccactctgggctctcccatgcattcaaactgagg

SEQ ID NO: 5095 - DNA, 1086 bp, Homo sapiens; identical to SEQ ID NO: 5069

SEQ ID NO: 5096 - DNA, 1083 bp, Homo sapiens
catggcgggacacctggcttcggatttcgccttctcgctccctccaggcggtgggggtgatgggccatggggggcggagccgggctgggttgatcctctgacctggctaagcttccaaggccctcctggagggccaggaatcgggccgggggttgggccaggctctgaggtgtgggggattcccccttgccccccgccgtatgagttatgtggggggatggcgtactgtgggcctcaggttggagtggggctagtgccccaaggcggcttggagacctctcagcctgagagcgaagcaggagtcggggtggagagcaactccaatggggcctccccggaaccctgcaccgtcccccctggtgccgtgaagctggagaaggagaagctagagcaaaacccggagaagtcccaggacatcaaagctctgcagaaagaactcgagcaatttgccaagctcctgaagcagaagaggatcaccctgggatatacacaggccgatgtggggctcatcctgggggttctatttgggaaggtgttcagccaaaagaccatctgccgctttgaggctctgcagcttagcttcaagaacatgtgtaagctgcggcccttgctgcagaagtgggtggaggaagctgacaacaatgaaaatcttcaggagatatgcaaagcagaaaccctcatgcaggcccgaaagagaaagcgaaccagtatcgagaaccgagtgagaggcaacctggagaatttgttcctgcagtgcccgaaacccacactgcagatcagccacatcgcccatcagcttgggctcgagaaggatgtggtccgagtgtggttctgtaaccggcgccagaagggcaagcgatcaagcagcgactatgcacaacgagaggattttgaggctgctgggtctcctttctcaggggggccagtgtcctttcctccggccccagggccccattttggtaccccaggctatgggagccctcacttcactgcactgtactcctcagtccctttccctgagggggaagtctttcccccagtctccgtcatcactctgggctctcccatgcattcaaactgagg

SEQ ID NO: 5097 - DNA, 1083 bp, Homo sapiens
catggcgggacacctggcttcggatttcgccttctcgccccctccaggcggtgggggtgatgggccatggggggcggagccgggctgggttgatcctctgacctggctaagcttccaaggccctcctggagggccaggaatcgggccgggggttgggccaggctctgaggtgtgggggattcccccttgccccccgccgtatgagttatgtggggggatggcgtactgtgggcctcaggttggagtggggctagtgccccaaggcggcttggtgacttctcagcctgagagcgaagcaggagtcggggtggagagcaactccaatggggcctccccggaaccctgcaccgtcccccctggtgccgtgaagctggagaaggagaagctagagcaaaacccggagaagtcccaggacatcaaagctctgcagaaagaactcgagcaatttgccaagctcctgaagcagaagaggatcaccctgggatatacacaggccgatgtggggctcatcctgggggttctatttgggaaggtgttcagccaaaagaccatctgccgctttgaggctctgcagcttagcttcaagaacatgtgtaagctgcggcccttgctgcagaagtgggtggaggaagctgacaacaatgaaaatcttcaggagatatgcaaagcagaaaccctcatgcaggcccgaaagagaaagcgaaccagtatcgagaaccgagtgagaggcaacctggagaatttgttcctgcagtgcccgaaacccacactgcagatcagccacatcgcccagcagcttgggctcgagaaggatgtggtccgagtgtggttctgtaaccggcgccagaagggcaagcgatcaagcagcgactatgcacaacgagaggattttgaggctgctgggtctcctttctcagggggaccagtgtcctttcctccggccccagggccccattttggtaccccaggctatgggagccctcacttcactgcactgtactcctcagtccctttccctgagggggaagtctttcccccagtctccgtcatcactctgggctctcccatgcattcaaactgagg

SEQ ID NO: 5098 - DNA, 1084 bp, Homo sapiens; identical to SEQ ID NO: 5052

SEQ ID NO: 5099 - DNA, 1083 bp, Homo sapiens
catggcgggacacctggcttcggatttcgccttctcgccccctccaggcggtgggggtgatgggccatggggggcggagccgggctgggttgatcctctgacctggctaagcttccaaggccctcctggagggccaggaatcgggccgggggttgggccaggctctgaggtgtgggggattcccccttgccccccgccgtatgagttatgtggggggatggcgtactgtgggcctcaggttggagtggggctagtgccccaaggcggcttggagacctctcagcctgagagcgaagcaggagtcggggtggagagcagctccaatggggcctccccggaaccctgcaccgtcccccctggtgccgtgaagctggagaaggagaagctagagcaaaacccggagaagtcccaggacatcaaagctctgcagaaagaactcgagcaatttgccaagctcctgaagcagaagaggatcaccctgggatatacacaggccgatgtggggctcatcctgggggttctatttgggaaggtgttcagccaaaagaccatctgccgctttgaggctctgcagcttagcttcaagaacatgtgtaagctgcggcccttgctgcagaagtgggtggaggaagctgacaacaatgaaaatcttcaggagatatgcaaagcagaaaccctcatgcaggcccgaaagagaaagcgaaccagtatcgagaaccgagtgagaggcaacctggagaatttgttcctgcagtgcccgaaacccacactgcagatcagccacatcgcccagcagcttgggctcgagaaggatgtggtccgagtgtggttctgtaaccggcgccagaagggcaagcgatcaagcagcgactatgcacaacgagaggattttgaggctgctgggtctcctttctcagggggaccagtgtcctttcctccggccccagggccccattttggtaccccaggctatgggagccctcacttcactgcactgtactcctcagtccctttccctgagggggaagtctttcccccagtctccgtcatcactctgggctctcccatgcattcaaactgagg

SEQ ID NO: 5100 - DNA, 1084 bp, Homo sapiens
catggcgggacacctggcttcggatttcgccttctcaccccctccaggcggtggaggtgatgggccaggggggccggagccgggctgggttgatcctcggacctggctaagcttccaaggccctcctggagggccaggaatcgggccggggtttgggccaggctctgaggagtgggggattcccccatgtcccccgccgtatgagttctacggggggatggcgtactgtgggcctcagactggagtggggctagtgccccaagacggcttggagacctctcagcctgagggcgaagcaggagtcggggtggagagcaactccgatggggcctccccggagccctgcaccgtcccctctggtgccgtgaagctggagaaggagaagctggagcaaaacccgaaggagtcccaggacatcaaagctctgcagaaagaactcgagcaatttgccaagctcctgaagcagaagaggatcaccctgggatatacacaggccgatgtggctcaccctgggggttctatttgggaaggtgttcagccaaacgaccatctgccgctttgaggctctgcagcttagcttcaagaacatgtgtgagctgcggcccttgctgcagaagtgggtggaggaagctgacaacaatgaaaatcttcaggagatatgcaaagcagaaaccctcgtgcaggccggaaagagaaagcgaaccagtatcgagaaccaagtgagaggcaacctggagaatttgttcctgcggtgcccgaaacccacactgcagcagatcagccacatcgcccagcagcttgggctggagaaggatgtggtccgagtgtggttctgtaaccggcgccagaagggcaagcgatcaagcagtggctatgcacaacgagaggattttgaggctgttgggtctcctttctcagggggaccagtgtcctctcctctggccccagggccccattttggtaccccaggctatgggagccctcacttcactgcactgtactcctcggtccctttccctgagggggaagcctttccccctgtctccgtcaccactctgggctctcccatgcattcaaactgagg

SEQ ID NO: 5101 - DNA, 1083 bp, Homo sapiens
catggcgggacacctggcttcggatttcgccttctcgccccctccaggcggtgggggtgatgggccatggggggcggagccgggctgggttgatcctctgacctggctaagcttccaaggccctcctggagggccaggaattgggccgggggttgggccaggctctgaggtgtgggggattcccccttgccccccgccgtatgagttatgcggggggatggcgtactgtgggcctcaggttggagtggggctagtgccccaaggcggcttggagacctctcagcctgagagcgaagcaggagtcggggtggagagcaactccaatggggcctccccggaaccctgcaccgtcccccctggtgccgtgaagctggagaaggagaagctagagcaaaacccggagaagtcccaggacatcaaagctctgcagaaagaactcgagcaatttgccaagctcctgaagcagaagaggatcaccctgggatatacacaggccgatgtggggctcatcctgggggttctatttgggaaggtgttcagccaaaagaccatctgccgctttgaggctctgcagcttagcttcaagaacatgtgtaagctgcggcccttgctgcagaagtgggtggaggaagctgacaacaatgaaaatcttcaggagatatgcaaagcagaaaccctcatgcaggcccgaaagagaaagcgaaccagtatcgagaaccgagtgagaggcaacctggagaatttgttcctgcagtgcccgaaacccacactgcagatcagccacatcgcccagcagcttgggctcgagaaggatgtggtccgagtgtggttctgtaaccggcgccagaagggcaagcgatcaagcagcgactatgcacaacgagaggattttgaggctgctgggtctcctttctcagggggaccagtgtcctttcctccggccccagggccccattttggtaccccaggctatgggagccctcacttcactgcactgtactcctcagtccctttccctgagggagaagtctttcccccagtctccgtcatcactctgggctctcccatgcattcaaactgagg

SEQ ID NO: 5102 - DNA, 1083 bp, Homo sapiens
catggcgggacacctggcttcggatttcgccttctcgccccctccaggcggtgggggtgatgggccatggggggcggagccgggctgggttgatcctctgacctggctaagcttccaaggccctcctggagggccaggaatcgggccgggggttgggccaggctctgaggtgtgggggattcccccttgccccccgccgtatgagttatgtggggggatggcgtactgtgggcctcaggttggagtggggctagtgccccaaggcggcttggagacctctcagcctgagagcgaagcaggagtcggggtggagagcaactccaatggggcctccccggaaccctgcaccgtcccccctggtgccgtgaagctggagaaggagaagctagagcaaaacccggagaagtcccaggacatcaaagctctgcagaaagaactcgagcaatttgccaagctcctgaagcagaagaggatcaccctgggatatacacaggccgatgtggggctcatcctgggggttctatttgagaaggtgttcagccaaaagaccatctgccgctttgaggctctgcagcttagcttcaagaacatgtgtaagctgtggcccttgctgcagaagtgggtggaggaagctgacaacaatgaaaatcttcaggagatatgcaaagcagaaaccctcatgcaagcccgaaagagaaagcgaaccagtatccagaaccgagtgagaggcaacctggagaatttgttcctgcagtgcccgaaacccacactgcagatcagccacatcgcccagcagcttgggctcgagaaggatgtggtccgagtgtggttctgtaaccggcgccagaagggcaagcgatcaagcagcgactatgcacaacgagaggattttgaggctgctgggtctcctttctcagggggaccagtgtcctttcctccggccccagggccccattttggtaccccaggctatgggagccctcacttcactgcactgtactcctcagtccctttccctgagggggaagtctttcccccagtctccgtcatcactctgggctctcccatgcattcaaactgagg

SEQ ID NO: 5103 - DNA, 1083 bp, Homo sapiens
catggcgggacacctggcttcggatttcgccttctcgccccctccaggcggtgggggtgatgggccatggggggcggagccgggctgggttgatcctctgacctggctaagcttccaaggccctcctggagggccaggaatcgggccgggggttgggccaggctctgaggtgtgggggattcccccttgccccccgccgtatgagttatgtggggggatggcgtactgtgggcctcaggttggagtggggctagtgccccaaggcggcttggagacctctcagcctgagagcgaagcaggagtcggggtggagagcaactccaatggggcctccccggaaccctgcaccgtcccccctggtgccgtgaagctggagaaggagaagctagagcaaaacccggagaagtcccaggacatcaaagctctgcagaaagaactcgagcaatttaccaagctcctgaagcagaagaggatcaccctgggatatacacaggccgatgtggggctcatcctgggggttctatttgggaaggtgttcagccaaaagaccatctgccgctttgaggctctgcagcttagcttcaagaacatgtgtaagctgcggcccttgctgcagaagtgggtggaggaagctgacaacaatgaaaatcttcaggagatatgcaaagcagaaaccctcatgcaggcccgaaagagaaaacgaaccagtatcgagaaccgagtgagaggcaacctggagaatttgttcctgcaatgcccgaaacccacactgcagatcagccacatcgcccagcagcttgggctcgagaaggatgtggtccgagtgtggttctgtaaccggcgccagaagggcaagcgatcaagcagcgactatgcacaacgagaggattttgaggctgctgggtctcctttctcagggggaccagtgtcctttcctccggccccagggccccattttggtaccccaggctatgggagccctcacttcactgcactgtactcctcagtccctttccctgagggggaagtctttcccccagtctccgtcatcactctgggctctcccatgcattcaaactgagg

SEQ ID NO: 5104 - DNA, 1084 bp, Homo sapiens
catggcgggacacctggcttcggatttcgccttctcgccccctccaggcggtgggggtgatgggccatggggggcggagccgggctgggttgatcctctgacctggctaagcttccaaggccctcctggagggccaggaatcgggccgggagttgggtcaggctctgaggtgtgggggattcccccatgccccccgctgtatgagttctgtggggggatggcgtactgtgggcctcaggttggagtgcggctagtgccccaaggcggcttggagacctctcagcctgagggcgaagcaggagtcagggtggagagcaactccgatggcacctccctggagccctgcaccgtcccccctggtgccgtgaaactggagaaggagaagctggagcaaaacccgcaggagtcccaggacatcaaagctctgcagaaagaactcgagcaatttgccaagctcctgaagcagaagaggatcaccctgggatatacacaggccgatgtggctcaccctgggggttctatttgggaaggtgttcagccaaacgaccatctgccgctttgaggctctgcagcttagcttcaagaacatgtgtgagctgcggcccttgctgcagaagtgggtggaggaagttgacaacaatgaaaatcttcaggagatatgcaaagcagaaaccctcgtgcaggccggaaagagaaagcgaaccagtatcgagaaccaagtgagaggcaacctggagaatttgttcctgcggtgcccgaaacccacactgcagcagatcagccacatcgcccagcagcttgggctggagaaggatgtggtccgagtgtggttctgtaaccggcgccagaagggcaagcgatcaagcagtggctatgcacaacgagaggattttgaggctgttgggtctcctttctcagggggaccagtgtcctttcctctggccccagggccccattttggtaccccaggctatgggagccctcacttcactgcactgtactcctcggtccctttccctgagggggaagcctttccccctgtctccgtcaccactctgggctctcccatgcattcaaactgagg

SEQ ID NO: 5105 - DNA, 7550 bp, Homo sapiens; identical to SEQ ID NO: 2308

SEQ ID NO: 5106 - DNA, 2775 bp, Homo sapiens; identical to SEQ ID NO: 556

SEQ ID NO: 5107 - DNA, 3885 bp, Homo sapiens; identical to SEQ ID NO: 814

SEQ ID NO: 5108 - DNA, 6968 bp, Homo sapiens; identical to SEQ ID NO: 1575

SEQ ID NO: 5109 - DNA, 4001 bp, Homo sapiens; identical to SEQ ID NO: 159

SEQ ID NO: 5110 - DNA, 5927 bp, Homo sapiens
aaacaaccaatgacctgtgcacagtttagggcctaaccctgccctggccggttagcaagagagtgttgtgataagagcagatgaaagccttatgccacagtagtgcctgtagcagagaaaggattccctcctccacctcagggcccactgctgctgctctccagcctgcagtttcctctaaggctctggattggctggaagagcaacagagggctgggaaagagcttctatatatacctcaggaggaaaggcatcccagacagttttgaagttttcaaagactggctctgctgttaagaagttgtacttaaagcggaggagctaagccacctgccaaaatgtgcaaaggacttgcagctttgccccactcatgcctggaaagggccaaggagattaagatcaagttgggaattctcctccagaagccagactcagttggtgaccttgtcattccgtacaatgagaagccagagaaaccagccaagacccagaaaacctcgctggacgaggccctgcagtggcgtgattccctggacaaactcctgcagaacaactatggacttgccagtttcaaaagtttcctgaagtctgaattcagtgaggaaaaccttgagttctggattgcctgtgaggattacaagaagatcaagtcccctgccaagatggctgagaaggcaaagcaaatttatgaagaattcattcaaacggaggctcctaaagaggtgaatattgaccacttcactaaggacatcacaatgaagaacctggtggaaccttccctgagcagctttgacatggcccagaaaagaatccatgccctgatggaaaaggattctctgcctcgctttgtgcgctctgagttttatcaggagttaatcaagtagtaatttagccaggctatgaaatcatcctgtgagttatttcctccataataaccctgcatttcccattaatctacatatcttcccacagcagctttgctcagtgatacccacatgggaaaaatcccaggggatgttgcttactctttttgcccacactgctttggatacttatctactgtccgaaggccttctttccccactcaattcttcctgccctgttattaattaagatatcttcagcttgtagtcagacacaatcagaatcacagaaaaatcctgcctaaggcaaagaaatataagacaagactatgatatcaatgaatgtgggttaagtaatagatttccagctaaattggtctaaaaaagaatattaagtgtggacagacctatttcaaaggagcttaattgatctcacttgttttagttctgatccagggagatcacccctctaattatttctgaacttggttaataaaagtttataagatttttatgaagcagccactgtatgatattttaagcaaatatgttatttaaaatattgatccttcccttggaccaccttcatgttagttgggtattataaataagagatacaaccatgaatatattatgtttatacaaaatcaatctgaacacaattcataaagatttctcttttataccttcctcactggccccctccacctgcccatagtcaccaaattctgttttaaatcaatgacctaagatcaacaatgaagtattttataaatgtatttatgctgctagactgtgggtcaaatgtttccattttcaaattatttagaattcttatgagtttaaaatttgtaaatttctaaatccaatcatgtaaaatgaaactgttgctccattggagtagtctcccacctaaatatcaagatggctatatgctaaaaagagaaaatatggtcaagtctaaaatggctaattgtcctatgatgctattatcatagactaatgacatttatcttcaaaacaccaaattgtctttagaaaaattaatgtgattacaggtagaggccttctaggtgagacacttttaaggtacactgcattttgcaaaaaaaaaaaaaaaaagtaatcttttagcaaccccagtattccttcactatttcgcttcctgcattagcaaattttacttacagtcaaaagtgcagatttatactcctgacgtgtctcattcacagctaaataataggccataggacttttggtaggtttaaacttttaattctgtatttcatgattataagtcttgctagaattttttctaatctttagtagatttgattaaataatgattcacagaatttagtaacagaatcaaactaagccatgtatgagggtaatcgagatgaggatattaactcaaaagaaatagggtgatttttaaaggattaataaaattctgaaatgttaagtagaagattacattgtctagtcttgtatttcctccttctgttgctctctttcattcacacactctcagtttctcatatttgtagctcatttatttggttatttcctaagaatattgaaagtgaagcaactatgtgactgtattcttcaggtaaacactgactgcgcttgttggattttccctatttttgtgacttcaagaataatatgccctgctgaatacatgccatttcacattctgaaactgggtagagtggttgggtgttctgccaacaattgctagtggtgtgaattcattcatatttgccagtattgctcacttcaaagaaactccttcatcaagcagtccagagctaggccagatcaatgctacaatcatgaagttctcattgcatgcaattgtgtaggattgacaaggaactcagataaaaatttccagggtgcacttccagaaccagcttcaacatatgtctacattgcccccaagttaataaagtgccaaccctttactctctcatacagccagaaatgttagaaatccaaaatcttggtgcattattttttcataaacgctaaaacatttgaagaaacaatttaattatttaaaattcaagtattttattcacattatttgcaatatccaaatgtttaaaaattcccagataattaactagctattacagatctcacctagagggttgatgttatgaagactccagtggactgtactcacaaattgactggacaccctatgaaagtgggtagacctctcagcggaaaataagaagggcttttacctacagggcaggacagggtcccatgagagcagttctgtggagatataaaaagaatggaagaaggaatgccttatagtgatattgtgacattatatctatatatctacatatatctatctatctatatctacatctatataatcttacatttaaaattgtattcctacacatattagaaactcttctaataaatgaagtaaaaaaattaaaaagaatacaaatattccagccccaaatgagaaatcaaacatattaaaattgttcaagaaaatttctttgaacacttctgaaagtttttggaaacttagaaaagagggaaaaaaatccagtgttactagtaatttccatggtaatacagataaaatacattcttttaattctgggaaattagaaaaagtggggtgatctttccaggaaaaacatgtgtaacatctgcttatcactccagctccctcctcctcctcctctccacgttcccttgagtaaatgtctgggaaagcatgaagcttgatgcaagaaccctgttgtactggcgttttcctcccctgtgaaaacgtaactactgttgggagtgaattgaggatgtagaaaggtggtggaaccaaattgtggtcaatggaaataggagaatatggttctcactcttgagaaaaaaacctaagattagcccaggtagttgcctgtaacttcagtttttctgcctgggtttgatatagtttagggttggggttagattaagatctaaattacatcaggacaaagagacagactattaactccacagttaattaaggacgtatgttccatgtttatttgttaaagcagtgtgaatagccttcaagcatgtgaataatcttccatcttccccgccacacatacacacacacactttttgtttctttcaggtagacaccttttaaaatgcagaactaactgaggcatttcagtaactttgctttcaaatcaataaagtcaaatgtatggaaacattttgtgccctactctccataccccgtgtactcaaattctctactgtatgaattatgctttaagtagaattcagtgccaaggagaacttggtgaaataaattattttaattttttttttatcctttacaaagccatggattttatttggttgatgtgtgctctgtacacaagccatttcaataggatggagctgttaattattttccaaagagtaatagacatgcaaaagtttcaataaaaactgggccattaacaaataaattaataaactaataagcattcccttctaggtttttgccaaactgcctatccaataacaaatttgagaatcgttgtaaaagctagttatatttcagagaaatgattttcattattgaaactgttctccctagcaggccattttccctttttcctgggagtttagcaagtttaggagagaatagtcatgaaaagaaagggaagaaaggggagaagggaagaggttaaaaagtaagtgctcagacctatgaacgtaatccctttgctacaaatatttaagagcagctcagcttggttgaaactgagttttgtcatcttccatatttgcaggaaggtattttctgacttgcaatgcagctagatgtaaaattttattttatcatcctagaaagccttgactagaaaaatgaataaatattgagggtttcctgtccatatctggcttgcatgtgccagaaagcagagaatagaaaatgtaatctccaacatccaagcatcgaaacccaaggggtaggcaattctatgtaggttttggacatgaagtttggtgcatcttggtttatgctggctcaactgctattaaacctctctggcttatagtctcttcattctattagacaagcacgtatcgaacacttgcttcgcacaaggctctttagttaacaatttagcagctactgtttgtgttaaacacacttttcaccaaataggttctgaggcaaacgagagcaatgactatttaaagaaaggctttcccagcatcacttacacatcccaaaactaaaaagatcaactcttccaactgagaaaagactcctggctttgaatggaaacttacagcagagagtcacaggccacggcaacaacaacgacaacaacaaacatttggaatattattctcaactcacgttttaataatacatcttattatttttctagtagagaaactacaaatcagcctcttcaacatttatatacagtttaataagcctcttgcaagttacttgttctctcacctgaggtatttttttcctccccaccttgcccctgttcctcccttcctcttctccctttgcaagaggaaatatttaacatatttgggtccaacttcaataatgtaataattaatacattaaaagcatttaacttcctttctagaaaaatgcacaggctaaggcatagacaaaacaaagagaaatgctgagaaatttgccactggagacaagcaatctgaataaatatttgccaaaagttctttttatgtcatatagtgtcaggatttgaaggagctatttttttttaatgttgcaactagcaactcatcttcggaagacacagccaggagaatgaagtagaagtgaaaggtttataaatccatttgtaagcatttatcccatatattttaaattcaagaaaaattgtgtttatctttagaattttgtattcaatactttatgtactatgtgactcatgcttctggataaataaagcaccaaatatgtatctgtaaccacaatcacacatattatattaaatatatatctatataacagcc

SEQ ID NO: 5111 - DNA, 1685 bp, Homo sapiens; identical to SEQ ID NO: 1995

SEQ ID NO: 5112 - DNA, 6629 bp, Homo sapiens; identical to SEQ ID NO: 531

SEQ ID NO: 5113 - DNA, 5993 bp, Homo sapiens
aaactaaacagtgtcctataggcagctatcagctcagcatgtgttgtttacttggaaagtgaaagaaagtctcccactttgccttcccttagatgaacagagctcttgaatctgaacagaacatcaatatttcatagcccttttggatttcttgatctccatacaatgctgctggatgaatatcaagagaggctcttcgtgggaggcagggaccttgtatattccctcagcttggagagaatcagtgacggctataaagagatacactggccgagtacagctctaaaaatggaagaatgcataatgaagggaaaagatgcgggtgaatgtgcaaattatgttcgggttttgcatcactataacaggacacaccttctgacctgtggtactggagcttttgatccagtttgtgccttcatcagagttggatatcatttggaggatcctctgtttcacctggaatcacccagatctgagagaggaaggggcagatgtccttttgaccccagctcctccttcatctccactttaattggtagtgaattgtttgctggactctacagtgactactggagcagagacgctgcgatcttccgcagcatggggcgactggcccatatccgcactgagcatgacgatgagcgtctgttgaaagaaccaaaatttgtaggttcatacatgattcctgacaatgaagacagagatgacaacaaagtatatttcttttttactgagaaggcactggaggcagaaaacaatgctcacgcaatttacaccagggtcgggcgactctgtgtgaatgatgtaggagggcagagaatactggtgaataagtggagcactttcctaaaagcgagactcgtttgctcagtaccaggaatgaatggaattgacacatattttgatgaattagaggacgtttttttgctacctaccagagatcataagaatccagtgatatttggactctttaacactaccagtaatatttttcgagggcatgctatatgtgtctatcacatgtctagcattcgggcagccttcaacggaccatatgcacataaggaaggacctgaataccactggtcagtctatgaaggaaaagtcccttatccaaggcctggttcttgtgccagcaaagtaaatggagggagatacggaaccaccaaggactatcctgatgatgccatccgatttgcaagaagtcatccactaatgtaccaggccataaaacctgcccataaaaaaccaatattggtaaaaacagatggaaaatataacctgaaacaaatagcagtagatcgagtggaagctgaggatggccaatatgacgtcttgtttattgggacagataatggaattgtgctgaaagtaatcacaatttacaaccaagaaatggaatcaatggaagaagtaattctagaagaacttcagatattcaaggatccagttcctattatttctatggagatttcttcaaagcggcaacagctgtatattggatctgcttctgctgtggctcaagtcagattccatcactgtgacatgtatggaagtgcttgtgctgactgctgcctggctcgagacccttactgtgcctgggatggcatatcctgctcccggtattacccaacaggcacacatgcaaaaaggcgtttccggagacaagatgttcgacatggaaatgcagctcagcagtgctttggacaacagtttgttggggatgctttggataagactgaagaacatctggcttatggcatagagaacaacagtactttgctggaatgtaccccacgatctttacaagcgaaagttatctggtttgtacagaaaggacgtgagacaagaaaagaggaggtgaagacagatgacagagtggttaagatggaccttggtttactcttcctaaggttacacaaatcagatgctgggacctatttttgccagacagtagagcatagctttgtccatacggtccgtaaaatcaccttggaggtagtggaagaggagaaagtcgaggatatgtttaacaaggacgatgaggaggacaggcatcacaggatgccttgtcctgctcagagtagcatctcgcagggagcaaaaccatggtacaaggaattcttgcagctgatcggttatagcaacttccagagagtggaagaatactgcgagaaagtatggtgcacagatagaaagaggaaaaagcttaaaatgtcaccctccaagtggaagtatgccaaccctcaggaaaagaagctccgttccaaacctgagcattaccgcctgcccaggcacacgctggactcctgatggggtgagactatctactgtcttttgaagaatttatatttggaaagtaaaaaagtaaaaaaataaatcatccaacttctttgcattacttaaaagagatttctgtaatacaggaatgactatgaaggtgttataataaattattctacatactcatttgactggataaactttacataaaattaactaattttttaaataaatgcattgcttaatggtttctcattatgtttatcaaaaaacaactgtagctgttattttcagtacttggctgcttttctgtgaaaattattattttacttttggaagacaagattattagaatattgaagaaaaattggagacttataatcatggtaaatataaaactaaatatgttttaatatttctgaatttttcttttccatcacaatgtaagatatgcagaatacaagatactttggcattctcatgtgaactttctgtactctttaaggattattttattagtgttgtttaagccatgagtgttaagtagcaggtgtgttgtgagtgctgtaacccatgaaaggaaaaatgtcattctgaggcttgtgcccttcgtaaaatattcattaaagtacattcacactatttttgctttataacacagtctttaattttcactcactgtggaaataaaaactaaggtaacttctcagaaagatatcaaatctcagaaagaatgtcaaatcagatgaagttatagttaggattctaactactgtaaaagatttttgcttccctcttgtggtaaaaaaaattatattctcacacatttcttttttctctacagacggatatctgtttaggaaagatttgaaagcagattatcagtaggtacatggatacatcaagttcatttgcagaaacaaataactgaaataaaaaacatgttaatccttgtatcatactttaatatgaaagtattgtttatagataatttatctcacaagtcaaaaatgaagattttgcagcactgaaaatctattaaagctccaaattttaagtttctaaataatcttcgctgaaatctaaaatatactataacaaccgtgttttatttgtgaaaaaaatattaaagtgatttgctctcaaatatcaaattttcttctctcttttatattaagagacagaaaattgtttcatgagttcacttaactactgagatattcagagcatttttacctctctcttaaatgttataaaaaacaattgtatttttaagaatgtttatttatcaaagtctttccttcttctattaaatatttagcaattacctttctaaaatatgaaattttgtaagatgttttcacctaaataaaaattgaaagcaagtggattacacaggagaaccattatgaacatttatttagatattaatcttaaacagtgtttatttcagttttcaaagttagcttataggttatacatttaagttaaagtgctcataatcacttgcaatttcattgtaaaatgaacaaatacataaatattttaagaaaaatttaagtttattcagataagtcaccatgcttcaaaagatctaagaaatgcaaatatactgaaaattgacatcctctgaaaattccacttgctatttacccaagaatccactggaggtcattactgccattaaataataactgaaaagactatgtagtgaaatgtatttttaaaaactatattcagtaaaagcctgctcaatttggagaaatagaaccacaaacacagatcacaggggccttacaaagtttatgtctgaacaaataagtcaattaagtacactttattgaaaattgccttccattaacacacaagaaagaaagcaggattttctcctgtatctgaattttaaaattaaaaaggcagataagacataaatagttatcattttaattgcaataacacagacaagtagttaatgatgataacaatggtgtaacttgtaaactaaatatttggtaactgaagcaataggcagaggaaaatagcttttctatgacacaagtcataagaagtccatatactgaagagcgtttgattaaaataaagtgactattaaccagaaaagaaacattttacataaaatgctaaaatttattataggaaaataaatcaaacccaaagaaagtttattcaatgctaatttgaaagaaaattgataagaaaactttgagggcccaagtccacaatttggtgagaccactaaattttacatataattatacacacacatatgtacatatatatgtatataatcttgcttcccgcctgtttatggcagtactgaagagaaatgggaaagaagagggagggagagagaaagacgaagggagagagaaagcagtttccaaggatatgtttcatgtcccaccattttctcagtttctccctctctctcccaacacacacacacacacacccctcacatactataaaataaatcttcactgccctatcaaaatacaaataaatcaatctatgctgttctgtccttcttgagaatctaaaacataccacaaaaatacatccccagtcttttgttctgtctgaggttagaattaattcaaattcagaatctgttgtgagaaatgcccaggctttaaaaattaaaaatggatggatcttctctgaactcagggagggcacatacttagatacctacaagacttggaggaattaagagttcacccttcatctcaccaaattttccccatttttctctttcttgtagaaggagagaaaccatgctctctagcaacattgagcaaaaatcataaccactcatctaatttctaagaggcacctccatcgagggccggtctcctgcttctttagacctcttctatctttgttacaggagaggacctgtggatagacttagttttgacataaaacaatgcccattcacctcctccttcagcacaacgtcacccattgggcaagagatccagatttgttaacaaaaaagattttacttcgtgattccacgtctataattctatattgctaattttttcttttgtgtgaattactgaatatttcagagcaaagctatcaacttggagaaacagggattaaaaataaggataaacactaataagagctctagaaaaaagggaacagaaagtctgcctgtttagtaagtggcaattccatacatattttagagttttttctatctaaaattagttaaatacttagaatgtttgtaatgagtgttcgatatttgctataggttttagggttttgtaaatcttcatagtaattataaacatttgtaaaatttgtaaaatactataagtcattttgagtgttggtgttaagcatgaaacaaacagcagctgttgtccttaaaaatgaattgacctggccgggcgcggtggctcacgcctgtaatcccagcactttgggaggccgaggcgggtggatcatgaggtcaggagatcgagaccatcctggctaacaaggtgaaaccccgtctctactaaaaatacaaaaaattagccgggcgcggtggcgggcgcctgtagtcccagctacttgggaggctgaggcaggagaatggcgtgaacccgggaagcggagcttgcagtgagccgagattgcgccactgcagtccgcagtccggcctgggcgacagagcgagactccgtctc

SEQ ID NO: 5114 - DNA, 5600 bp, Homo sapiens; identical to SEQ ID NO: 1990

SEQ ID NO: 5115 - DNA, 5477 bp, Homo sapiens
aaaaagagaaactgttgggagaggaatcgtatctccatatttcttctttcagccccaatccaagggttgtagctggaactttccatcagttcttcctttctttttcctctctaagcctttgccttgctctgtcacagtgaagtcagccagagcagggctgttaaactctgtgaaatttgtcataagggtgtcaggtatttcttactggcttccaaagaaacatagataaagaaatctttcctgtggcttcccttggcaggctgcattcagaaggtctctcagttgaagaaagagcttggaggacaacagcacaacaggagagtaaaagatgccccagggctgaggcctccgctcaggcagccgcatctggggtcaatcatactcaccttgcccgggccatgctccagcaaaatcaagctgttttcttttgaaagttcaaactcatcaagattatgctgctcactcttatcattctgttgccagtagtttcaaaatttagttttgttagtctctcagcaccgcagcactggagctgtcctgaaggtactctcgcaggaaatgggaattctacttgtgtgggtcctgcacccttcttaattttctcccatggaaatagtatctttaggattgacacagaaggaaccaattatgagcaattggtggtggatgctggtgtctcagtgatcatggattttcattataatgagaaaagaatctattgggtggatttagaaagacaacttttgcaaagagtttttctgaatgggtcaaggcaagagagagtatgtaatatagagaaaaatgtttctggaatggcaataaattggataaatgaagaagttatttggtcaaatcaacaggaaggaatcattacagtaacagatatgaaaggaaataattcccacattcttttaagtgctttaaaatatcctgcaaatgtagcagttgatccagtagaaaggtttatattttggtcttcagaggtggctggaagcctttatagagcagatctcgatggtgtgggagtgaaggctctgttggagacatcagagaaaataacagctgtgtcattggatgtgcttgataagcggctgttttggattcagtacaacagagaaggaagcaattctcttatttgctcctgtgattatgatggaggttctgtccacattagtaaacatccaacacagcataatttgtttgcaatgtccctttttggtgaccgtatcttctattcaacatggaaaatgaagacaatttggatagccaacaaacacactggaaaggacatggttagaattaacctccattcatcatttgtaccacttggtgaactgaaagtagtgcatccacttgcacaacccaaggcagaagatgacacttgggagcctgagcagaaactttgcaaattgaggaaaggaaactgcagcagcactgtgtgtgggcaagacctccagtcacacttgtgcatgtgtgcagagggatacgccctaagtcgagaccggaagtactgtgaagatgttaatgaatgtgctttttggaatcatggctgtactcttgggtgtaaaaacacccctggatcctattactgcacgtgccctgtaggatttgttctgcttcctgatgggaaacgatgtcatcaacttgtttcctgtccacgcaatgtgtctgaatgcagccatgactgtgttctgacatcagaaggtcccttatgtttctgtcctgaaggctcagtgcttgagagagatgggaaaacatgtagcggttgttcctcacccgataatggtggatgtagccagctctgcgttcctcttagcccagtatcctgggaatgtgattgctttcctgggtatgacctacaactggatgaaaaaagctgtgcagcttcaggaccacaaccatttttgctgtttgccaattctcaagatattcgacacatgcattttgatggaacagactatggaactctgctcagccagcagatgggaatggtttatgccctagatcatgaccctgtggaaaataagatatactttgcccatacagccctgaagtggatagagagagctaatatggatggttcccagcgagaaaggcttattgaggaaggagtagatgtgccagaaggtcttgctgtggactggattggccgtagattctattggacagacagagggaaatctctgattggaaggagtgatttaaatgggaaacgttccaaaataatcactaaggagaacatctctcaaccacgaggaattgctgttcatccaatggccaagagattattctggactgatacagggattaatccacgaattgaaagttcttccctccaaggccttggccgtctggttatagccagctctgatctaatctggcccagtggaataacgattgacttcttaactgacaagttgtactggtgcgatgccaagcagtctgtgattgaaatggccaatctggatggttcaaaacgccgaagacttacccagaatgatgtaggtcacccatttgctgtagcagtgtttgaggattatgtgtggttctcagattgggctatgccatcagtaatgagagtaaacaagaggactggcaaagatagagtacgtctccaaggcagcatgctgaagccctcatcactggttgtggttcatccattggcaaaaccaggagcagatccctgcttatatcaaaacggaggctgtgaacatatttgcaaaaagaggcttggaactgcttggtgttcgtgtcgtgaaggttttatgaaagcctcagatgggaaaacgtgtctggctctggatggtcatcagctgttggcaggtggtgaagttgatctaaagaaccaagtaacaccattggacatcttgtccaagactagagtgtcagaagataacattacagaatctcaacacatgctagtggctgaaatcatggtgtcagatcaagatgactgtgctcctgtgggatgcagcatgtatgctcggtgtatttcagagggagaggatgccacatgtcagtgtttgaaaggatttgctggggatggaaaactatgttctgatatagatgaatgtgagatgggtgtcccagtgtgcccccctgcctcctccaagtgcatcaacaccgaaggtggttatgtctgccggtgctcagaaggctaccaaggagatgggattcactgtcttgactctactccaccccctcacctcagggaagatgaccaccactattccgtaagaaatagtgactctgaatgtcccctgtcccacgatgggtactgcctccatgatggtgtgtgcatgtatattgaagcattggacaagtatgcatgcaactgtgttgttggctacatcggggagcgatgtcagtaccgagacctgaagtggtgggaactgcgccacgctggccacgggcagcagcagaaggtcatcgtggtggctgtctgcgtggtggtgcttgtcatgctgctcctcctgagcctgtggggggcccactactacaggactcagaagctgctatcgaaaaacccaaagaatccttatgaggagtcgagcagagatgtgaggagtcgcaggcctgctgacactgaggatgggatgtcctcttgccctcaaccttggtttgtggttataaaagaacaccaagacctcaagaatgggggtcaaccagtggctggtgaggatggccaggcagcagatgggtcaatgcaaccaacttcatggaggcaggagccccagttatgtggaatgggcacagagcaaggctgctggattccagtatccagtgataagggctcctgtccccaggtaatggagcgaagctttcatatgccctcctatgggacacagacccttgaagggggtgtcgagaagccccattctctcctatcagctaacccattatggcaacaaagggccctggacccaccacaccaaatggagctgactcagtgaaaactggaattaaaaggaaagtcaagaagaatgaactatgtcgatgcacagtatcttttctttcaaaagtagagcaaaactataggttttggttccacaatctctacgactaatcacctactcaatgcctggagacagatacgtagttgtgcttttgtttgctcttttaagcagtctcactgcagtcttatttccaagtaagagtactgggagaatcactaggtaacttattagaaacccaaattgggacaacagtgctttgtaaattgtgttgtcttcagcagtcaatacaaatagatttttgtttttgttgttcctgcagccccagaagaaattaggggttaaagcagacagtcacactggtttggtcagttacaaagtaatttctttgatctggacagaacatttatatcagtttcatgaaatgattggaatattacaataccgttaagatacagtgtaggcatttaactcctcattggcgtggtccatgctgatgattttgcaaaatgagttgtgatgaatcaatgaaaaatgtaatttagaaactgatttcttcagaattagatggcttattttttaaaatatttgaatgaaaacattttatttttaaaatattacacaggaggcttcggagtttcttagtcattactgtccttttcccctacagaattttccctcttggtgtgattgcacagaatttgtatgtattttcagttacaagattgtaagtaaattgcctgatttgttttcattatagacaacgatgaatttcttctaattatttaaataaaatcaccaaaaacataaacattttattgtatgcctgattaagtagttaattatagtctaaggcagtactagagttgaaccaaaatgatttgtcaagcttgctgatgtttctgtttttcgttttttttttttttccggagagaggataggatctcactctgttatccaggctggagtgtgcaatggcacaatcatagctcagtgcagcctcaaactcctgggctcaagcaatcctcctgcctcagcctcccgagtaactaggaccacaggcacaggccaccatgcctggctaaggtttttatttttattttttgtagacatggggatcacacaatgttgcccaggctggtcttgaactcctggcctcaagcaaggtcgtgctggtaattttgcaaaatgaattgtgattgactttcagcctcccaacgtattagattataggcattagccatggtgcccagccttgtaacttttaaaaaaattttttaatctacaactctgtagattaaaatttcacatggtgttctaattaaatatttttcttgcagccaagatattgttactacagataacacaacctgatatggtaactttaaattttgggggctttgaatcattcagtttatgcattaactagtccctttgtttatctttcatttctcaaccccttgtactttggtgataccagacatcagaataaaaagaaattgaagtaaaaaaaaaaaaaaaaaa

SEQ ID NO: 5116 - DNA, 5474 bp, Homo sapiens
aaaaagagaaactgttgggagaggaatcgtatctccatatttcttctttcagccccaatccaagggttgtagctggaactttccatcagttcttcctttctttttcctctctaagcctttgccttgctctgtcacagtgaagtcagccagagcagggctgttaaactctgtgaaatttgtcataagggtgtcaggtatttcttactggcttccaaagaaacatagataaagaaatctttcctgtggcttcccttggcaggctgcattcagaaggtctctcagttgaagaaagagcttggaggacaacagcacaacaggagagtaaaagatgccccagggctgaggcctccgctcaggcagccgcatctggggtcaatcatactcaccttgcccgggccatgctccagcaaaatcaagctgttttcttttgaaagttcaaactcatcaagattatgctgctcactcttatcattctgttgccagtagtttcaaaatttagttttgttagtctctcagcaccgcagcactggagctgtcctgaaggtactctcgcaggaaatgggaattctacttgtgtgggtcctgcacccttcttaattttctcccatggaaatagtatctttaggattgacacagaaggaaccaattatgagcaattggtggtggatgctggtgtctcagtgatcatggattttcattataatgagaaaagaatctattgggtggatttagaaagacaacttttgcaaagagtttttctgaatgggtcaaggcaagagagagtatgtaatatagagaaaaatgtttctggaatggcaataaattggataaatgaagaagttatttggtcaaatcaacaggaaggaatcattacagtaacagatatgaaaggaaataattcccacattcttttaagtgctttaaaatatcctgcaaatgtagcagttgatccagtagaaaggtttatattttggtcttcagaggtggctggaagcctttatagagcagatctcgatggtgtgggagtgaaggctctgttggagacatcagagaaaataacagctgtgtcattggatgtgcttgataagcggctgttttggattcagtacaacagagaaggaagcaattctcttatttgctcctgtgattatgatggaggttctgtccacattagtaaacatccaacacagcataatttgtttgcaatgtccctttttggtgaccgtatcttctattcaacatggaaaatgaagacaatttggatagccaacaaacacactggaaaggacatggttagaattaacctccattcatcatttgtaccacttggtgaactgaaagtagtgcatccacttgcacaacccaaggcagaagatgacacttgggagcctgatgttaatgaatgtgctttttggaatcatggctgtactcttgggtgtaaaaacacccctggatcctattactgcacgtgccctgtaggatttgttctgcttcctgatgggaaacgatgtcatcaacttgtttcctgtccacgcaatgtgtctgaatgcagccatgactgtgttctgacatcagaaggtcccttatgtttctgtcctgaaggctcagtgcttgagagagatgggaaaacatgtagcggttgttcctcacccgataatggtggatgtagccagctctgcgttcctcttagcccagtatcctgggaatgtgattgctttcctgggtatgacctacaactggatgaaaaaagctgtgcagcttcaggaccacaaccatttttgctgtttgccaattctcaagatattcgacacatgcattttgatggaacagactatggaactctgctcagccagcagatgggaatggtttatgccctagatcatgaccctgtggaaaataagatatactttgcccatacagccctgaagtggatagagagagctaatatggatggttcccagcgagaaaggcttattgaggaaggagtagatgtgccagaaggtcttgctgtggactggattggccgtagattctattggacagacagagggaaatctctgattggaaggagtgatttaaatgggaaacgttccaaaataatcactaaggagaacatctctcaaccacgaggaattgctgttcatccaatggccaagagattattctggactgatacagggattaatccacgaattgaaagttcttccctccaaggccttggccgtctggttatagccagctctgatctaatctggcccagtggaataacgattgacttcttaactgacaagttgtactggtgcgatgccaagcagtctgtgattgaaatggccaatctggatggttcaaaacgccgaagacttacccagaatgatgtaggtcacccatttgctgtagcagtgtttgaggattatgtgtggttctcagattgggctatgccatcagtaatgagagtaaacaagaggactggcaaagatagagtacgtctccaaggcagcatgctgaagccctcatcactggttgtggttcatccattggcaaaaccaggagcagatccctgcttatatcaaaacggaggctgtgaacatatttgcaaaaagaggcttggaactgcttggtgttcgtgtcgtgaaggttttatgaaagcctcagatgggaaaacgtgtctggctctggatggtcatcagctgttggcaggtggtgaagttgatctaaagaaccaagtaacaccattggacatcttgtccaagactagagtgtcagaagataacattacagaatctcaacacatgctagtggctgaaatcatggtgtcagatcaagatgactgtgctcctgtgggatgcagcatgtatgctcggtgtatttcagagggagaggatgccacatgtcagtgtttgaaaggatttgctggggatggaaaactatgttctgatatagatgaatgtgagatgggtgtcccagtgtgcccccctgcctcctccaagtgcatcaacaccgaaggtggttatgtctgccggtgctcagaaggctaccaaggagatgggattcactgtcttgatattgatgagtgccaactgggggagcacagctgtggagagaatgccagctgcacaaatacagagggaggctatacctgcatgtgtgctggacgcctgtctgaaccaggactgatttgccctgactctactccaccccctcacctcagggaagatgaccaccactattccgtaagaaatagtgactctgaatgtcccctgtcccacgatgggtactgcctccatgatggtgtgtgcatgtatattgaagcattggacaagtatgcatgcaactgtgttgttggctacatcggggagcgatgtcagtaccgagacctgaagtggtgggaactgcgccacgctggccacgggcagcagcagaaggtcatcgtggtggctgtctgcgtggtggtgcttgtcatgctgctcctcctgagcctgtggggggcccactactacaggactcagaagctgctatcgaaaaacccaaagaatccttatgaggagtcgagcagagatgtgaggagtcgcaggcctgctgacactgaggatgggatgtcctcttgccctcaaccttggtttgtggttataaaagaacaccaagacctcaagaatgggggtcaaccagtggctggtgaggatggccaggcagcagatgggtcaatgcaaccaacttcatggaggcaggagccccagttatgtggaatgggcacagagcaaggctgctggattccagtatccagtgataagggctcctgtccccaggtaatggagcgaagctttcatatgccctcctatgggacacagacccttgaagggggtgtcgagaagccccattctctcctatcagctaacccattatggcaacaaagggccctggacccaccacaccaaatggagctgactcagtgaaaactggaattaaaaggaaagtcaagaagaatgaactatgtcgatgcacagtatcttttctttcaaaagtagagcaaaactataggttttggttccacaatctctacgactaatcacctactcaatgcctggagacagatacgtagttgtgcttttgtttgctcttttaagcagtctcactgcagtcttatttccaagtaagagtactgggagaatcactaggtaacttattagaaacccaaattgggacaacagtgctttgtaaattgtgttgtcttcagcagtcaatacaaatagatttttgtttttgttgttcctgcagccccagaagaaattaggggttaaagcagacagtcacactggtttggtcagttacaaagtaatttctttgatctggacagaacatttatatcagtttcatgaaatgattggaatattacaataccgttaagatacagtgtaggcatttaactcctcattggcgtggtccatgctgatgattttgcaaaatgagttgtgatgaatcaatgaaaaatgtaatttagaaactgatttcttcagaattagatggcttattttttaaaatatttgaatgaaaacattttatttttaaaatattacacaggaggcttcggagtttcttagtcattactgtccttttcccctacagaattttccctcttggtgtgattgcacagaatttgtatgtattttcagttacaagattgtaagtaaattgcctgatttgttttcattatagacaacgatgaatttcttctaattatttaaataaaatcaccaaaaacataaacattttattgtatgcctgattaagtagttaattatagtctaaggcagtactagagttgaaccaaaatgatttgtcaagcttgctgatgtttctgtttttcgttttttttttttttccggagagaggataggatctcactctgttatccaggctggagtgtgcaatggcacaatcatagctcagtgcagcctcaaactcctgggctcaagcaatcctcctgcctcagcctcccgagtaactaggaccacaggcacaggccaccatgcctggctaaggtttttatttttattttttgtagacatggggatcacacaatgttgcccaggctggtcttgaactcctggcctcaagcaaggtcgtgctggtaattttgcaaaatgaattgtgattgactttcagcctcccaacgtattagattataggcattagccatggtgcccagccttgtaacttttaaaaaaattttttaatctacaactctgtagattaaaatttcacatggtgttctaattaaatatttttcttgcagccaagatattgttactacagataacacaacctgatatggtaactttaaattttgggggctttgaatcattcagtttatgcattaactagtccctttgtttatctttcatttctcaaccccttgtactttggtgataccagacatcagaataaaaagaaattgaagtaaaaaaaaaaaaaaaaaa

SEQ ID NO: 5117 - DNA, 1209 bp, Homo sapiens
gccgcactttcactctccgtcagccgcattgcccgctcggcgtccggcccccgacccgcgctcgtccgcccgcccgcccgcccgcccgcgccatgaacgccaaggtcgtggtcgtgctggtcctcgtgctgaccgcgctctgcctcagcgacgggaagcccgtcagcctgagctacagatgcccatgccgattcttcgaaagccatgttgccagagccaacgtcaagcatctcaaaattctcaacactccaaactgtgcccttcagattgtagcccggctgaagaacaacaacagacaagtgtgcattgacccgaagctaaagtggattcaggagtacctggagaaagctttaaacaacctgatcagcgccgcaccagccgggaagagggtgattgctggggctcgtgccctgcatccctctcctcccagggcctgccccacagctcgggccctctgtgagatccgtctttggcctcctccagaatggagctggccctctcctggggatgtgtaatggtccccctgcttacccgcaaaagacaagtctttacagaatcaaatgcaattttaaatctgagagctcgctttgagtgactgggttttgtgattgcctctgaagcctatgtatgccatggaggcactaacaaactctgaggtttccgaaatcagaagcgaaaaaatcagtgaataaaccatcatcttgccactaccccctcctgaagccacagcagggtttcaggttccaatcagaactgttggcaaggtgacatttccatgcataaatgcgatccacagaaggtcctggtggtatttgtaactttttgcaaggcatttttttatatatatttttgtgcacatttttttttacgtttctttagaaaacaaatgtatttcaaaatatatttatagtcgaacaattcatatatttgaagtggagccatatgaatgtcagtagtttatacttctctattatctcaaactactggcaatttgtaaagaaatatatatgatatataaatgtgattgcagcttttcaatgttagccacagtgtattttttcacttgtactaaaattgtatcaaatgtgacattatatgcactagcaataaaatgctaattgtttcatggtataaacgtcctactgtatgtgggaatttatttacctgaaataaaattcattagttgttagtgatggagcttaaaaaaaa

SEQ ID NO: 5118 - DNA, 3676 bp, Homo sapiens; identical to SEQ ID NO: 1415

SEQ ID NO: 5119 - DNA, 3852 bp, Homo sapiens
aacacaaggtcagggttaagccttcggtgctttaatccagaggaaaattacttattttaaaaagcagtgaaaaacaccgcattcctttggcacaggatgaagaccagctcagctcttcagttgttgatcattgtctattgttctccaaacagtaaaccagtatttcacactgagattgtcggctgcgggtatattccaattccccgtctcctcatgaatatgaagtgaagggctctgaccctggaagtggttctaagcagggcaaaatggggtctcggaagtgtggaggctgcctaagttgtttgctgattccgcttgcactttggagtataatcgtgaacatattattgtatttcccgaatgggcaaacttcctatgcatccagcaataaactcaccaactacgtgtggtattttgaaggaatctgtttctcaggcatcatgatgcttatagtaacaacagttcttctggtactggagaataataacaactataaatgttgccagagtgaaaactgcagcaaaaaatatgtgacactgctgtcaattatcttttcttccctcggaattgctttttctggatactgcctggtcatctctgccttgggtcttgtccaagggccatattgccgcacccttgatggctgggagtatgcttttgaaggcactgctggacgtttccttacagattctagcatatggattcagtgcctggaacctgcacatgttgtggagtggaacatcattttattttccattctcataaccctcagtgggcttcaagtgatcatctgcctcatcagagtagtcatgcaactatccaagatactgtgtggaagctattcagtgatcttccagcctggaatcatttgaataaggacaaaatgttttccattatcaagacatggccatctatctaaatattatatcaactgtgtagacttgagggcaatattgaaatgatggtgctttctgcatttggtgtttatttgtaaaaaatttgcagtcctcactgcacatgcaagtataccacccttccatttagtatgttttttaagtaatatgcatcagaaacttcagaaatacttctgccctttgatcaaacaaatccatttccaagaatctgtactagggaagtaaataagaatatgagagaaacctttatgcaaatatgtatattgcaacattatttaatattctggaaaattggaaacaccccaaaattctaaactcagaggaaggattaagtaaagagtggtacatactgtaaatgttttctgatattaaaaaaaaaattaaataaaaaataaagagtactacatggttgtaaaattacagtcattacaaatgatgtttttaaaattatgaataatgctacatcaaaaagcaggttacaaattcatgtttactatataactatttaaagcaaatgaaacactaatagtcaaagtttaggatgaaaactaaatctaaaaggaaatataacaaaatgccaattatgcttggtttggggcattgatgacccttcttcccacttttctatattttccaagatttctttattgaatatgttttactataaatattttctaaactcatattttcactattaaaatttttttatttttccaaactttaaggcatatgctctttccacattcctcaacattatttgcaaacatcatgaaatgacacttccatcaacattcaatgaggaaagtagtgatatagatgagccaaaaagagttttatataaacttatacaatctaaactcttgctcttcctttctgactcctgagggtgagtgtgatggactagaagaggtagccttaaaataagtgagcagctagggaacatgctcaatgggcaagagaaaatgaccactgaccagtcaatacctgtgtcagggggagttaccagtacctatatttatttttaaagtaattaaaaagtagaacacttacaaattttccacctatacatgccatgtcttcctcggggacagtagccacatcttatatatttcccaccatgcataggacccagcacacagtgaagccagtaggcactcagtgttgaatgctcataccaggttttctgcttcctgtagttaccctgctgagcactgcttccatcacaggtgcactgggcctcaacacttctgccatttccccatttgtctcctccatggacactgtcaacaatggtctgtcaacacctgctctgtgccaaagccagggagtaggctggggggatacggaagagaatatctttctccttgatgcctgctgtgccaacagccccctttaagccttgttcacagcctttgctgaaacaagcatcttgaaagcaagccatgttatacaccgcatgaccttcatgctctgggcccagctgactgaactggggcaggccccagagtcatgggcagcctattgtcttgctaatggcctctgacttagcctggagtaaaacactgtccaaacaagactggtggttattcaagcataagaatttgaactaggaagccaagaatgaagcaaccggaccattaccatcaaaaaatgattaaaggatgaagaaggaagccaacattcagagagtatctggttcatgttaataatggtatcatattaaaaggaagatacatgaacttctactccaaaagctcctaaaactgcctttgcccacaatgaacagtgtaccctaggcctggtttctgttcttggattcctagatagtctttcttctttgtcactgtgctgatcatttcagtaaacccccgactaaatcagtgcagctctgtttattgcaactaaaacgatccaaatgaagtctcccttttctagatgttgggttggagggatgctaagacaaagatgcttaggctccagagttttacagagcttcattcaataacactctactttccaaagaacttaaatatgaggtctgaaggacttggaccaagaggcaaacccaagctacagacaccatgttgtactcagagtgacctctcccctctgacagcccaggatttctctatcaagtccataagctagtcatatctaggaccatcttgttaaaaattctctcaaagtctcctcagccctcttgtaaacagacttctggaaggtccacttcatcagtttgttatatactttcagactgtctatctcttgtttagattcagcatggcaccgtacgttgaatggactgttaatagatgtttgctgaatgactccaccacagcattggacacatcaggggtacagccaaatgcagcatgatacctctatcaggaaaattaaattttaacacagccaccaaatattctatatttgaagagtatatgctaatcatgcaattttaagtaaaaaaaagctgaatacaaaaaaagctgaatatgtgttttatatcctcgtgaattcaaagtaaaaaggaaaaaaaactcaaaaaccaaatatatgtatgcagtttgagcccaaatttttaattaagtaaccatataattacatgtagacatgtataaaccttgagatatgtaaagaccagaaaaatatttaaaagttaatagttacatcatctgtggtcacaacaccctgaaaatgcctaatattggaaacttaagcaggattgatccaggttattacttggatgggagaccagatgctataggctgaaaaaagaaagcataagtacgcacaagttaatacttaataattatctcctaatgataggactataagttctatctcttttctttacattgttcagtattttcaaatttccctttgaaaatgtgttatgtacttgaattattagaaaaaataaatgtcatttaaaaagcaa

SEQ ID NO: 5120 - DNA, 1255 bp, Homo sapiens; identical to SEQ ID NO: 1787

SEQ ID NO: 5121 - DNA, 3628 bp, Homo sapiens; identical to SEQ ID NO: 2328

SEQ ID NO: 5122 - DNA, 3451 bp, Homo sapiens
agatatatataggattgaagatctctcagttaagtctacatgaaaaggatggtttcttggagcttccacaaacttaaaaccatgaaacatctattattgctactattgtgtgtttttctagttaagtcccaaggtgtcaacgacaatgaggagggtttcttcagtgcccgtggtcatcgaccccttgacaagaagagagaagaggctttgctacaacaggaaaggccaatcagaaatagtgttgatgagttaaataacaatgtggaagctgtttcccagacctcctcttcttcctttcagtacatgtatttgctgaaagacctgtggcaaaagaggcagaagcaagtaaaagataatgaaaatgtagtcaatgagtactcctcagaactggaaaagcaccaattatatatagatgagactgtgaatagcaatatcccaactaaccttcgtgtgcttcgttcaatcctggaaaacctgagaagcaaaatacaaaagttagaatctgatgtctcagctcaaatggaatattgtcgcaccccatgcactgtcagttgcaatattcctgtggtgtctggcaaagaatgtgaggaaattatcaggaaaggaggtgaaacatctgaaatgtatctcattcaacctgacagttctgtcaaaccgtatagagtatactgtgacatgaatacagaaaatggaggatggacagtgattcagaaccgtcaagacggtagtgttgactttggcaggaaatgggatccatataaacagggatttggaaatgttgcaaccaacacagatgggaagaattactgtggcctaccaggtgaatattggcttggaaatgataaaattagccagcttaccaggatgggacccacagaacttttgatagaaatggaggactggaaaggagacaaagtaaaggctcactatggaggattcactgtacagaatgaagccaacaaataccagatctcagtgaacaaatacagaggaacagccggtaatgccctcatggatggagcatctcagctgatgggagaaaacaggaccatgaccattcacaacggcatgttcttcagcacgtatgacagagacaatgacggctggttaacatcagatcccagaaaacagtgttctaaagaagacggtggtggatggtggtataatagatgtcatgcagccaatccaaacggcagatactactggggtggacagtacacctgggacatggcaaagcatggcacagatgatggtgtagtatggatgaattggaaggggtcatggtactcaatgaggaagatgagtatgaagatcaggcccttcttcccacagcaatagtccccaatacgtagatttttgctcttctgtatgtgacaacatttttgtacattatgttattggaattttctttcatacattatattcctctaaaactctcaagcagacgtgagtgtgactttttgaaaaaagtataggataaattacattaaaatagcacatgattttcttttgttttcttcatttctcttgctcaccaagaagtaacaaaagtatagttttgacagagttggtgttcataatttcagttctagttgattgcgagaattttcaaataaggaagaggggtcttttatccttgtcgtaggaaaaccatgacggaaaggaaaaactgatgtttaaaagtccacttttaaaactatatttatttatgtaggatctgtcaaagaaaacttccaaaaagatttattaattaaaccagactctgttgcaataagttaatgttttcttgttttgtaatccacacattcaatgagttaggctttgcacttgtaaggaaggagaagcgttcacaacctcaaatagctaataaaccggtcttgaatatttgaagatttaaaatctgactctaggacgggcacggtggctcacgactataatcccaacactttgggaggctgaggcgggcggtcacaaggtcaggagttcaagaccagcctgaccaatatggtgaaaccccatctctactaaaaatacaaaaattagccaggcgtggtggcaggtgcctgtagtcccagctacctgtgaggtggagattgcattgagccaagatctcaacactgcactccagcctgggcaacagcgtgagactccacctcaaaaaaaaaaaaaaaagaatctgactatataccatggaaaagccaccactctgccacttaaataaacatcaggatcagagattccaagaggacaatctgcatcaagtcttcaccaagtgttttttaagcgaaataatgaaatagggagcagaatatgcctgttgcccatagaaacgaggtctattcttgtcctcaattaggcttttttttcttcatagttacaccagaactaaagtaaaagtggtttttctgttctttctacttctccccatgaaatgggcatatcatctcaacacttcactccaagtcgccacgggcaaccttatgaccctaggtcctccacccctaatgtatcatcattgccacccatttttatggtacttattgttcttaagcttatcctcttaatcttttcatgtaagcaaagctcattaatttctgtcttggaaatgctactactctctttaattactcaccaaatccaactttaacttttgacctggtttctctgccacaagttctgtcccactggagcccatactcacctaccgctttgccatcacatttaacagaaaactcttatcaacttacttcctgcttaacattagctccttcctatctatatccaaatttcttaaattcaaattttttagctggagtaaaaatggtcccagtaccatttcctgttcccttcactataacctacatttttgtcacattaagtttttccccattccaggacaggtcaggccctttaaaaatttcaacagctttattgagatataattgatataatttaaaaaatcctgcacatgtgtcatgctggagccctattgattccaacagggatggcgccttgtccaagaagagacccagagccagtgaatgggacatagggtttatttaggacttaaatacagatgtggtccagtggcagtgggctggacaggaccgctactatttgtaaagagtatgtagtttatataacatttctacttagcactctccacttagcaacctccatttaacccaaaataaaaggccttggttccttgcacatcctgagttccaacggacaggcagggagttcaagtgtccttcacagataagaagtgaatctctctgggttggccattcccggattccttagcttagactctgaacacatattcttcttagaccatacagtcattctcagggtatgcttgagttaatgctgtcggatgcatctgtcatacaaagtgtttaacatatacgatttcatgattttggaaatatgcatacacccatgatat

SEQ ID NO: 5123 - DNA, 4886 bp, Homo sapiens; identical to SEQ ID NO: 1570

SEQ ID NO: 5124 - DNA, 4895 bp, Homo sapiens
gcgcccagcctcgccgccgccgagcgcccgacgcgccacgccgcgctgggcagctggagagctggcggcggagcgggccgggagcggcgggggcggcgccgaggccgcgggcggggggaggagggccgcagccccggagaggggaaaaggcgggccggacggcgccagcagccagccccgaggacgcgagcggcaggtgtgcacagaggttctccactttgttttctgaactcgcggtcaggatggttttctctgtcaggcagtgtggccatgttggcagaactgaagaagttttactgacgttcaagatattccttgtcatcatttgtcttcatgtcgttctggtaacatccctggaagaagatactgataattccagtttgtcaccaccacctgctaaattatctgttgtcagttttgccccctcctccaatggtactccagaggttgaaacaacaagcctcaatgatgttactttaagcttactcccttcaaacgaaacagaaaaaactaaaatcactatagtaaaaaccttcaatgcatcaggcgtcaaaccccagagaaatatctgcaatttgtcatctatttgcaatgactcagcattttttagaggtgagatcatgtttcaatatgataaagaaagcactgttccccagaatcaacatataacgaatggcaccttaactggagtcctgtctctaagtgaattaaaacgctcagagctcaacaaaaccctgcaaaccctaagtgagacttactttataatgtgtgctacagcagaggcccaaagcacattaaattgtacattcacaataaaactgaataatacaatgaatgcatgtgctgtaatagctgctttggaaagagtaaagattcgaccaatggaacactgctgctgttctgtcaggataccctgcccttcctccccagaagagttggaaaagcttcagtgtgacctgcaggatcccattgtctgtcttgctgaccatccacgtggcccaccattttcttccagccaatccatcccagtggtgcctcgggccactgtgctttcccaggtccccaaagctacctcttttgctgagcctccagattattcacctgtgacccacaatgttccctctccaataggggagattcaacccctttcaccccagccttcagctcccatagcttccagccctgccattgacatgcccccacagtctgaaacgatctcttcccctatgccccaaacccatgtctccggcaccccacctcctgtgaaagcctcattttcctctcccaccgtgtctgcccctgcgaatgtcaacactaccagcgcacctcctgtccagacagacatcgtcaacaccagcagtatttctgatcttgagaaccaagtgttgcagatggagaaggctctgtccttgggcagcctggagcctaacctcgcaggagaaatgatcaaccaagtcagcagactccttcattccccgcctgacatgctggcccctctggctcaaagattgctgaaagtagtggatgacattggcctacagctgaacttttcaaacacgactataagtctaacctccccttctttggctctggctgtgatcagagtgaatgccagtagtttcaacacaactacctttgtggcccaagaccctgcaaatcttcaggtttctctggaaacccaagctcctgagaacagtattggcacaattactcttccttcatcgctgatgaataatttaccagctcatgacatggagctagcttccagggttcagttcaatttttttgaaacacctgctttgtttcaggatccttccctggagaacctctctctgatcagctacgtcatatcatcgagtgttgcaaacctgaccgtcaggaacttgacaagaaacgtgacagtcacattaaagcacatcaacccgagccaggatgagttaacagtgagatgtgtattttgggacttgggcagaaatggtggcagaggaggctggtcagacaatggctgctctgtcaaagacaggagattgaatgaaaccatctgtacctgtagccatctaacaagcttcggcgttctgctggacctatctaggacatctgtgctgcctgctcaaatgatggctctgacgttcattacatatattggttgtgggctttcatcaatttttctgtcagtgactcttgtaacctacatagcttttgaaaagatccggagggattacccttccaaaatcctcatccagctgtgtgctgctctgcttctgctgaacctggtcttcctcctggactcgtggattgctctgtataagatgcaaggcctctgcatctcagtggctgtatttcttcattattttctcttggtctcattcacatggatgggcctagaagcattccatatgtacctggcccttgtcaaagtatttaatacttacatccgaaaatacatccttaaattctgcattgtcggttggggggtaccagctgtggttgtgaccatcatcctgactatatccccagataactatgggcttggatcctatgggaaattccccaatggttcaccggatgacttctgctggatcaacaacaatgcagtattctacattacggtggtgggatatttctgtgtgatatttttgctgaacgtcagcatgttcattgtggtcctggttcagctctgtcgaattaaaaagaagaagcaactgggagcccagcgaaaaaccagtattcaagacctcaggagtatcgctggccttacatttttactgggaataacttggggctttgccttctttgcctggggaccagttaacgtgaccttcatgtatctgtttgccatctttaataccttacaaggatttttcatattcatcttttactgtgtggccaaagaaaatgtcaggaagcaatggaggcggtatctttgttgtggaaagttacggctggctgaaaattctgactggagtaaaactgctactaatggtttaaagaagcagactgtaaaccaaggagtgtccagctcttcaaattccttacagtcaagcagtaactccactaactccaccacactgctagtgaataatgattgctcagtacacgcaagcgggaatggaaatgcttctacagagaggaatggggtctcttttagtgttcagaatggagatgtgtgccttcacgatttcactggaaaacagcacatgtttaacgagaaggaagattcctgcaatgggaaaggccgtatggctctcagaaggacttcaaagcggggaagcttacactttattgagcaaatgtgattcctttcttctaaaatcaaagcatgatgcttgacagtgtgaaatgtccaattttaccttttacacaatgtgagatgtatgaaaatcaactcattttattctcggcaacatctggagaagcataagctaattaagggcgatgattattattacaagaagaaaccaagacattacaccatggtttttagacatttctgatttggtttcttatctttcattttataagaaggttggttttaaacaatacactaagaatgactcctataaagaaaacaaaaaaaggtagtgaactttcagctaccttttaaagaggctaagttatctttgataacatcatataaagcaactgttgacttcagcctgttggtgagtttagttgtgcatgcctttgttgtatataagctaaattctagtgacccatgtgtcaaaaatcttacttctacatttttttgtatttattttctactgtgtaaatgtattcctttgtagaatcatggttgttttgtctcacgtgataattcagaaaatccttgctcgttccgcaaatcctaaagctccttttggagatgatataggatgtgaaatacagaaacctcagtgaaatcaagaaataatgatcccagccagactgagaaaatgtaagcagacagtgccacagttagctcatacagtgcctttgagcaagttaggaaaagatgcccccactgggcagacacagccctatgggctcatggtttgacaaacagagtggagagaccatattttagccccactcaccctcttgggtgcacgacctgtacagccaaacacagcatccaatatgaatacccatcccctgaccgcatccccagtagtcagattatagaatctgcaccaagatgtttagctttataccttggccacagagagggatgaactgtcatccagaccatgtgtcaggaaaattgtgaacgtagatgaggtacatacactgccgcttctcaaatccccagagcctttaggaacaggagagtagactaggattccttctcttaaaaaggtacatatatatggaaaaaaatcatattgccgttctttaaaaggcaactgcatggtacattgttgattgttatgactggtacactctggcccagccagagctataattgttttttaaatgtgtcttgaagaatgcacagtgacaaggggagtagctattgggaacagggaactgtcctacactgctattgttgctacatgtatcgagccttgattgctcctagttatatacagggtctatcttgcttcctacctacatctgcttgagcagtgcctcaagtacatccttattaggaacatttcaaaccccttttagttaagtctttcactaaggttctcttgcatatatttcaagtgaatgttggatctcagactaaccatagtaataatacacatttctgtgagtgctgacttgtctttgcaatatttcttttctgatttatttaattttcttgtatttatatgttaaaatcaaaaatgttaaaatcaatgaaataaatttgcagttaagatctttaaaaaaaaaaaaaaaaaaaaaaaaaaaaaaaaaaaaaaaaaaaa

SEQ ID NO: 5125 - DNA, 4853 bp, Homo sapiens
gcgcccagcctcgccgccgccgagcgcccgacgcgccacgccgcgctgggcagctggagagctggcggcggagcgggccgggagcggcgggggcggcgccgaggccgcgggcggggggaggagggccgcagccccggagaggggaaaaggcgggccggacggcgccagcagccagccccgaggacgcgagcggcaggtgtgcacagaggttctccactttgttttctgaactcgcggtcaggatggttttctctgtcaggcagtgtggccatgttggcagaactgaagaagttttactgacgttcaagatattccttgtcatcatttgtcttcatgtcgttctggtaacatccctggaagaagatactgataattccagtttgtcaccaccacctgctaaattatctgttgtcagttttgccccctcctccaatggtactccagaggttgaaacaacaagcctcaatgatgttactttaagcttactcccttcaaacgaaacaggcgtcaaaccccagagaaatatctgcaatttgtcatctatttgcaatgactcagcattttttagaggtgagatcatgtttcaatatgataaagaaagcactgttccccagaatcaacatataacgaatggcaccttaactggagtcctgtctctaagtgaattaaaacgctcagagctcaacaaaaccctgcaaaccctaagtgagacttactttataatgtgtgctacagcagaggcccaaagcacattaaattgtacattcacaataaaactgaataatacaatgaatgcatgtgctgtaatagctgctttggaaagagtaaagattcgaccaatggaacactgctgctgttctgtcaggataccctgcccttcctccccagaagagttggaaaagcttcagtgtgacctgcaggatcccattgtctgtcttgctgaccatccacgtggcccaccattttcttccagccaatccatcccagtggtgcctcgggccactgtgctttcccaggtccccaaagctacctcttttgctgagcctccagattattcacctgtgacccacaatgttccctctccaataggggagattcaacccctttcaccccagccttcagctcccatagcttccagccctgccattgacatgcccccacagtctgaaacgatctcttcccctatgccccaaacccatgtctccggcaccccacctcctgtgaaagcctcattttcctctcccaccgtgtctgcccctgcgaatgtcaacactaccagcgcacctcctgtccagacagacatcgtcaacaccagcagtatttctgatcttgagaaccaagtgttgcagatggagaaggctctgtccttgggcagcctggagcctaacctcgcaggagaaatgatcaaccaagtcagcagactccttcattccccgcctgacatgctggcccctctggctcaaagattgctgaaagtagtggatgacattggcctacagctgaacttttcaaacacgactataagtctaacctccccttctttggctctggctgtgatcagagtgaatgccagtagtttcaacacaactacctttgtggcccaagaccctgcaaatcttcaggtttctctggaaacccaagctcctgagaacagtattggcacaattactcttccttcatcgctgatgaataatttaccagctcatgacatggagctagcttccagggttcagttcaatttttttgaaacacctgctttgtttcaggatccttccctggagaacctctctctgatcagctacgtcatatcatcgagtgttgcaaacctgaccgtcaggaacttgacaagaaacgtgacagtcacattaaagcacatcaacccgagccaggatgagttaacagtgagatgtgtattttgggacttgggcagaaatggtggcagaggaggctggtcagacaatggctgctctgtcaaagacaggagattgaatgaaaccatctgtacctgtagccatctaacaagcttcggcgttctgctggacctatctaggacatctgtgctgcctgctcaaatgatggctctgacgttcattacatatattggttgtgggctttcatcaatttttctgtcagtgactcttgtaacctacatagcttttgaaaagatccggagggattacccttccaaaatcctcatccagctgtgtgctgctctgcttctgctgaacctggtcttcctcctggactcgtggattgctctgtataagatgcaaggcctctgcatctcagtggctgtatttcttcattattttctcttggtctcattcacatggatgggcctagaagcattccatatgtacctggcccttgtcaaagtatttaatacttacatccgaaaatacatccttaaattctgcattgtcggttggggggtaccagctgtggttgtgaccatcatcctgactatatccccagataactatgggcttggatcctatgggaaattccccaatggttcaccggatgacttctgctggatcaacaacaatgcagtattctacattacggtggtgggatatttctgtgtgatatttttgctgaacgtcagcatgttcattgtggtcctggttcagctctgtcgaattaaaaagaagaagcaactgggagcccagcgaaaaaccagtattcaagacctcaggagtatcgctggccttacatttttactgggaataacttggggctttgccttctttgcctggggaccagttaacgtgaccttcatgtatctgtttgccatctttaataccttacaaggatttttcatattcatcttttactgtgtggccaaagaaaatgtcaggaagcaatggaggcggtatctttgttgtggaaagttacggctggctgaaaattctgactggagtaaaactgctactaatggtttaaagaagcagactgtaaaccaaggagtgtccagctcttcaaattccttacagtcaagcagtaactccactaactccaccacactgctagtgaataatgattgctcagtacacgcaagcgggaatggaaatgcttctacagagaggaatggggtctcttttagtgttcagaatggagatgtgtgccttcacgatttcactggaaaacagcacatgtttaacgagaaggaagattcctgcaatgggaaaggccgtatggctctcagaaggacttcaaagcggggaagcttacactttattgagcaaatgtgattcctttcttctaaaatcaaagcatgatgcttgacagtgtgaaatgtccaattttaccttttacacaatgtgagatgtatgaaaatcaactcattttattctcggcaacatctggagaagcataagctaattaagggcgatgattattattacaagaagaaaccaagacattacaccatggtttttagacatttctgatttggtttcttatctttcattttataagaaggttggttttaaacaatacactaagaatgactcctataaagaaaacaaaaaaaggtagtgaactttcagctaccttttaaagaggctaagttatctttgataacatcatataaagcaactgttgacttcagcctgttggtgagtttagttgtgcatgcctttgttgtatataagctaaattctagtgacccatgtgtcaaaaatcttacttctacatttttttgtatttattttctactgtgtaaatgtattcctttgtagaatcatggttgttttgtctcacgtgataattcagaaaatccttgctcgttccgcaaatcctaaagctccttttggagatgatataggatgtgaaatacagaaacctcagtgaaatcaagaaataatgatcccagccagactgagaaaatgtaagcagacagtgccacagttagctcatacagtgcctttgagcaagttaggaaaagatgcccccactgggcagacacagccctatgggctcatggtttgacaaacagagtggagagaccatattttagccccactcaccctcttgggtgcacgacctgtacagccaaacacagcatccaatatgaatacccatcccctgaccgcatccccagtagtcagattatagaatctgcaccaagatgtttagctttataccttggccacagagagggatgaactgtcatccagaccatgtgtcaggaaaattgtgaacgtagatgaggtacatacactgccgcttctcaaatccccagagcctttaggaacaggagagtagactaggattccttctcttaaaaaggtacatatatatggaaaaaaatcatattgccgttctttaaaaggcaactgcatggtacattgttgattgttatgactggtacactctggcccagccagagctataattgttttttaaatgtgtcttgaagaatgcacagtgacaaggggagtagctattgggaacagggaactgtcctacactgctattgttgctacatgtatcgagccttgattgctcctagttatatacagggtctatcttgcttcctacctacatctgcttgagcagtgcctcaagtacatccttattaggaacatttcaaaccccttttagttaagtctttcactaaggttctcttgcatatatttcaagtgaatgttggatctcagactaaccatagtaataatacacatttctgtgagtgctgacttgtctttgcaatatttcttttctgatttatttaattttcttgtatttatatgttaaaatcaaaaatgttaaaatcaatgaaataaatttgcagttaagatctttaaaaaaaaaaaaaaaaaaaaaaaaaaaaaaaaaaaaaaaaaaaa

SEQ ID NO: 5126 - DNA, 4829 bp, Homo sapiens
gcgcccagcctcgccgccgccgagcgcccgacgcgccacgccgcgctgggcagctggagagctggcggcggagcgggccgggagcggcgggggcggcgccgaggccgcgggcggggggaggagggccgcagccccggagaggggaaaaggcgggccggacggcgccagcagccagccccgaggacgcgagcggcaggtgtgcacagaggttctccactttgttttctgaactcgcggtcaggatggttttctctgtcaggcagtgtggccatgttggcagaactgaagaagttttactgacgttcaagatattccttgtcatcatttgtcttcatgtcgttctggtaacatccctggaagaagatactgataattccagtttgtcaccaccacctgctaaattatctgttgtcagttttgccccctcctccaatggtactccagatgttactttaagcttactcccttcaaacgaaacaggcgtcaaaccccagagaaatatctgcaatttgtcatctatttgcaatgactcagcattttttagaggtgagatcatgtttcaatatgataaagaaagcactgttccccagaatcaacatataacgaatggcaccttaactggagtcctgtctctaagtgaattaaaacgctcagagctcaacaaaaccctgcaaaccctaagtgagacttactttataatgtgtgctacagcagaggcccaaagcacattaaattgtacattcacaataaaactgaataatacaatgaatgcatgtgctgtaatagctgctttggaaagagtaaagattcgaccaatggaacactgctgctgttctgtcaggataccctgcccttcctccccagaagagttggaaaagcttcagtgtgacctgcaggatcccattgtctgtcttgctgaccatccacgtggcccaccattttcttccagccaatccatcccagtggtgcctcgggccactgtgctttcccaggtccccaaagctacctcttttgctgagcctccagattattcacctgtgacccacaatgttccctctccaataggggagattcaacccctttcaccccagccttcagctcccatagcttccagccctgccattgacatgcccccacagtctgaaacgatctcttcccctatgccccaaacccatgtctccggcaccccacctcctgtgaaagcctcattttcctctcccaccgtgtctgcccctgcgaatgtcaacactaccagcgcacctcctgtccagacagacatcgtcaacaccagcagtatttctgatcttgagaaccaagtgttgcagatggagaaggctctgtccttgggcagcctggagcctaacctcgcaggagaaatgatcaaccaagtcagcagactccttcattccccgcctgacatgctggcccctctggctcaaagattgctgaaagtagtggatgacattggcctacagctgaacttttcaaacacgactataagtctaacctccccttctttggctctggctgtgatcagagtgaatgccagtagtttcaacacaactacctttgtggcccaagaccctgcaaatcttcaggtttctctggaaacccaagctcctgagaacagtattggcacaattactcttccttcatcgctgatgaataatttaccagctcatgacatggagctagcttccagggttcagttcaatttttttgaaacacctgctttgtttcaggatccttccctggagaacctctctctgatcagctacgtcatatcatcgagtgttgcaaacctgaccgtcaggaacttgacaagaaacgtgacagtcacattaaagcacatcaacccgagccaggatgagttaacagtgagatgtgtattttgggacttgggcagaaatggtggcagaggaggctggtcagacaatggctgctctgtcaaagacaggagattgaatgaaaccatctgtacctgtagccatctaacaagcttcggcgttctgctggacctatctaggacatctgtgctgcctgctcaaatgatggctctgacgttcattacatatattggttgtgggctttcatcaatttttctgtcagtgactcttgtaacctacatagcttttgaaaagatccggagggattacccttccaaaatcctcatccagctgtgtgctgctctgcttctgctgaacctggtcttcctcctggactcgtggattgctctgtataagatgcaaggcctctgcatctcagtggctgtatttcttcattattttctcttggtctcattcacatggatgggcctagaagcattccatatgtacctggcccttgtcaaagtatttaatacttacatccgaaaatacatccttaaattctgcattgtcggttggggggtaccagctgtggttgtgaccatcatcctgactatatccccagataactatgggcttggatcctatgggaaattccccaatggttcaccggatgacttctgctggatcaacaacaatgcagtattctacattacggtggtgggatatttctgtgtgatatttttgctgaacgtcagcatgttcattgtggtcctggttcagctctgtcgaattaaaaagaagaagcaactgggagcccagcgaaaaaccagtattcaagacctcaggagtatcgctggccttacatttttactgggaataacttggggctttgccttctttgcctggggaccagttaacgtgaccttcatgtatctgtttgccatctttaataccttacaaggatttttcatattcatcttttactgtgtggccaaagaaaatgtcaggaagcaatggaggcggtatctttgttgtggaaagttacggctggctgaaaattctgactggagtaaaactgctactaatggtttaaagaagcagactgtaaaccaaggagtgtccagctcttcaaattccttacagtcaagcagtaactccactaactccaccacactgctagtgaataatgattgctcagtacacgcaagcgggaatggaaatgcttctacagagaggaatggggtctcttttagtgttcagaatggagatgtgtgccttcacgatttcactggaaaacagcacatgtttaacgagaaggaagattcctgcaatgggaaaggccgtatggctctcagaaggacttcaaagcggggaagcttacactttattgagcaaatgtgattcctttcttctaaaatcaaagcatgatgcttgacagtgtgaaatgtccaattttaccttttacacaatgtgagatgtatgaaaatcaactcattttattctcggcaacatctggagaagcataagctaattaagggcgatgattattattacaagaagaaaccaagacattacaccatggtttttagacatttctgatttggtttcttatctttcattttataagaaggttggttttaaacaatacactaagaatgactcctataaagaaaacaaaaaaaggtagtgaactttcagctaccttttaaagaggctaagttatctttgataacatcatataaagcaactgttgacttcagcctgttggtgagtttagttgtgcatgcctttgttgtatataagctaaattctagtgacccatgtgtcaaaaatcttacttctacatttttttgtatttattttctactgtgtaaatgtattcctttgtagaatcatggttgttttgtctcacgtgataattcagaaaatccttgctcgttccgcaaatcctaaagctccttttggagatgatataggatgtgaaatacagaaacctcagtgaaatcaagaaataatgatcccagccagactgagaaaatgtaagcagacagtgccacagttagctcatacagtgcctttgagcaagttaggaaaagatgcccccactgggcagacacagccctatgggctcatggtttgacaaacagagtggagagaccatattttagccccactcaccctcttgggtgcacgacctgtacagccaaacacagcatccaatatgaatacccatcccctgaccgcatccccagtagtcagattatagaatctgcaccaagatgtttagctttataccttggccacagagagggatgaactgtcatccagaccatgtgtcaggaaaattgtgaacgtagatgaggtacatacactgccgcttctcaaatccccagagcctttaggaacaggagagtagactaggattccttctcttaaaaaggtacatatatatggaaaaaaatcatattgccgttctttaaaaggcaactgcatggtacattgttgattgttatgactggtacactctggcccagccagagctataattgttttttaaatgtgtcttgaagaatgcacagtgacaaggggagtagctattgggaacagggaactgtcctacactgctattgttgctacatgtatcgagccttgattgctcctagttatatacagggtctatcttgcttcctacctacatctgcttgagcagtgcctcaagtacatccttattaggaacatttcaaaccccttttagttaagtctttcactaaggttctcttgcatatatttcaagtgaatgttggatctcagactaaccatagtaataatacacatttctgtgagtgctgacttgtctttgcaatatttcttttctgatttatttaattttcttgtatttatatgttaaaatcaaaaatgttaaaatcaatgaaataaatttgcagttaagatctttaaaaaaaaaaaaaaaaaaaaaaaaaaaaaaaaaaaaaaaaaaaa

SEQ ID NO: 5127 - DNA, 4847 bp, Homo sapiens
gcgcccagcctcgccgccgccgagcgcccgacgcgccacgccgcgctgggcagctggagagctggcggcggagcgggccgggagcggcgggggcggcgccgaggccgcgggcggggggaggagggccgcagccccggagaggggaaaaggcgggccggacggcgccagcagccagccccgaggacgcgagcggcaggtgtgcacagaggttctccactttgttttctgaactcgcggtcaggatggttttctctgtcaggcagtgtggccatgttggcagaactgaagaagttttactgacgttcaagatattccttgtcatcatttgtcttcatgtcgttctggtaacatccctggaagaagatactgataattccagtttgtcaccaccacctgaggttgaaacaacaagcctcaatgatgttactttaagcttactcccttcaaacgaaacagaaaaaactaaaatcactatagtaaaaaccttcaatgcatcaggcgtcaaaccccagagaaatatctgcaatttgtcatctatttgcaatgactcagcattttttagaggtgagatcatgtttcaatatgataaagaaagcactgttccccagaatcaacatataacgaatggcaccttaactggagtcctgtctctaagtgaattaaaacgctcagagctcaacaaaaccctgcaaaccctaagtgagacttactttataatgtgtgctacagcagaggcccaaagcacattaaattgtacattcacaataaaactgaataatacaatgaatgcatgtgctgtaatagctgctttggaaagagtaaagattcgaccaatggaacactgctgctgttctgtcaggataccctgcccttcctccccagaagagttggaaaagcttcagtgtgacctgcaggatcccattgtctgtcttgctgaccatccacgtggcccaccattttcttccagccaatccatcccagtggtgcctcgggccactgtgctttcccaggtccccaaagctacctcttttgctgagcctccagattattcacctgtgacccacaatgttccctctccaataggggagattcaacccctttcaccccagccttcagctcccatagcttccagccctgccattgacatgcccccacagtctgaaacgatctcttcccctatgccccaaacccatgtctccggcaccccacctcctgtgaaagcctcattttcctctcccaccgtgtctgcccctgcgaatgtcaacactaccagcgcacctcctgtccagacagacatcgtcaacaccagcagtatttctgatcttgagaaccaagtgttgcagatggagaaggctctgtccttgggcagcctggagcctaacctcgcaggagaaatgatcaaccaagtcagcagactccttcattccccgcctgacatgctggcccctctggctcaaagattgctgaaagtagtggatgacattggcctacagctgaacttttcaaacacgactataagtctaacctccccttctttggctctggctgtgatcagagtgaatgccagtagtttcaacacaactacctttgtggcccaagaccctgcaaatcttcaggtttctctggaaacccaagctcctgagaacagtattggcacaattactcttccttcatcgctgatgaataatttaccagctcatgacatggagctagcttccagggttcagttcaatttttttgaaacacctgctttgtttcaggatccttccctggagaacctctctctgatcagctacgtcatatcatcgagtgttgcaaacctgaccgtcaggaacttgacaagaaacgtgacagtcacattaaagcacatcaacccgagccaggatgagttaacagtgagatgtgtattttgggacttgggcagaaatggtggcagaggaggctggtcagacaatggctgctctgtcaaagacaggagattgaatgaaaccatctgtacctgtagccatctaacaagcttcggcgttctgctggacctatctaggacatctgtgctgcctgctcaaatgatggctctgacgttcattacatatattggttgtgggctttcatcaatttttctgtcagtgactcttgtaacctacatagcttttgaaaagatccggagggattacccttccaaaatcctcatccagctgtgtgctgctctgcttctgctgaacctggtcttcctcctggactcgtggattgctctgtataagatgcaaggcctctgcatctcagtggctgtatttcttcattattttctcttggtctcattcacatggatgggcctagaagcattccatatgtacctggcccttgtcaaagtatttaatacttacatccgaaaatacatccttaaattctgcattgtcggttggggggtaccagctgtggttgtgaccatcatcctgactatatccccagataactatgggcttggatcctatgggaaattccccaatggttcaccggatgacttctgctggatcaacaacaatgcagtattctacattacggtggtgggatatttctgtgtgatatttttgctgaacgtcagcatgttcattgtggtcctggttcagctctgtcgaattaaaaagaagaagcaactgggagcccagcgaaaaaccagtattcaagacctcaggagtatcgctggccttacatttttactgggaataacttggggctttgccttctttgcctggggaccagttaacgtgaccttcatgtatctgtttgccatctttaataccttacaaggatttttcatattcatcttttactgtgtggccaaagaaaatgtcaggaagcaatggaggcggtatctttgttgtggaaagttacggctggctgaaaattctgactggagtaaaactgctactaatggtttaaagaagcagactgtaaaccaaggagtgtccagctcttcaaattccttacagtcaagcagtaactccactaactccaccacactgctagtgaataatgattgctcagtacacgcaagcgggaatggaaatgcttctacagagaggaatggggtctcttttagtgttcagaatggagatgtgtgccttcacgatttcactggaaaacagcacatgtttaacgagaaggaagattcctgcaatgggaaaggccgtatggctctcagaaggacttcaaagcggggaagcttacactttattgagcaaatgtgattcctttcttctaaaatcaaagcatgatgcttgacagtgtgaaatgtccaattttaccttttacacaatgtgagatgtatgaaaatcaactcattttattctcggcaacatctggagaagcataagctaattaagggcgatgattattattacaagaagaaaccaagacattacaccatggtttttagacatttctgatttggtttcttatctttcattttataagaaggttggttttaaacaatacactaagaatgactcctataaagaaaacaaaaaaaggtagtgaactttcagctaccttttaaagaggctaagttatctttgataacatcatataaagcaactgttgacttcagcctgttggtgagtttagttgtgcatgcctttgttgtatataagctaaattctagtgacccatgtgtcaaaaatcttacttctacatttttttgtatttattttctactgtgtaaatgtattcctttgtagaatcatggttgttttgtctcacgtgataattcagaaaatccttgctcgttccgcaaatcctaaagctccttttggagatgatataggatgtgaaatacagaaacctcagtgaaatcaagaaataatgatcccagccagactgagaaaatgtaagcagacagtgccacagttagctcatacagtgcctttgagcaagttaggaaaagatgcccccactgggcagacacagccctatgggctcatggtttgacaaacagagtggagagaccatattttagccccactcaccctcttgggtgcacgacctgtacagccaaacacagcatccaatatgaatacccatcccctgaccgcatccccagtagtcagattatagaatctgcaccaagatgtttagctttataccttggccacagagagggatgaactgtcatccagaccatgtgtcaggaaaattgtgaacgtagatgaggtacatacactgccgcttctcaaatccccagagcctttaggaacaggagagtagactaggattccttctcttaaaaaggtacatatatatggaaaaaaatcatattgccgttctttaaaaggcaactgcatggtacattgttgattgttatgactggtacactctggcccagccagagctataattgttttttaaatgtgtcttgaagaatgcacagtgacaaggggagtagctattgggaacagggaactgtcctacactgctattgttgctacatgtatcgagccttgattgctcctagttatatacagggtctatcttgcttcctacctacatctgcttgagcagtgcctcaagtacatccttattaggaacatttcaaaccccttttagttaagtctttcactaaggttctcttgcatatatttcaagtgaatgttggatctcagactaaccatagtaataatacacatttctgtgagtgctgacttgtctttgcaatatttcttttctgatttatttaattttcttgtatttatatgttaaaatcaaaaatgttaaaatcaatgaaataaatttgcagttaagatctttaaaaaaaaaaaaaaaaaaaaaaaaaaaaaaaaaaaaaaaaaaaa

SEQ ID NO: 5128 - DNA, 4742 bp, Homo sapiens
gcgcccagcctcgccgccgccgagcgcccgacgcgccacgccgcgctgggcagctggagagctggcggcggagcgggccgggagcggcgggggcggcgccgaggccgcgggcggggggaggagggccgcagccccggagaggggaaaaggcgggccggacggcgccagcagccagccccgaggacgcgagcggcaggtgtgcacagaggttctccactttgttttctgaactcgcggtcaggatggttttctctgtcaggcagtgtggccatgttggcagaactgaagaagttttactgacgttcaagatattccttgtcatcatttgtcttcatgtcgttctggtaacatccctggaagaagatactgataattccagtttgtcaccaccacctgctaaattatctgttgtcagttttgccccctcctccaatggtactccagaggttgaaacaacaagcctcaatgatgttactttaagcttactcccttcaaacgaaacagaaaaaactaaaatcactatagtaaaaaccttcaatgcatcaggcgtcaaaccccagagaaatatctgcaatttgtcatctatttgcaatgactcagcattttttagaggtgagatcatgtttcaatatgataaagaaagcactgttccccagaatcaacatataacgaatggcaccttaactggagtcctgtctctaagtgaattaaaacgctcagagctcaacaaaaccctgcaaaccctaagtgagacttactttataatgtgtgctacagcagaggcccaaagcacattaaattgtacattcacaataaaactgaataatacaatgaatgcatgtgctgtaatagctgctttggaaagagtaaagattcgaccaatggaacactgctgctgttctgtcaggataccctgcccttcctccccagaagagttggaaaagcttcagtgtgacctgcaggatcccattgtctgtcttgctgaccatccacgtggcccaccattttcttccagccaatccatcccagtggtgcctcgggccactgtgctttcccaggtccccaaagctacctcttttgctgagcctccagattattcacctgtgacccacaatgttccctctccaataggggagattcaacccctttcaccccagccttcagctcccatagcttccagccctgccattgacatgcccccacagtctgaaacgatctcttcccctatgccccaaacccatgtctccggcaccccacctcctgtgaaagcctcattttcctctcccaccgtgtctgcccctgcgaatgtcaacactaccagcgcacctcctgtccagacagacatcgtcaacaccagcagtatttctgatcttgagaaccaagtgttgcagatggagaaggctctgtccttgggcagcctggagcctaacctcgcaggagaaatgatcaaccaagtcagcagactccttcattccccgcctgacatgctggcccctctggctcaaagattgctgaaagtagtggatgacattggcctacagctgaacttttcaaacacgactataagtctaacctccccttctttggctctggctgtgatcagagtgaatgccagtagtttcaacacaactacctttgtggcccaagaccctgcaaatcttcaggtttctctggaaacccaagctcctgagaacagtattggcacaattactcttccttcatcgctgatgaataatttaccagctcatgacatggagctagcttccagggttcagttcaatttttttgaaacacctgctttgtttcaggatccttccctggagaacctctctctgatcagctacgtcatatcatcgagtgttgcaaacctgaccgtcaggaacttgacaagaaacgtgacagtcacattaaagcacatcaacccgagccaggatgagttaacagtgagatgtgtattttgggacttgggcagaaatggtggcagaggaggctggtcagacaatggctgctctgtcaaagacaggagattgaatgaaaccatctgtacctgtagccatctaacaagcttcggcgttctgctggacctatctaggacatctgtgctgcctgctcaaatgatggctctgacgttcattacatatattggttgtgggctttcatcaatttttctgtcagtgactcttgtaacctacatagcttttgaaaagatccggagggattacccttccaaaatcctcatccagctgtgtgctgctctgcttctgctgaacctggtcttcctcctggactcgtggattgctctgtataagatgcaaggcctctgcatctcagtggctgtatttcttcattattttctcttggtctcattcacatggatgggcctagaagcattccatatgtacctggcccttgtcaaagtatttaatacttacatccgaaaatacatccttaaattctgcattgtcggttggggggtaccagctgtggttgtgaccatcatcctgactatatccccagataactatgggcttggatcctatgggaaattccccaatggttcaccggatgacttctgctggatcaacaacaatgcagtattctacattacggtggtgggatatttctgtgtgatatttttgctgaacgtcagcatgttcattgtggtcctggttcagctctgtcgaattaaaaagaagaagcaactgggagcccagcgaaaaaccagtattcaagacctcaggagtatcgctggccttacatttttactgggaataacttggggctttgccttctttgcctggggaccagttaacgtgaccttcatgtatctgtttgccatctttaataccttacaaggatttttcatattcatcttttactgtgtggccaaagaaaatgtcaggaagcaatggaggcggtatctttgttgtggaaagttacggctggctgaaaattctggaaatgcttctacagagaggaatggggtctcttttagtgttcagaatggagatgtgtgccttcacgatttcactggaaaacagcacatgtttaacgagaaggaagattcctgcaatgggaaaggccgtatggctctcagaaggacttcaaagcggggaagcttacactttattgagcaaatgtgattcctttcttctaaaatcaaagcatgatgcttgacagtgtgaaatgtccaattttaccttttacacaatgtgagatgtatgaaaatcaactcattttattctcggcaacatctggagaagcataagctaattaagggcgatgattattattacaagaagaaaccaagacattacaccatggtttttagacatttctgatttggtttcttatctttcattttataagaaggttggttttaaacaatacactaagaatgactcctataaagaaaacaaaaaaaggtagtgaactttcagctaccttttaaagaggctaagttatctttgataacatcatataaagcaactgttgacttcagcctgttggtgagtttagttgtgcatgcctttgttgtatataagctaaattctagtgacccatgtgtcaaaaatcttacttctacatttttttgtatttattttctactgtgtaaatgtattcctttgtagaatcatggttgttttgtctcacgtgataattcagaaaatccttgctcgttccgcaaatcctaaagctccttttggagatgatataggatgtgaaatacagaaacctcagtgaaatcaagaaataatgatcccagccagactgagaaaatgtaagcagacagtgccacagttagctcatacagtgcctttgagcaagttaggaaaagatgcccccactgggcagacacagccctatgggctcatggtttgacaaacagagtggagagaccatattttagccccactcaccctcttgggtgcacgacctgtacagccaaacacagcatccaatatgaatacccatcccctgaccgcatccccagtagtcagattatagaatctgcaccaagatgtttagctttataccttggccacagagagggatgaactgtcatccagaccatgtgtcaggaaaattgtgaacgtagatgaggtacatacactgccgcttctcaaatccccagagcctttaggaacaggagagtagactaggattccttctcttaaaaaggtacatatatatggaaaaaaatcatattgccgttctttaaaaggcaactgcatggtacattgttgattgttatgactggtacactctggcccagccagagctataattgttttttaaatgtgtcttgaagaatgcacagtgacaaggggagtagctattgggaacagggaactgtcctacactgctattgttgctacatgtatcgagccttgattgctcctagttatatacagggtctatcttgcttcctacctacatctgcttgagcagtgcctcaagtacatccttattaggaacatttcaaaccccttttagttaagtctttcactaaggttctcttgcatatatttcaagtgaatgttggatctcagactaaccatagtaataatacacatttctgtgagtgctgacttgtctttgcaatatttcttttctgatttatttaattttcttgtatttatatgttaaaatcaaaaatgttaaaatcaatgaaataaatttgcagttaagatctttaaaaaaaaaaaaaaaaaaaaaaaaaaaaaaaaaaaaaaaaaaaa

SEQ ID NO: 5129 - DNA, 4781 bp, Homo sapiens
gcgcccagcctcgccgccgccgagcgcccgacgcgccacgccgcgctgggcagctggagagctggcggcggagcgggccgggagcggcgggggcggcgccgaggccgcgggcggggggaggagggccgcagccccggagaggggaaaaggcgggccggacggcgccagcagccagccccgaggacgcgagcggcaggtgtgcacagaggttctccactttgttttctgaactcgcggtcaggatggttttctctgtcaggcagtgtggccatgttggcagaactgaagaagttttactgacgttcaagatattccttgtcatcatttgtcttcatgtcgttctggtaacatccctggaagaagatactgataattccagtttgtcaccaccacctgatgttactttaagcttactcccttcaaacgaaacaggcgtcaaaccccagagaaatatctgcaatttgtcatctatttgcaatgactcagcattttttagaggtgagatcatgtttcaatatgataaagaaagcactgttccccagaatcaacatataacgaatggcaccttaactggagtcctgtctctaagtgaattaaaacgctcagagctcaacaaaaccctgcaaaccctaagtgagacttactttataatgtgtgctacagcagaggcccaaagcacattaaattgtacattcacaataaaactgaataatacaatgaatgcatgtgctgtaatagctgctttggaaagagtaaagattcgaccaatggaacactgctgctgttctgtcaggataccctgcccttcctccccagaagagttggaaaagcttcagtgtgacctgcaggatcccattgtctgtcttgctgaccatccacgtggcccaccattttcttccagccaatccatcccagtggtgcctcgggccactgtgctttcccaggtccccaaagctacctcttttgctgagcctccagattattcacctgtgacccacaatgttccctctccaataggggagattcaacccctttcaccccagccttcagctcccatagcttccagccctgccattgacatgcccccacagtctgaaacgatctcttcccctatgccccaaacccatgtctccggcaccccacctcctgtgaaagcctcattttcctctcccaccgtgtctgcccctgcgaatgtcaacactaccagcgcacctcctgtccagacagacatcgtcaacaccagcagtatttctgatcttgagaaccaagtgttgcagatggagaaggctctgtccttgggcagcctggagcctaacctcgcaggagaaatgatcaaccaagtcagcagactccttcattccccgcctgacatgctggcccctctggctcaaagattgctgaaagtagtggatgacattggcctacagctgaacttttcaaacacgactataagtctaacctccccttctttggctctggctgtgatcagagtgaatgccagtagtttcaacacaactacctttgtggcccaagaccctgcaaatcttcaggtttctctggaaacccaagctcctgagaacagtattggcacaattactcttccttcatcgctgatgaataatttaccagctcatgacatggagctagcttccagggttcagttcaatttttttgaaacacctgctttgtttcaggatccttccctggagaacctctctctgatcagctacgtcatatcatcgagtgttgcaaacctgaccgtcaggaacttgacaagaaacgtgacagtcacattaaagcacatcaacccgagccaggatgagttaacagtgagatgtgtattttgggacttgggcagaaatggtggcagaggaggctggtcagacaatggctgctctgtcaaagacaggagattgaatgaaaccatctgtacctgtagccatctaacaagcttcggcgttctgctggacctatctaggacatctgtgctgcctgctcaaatgatggctctgacgttcattacatatattggttgtgggctttcatcaatttttctgtcagtgactcttgtaacctacatagcttttgaaaagatccggagggattacccttccaaaatcctcatccagctgtgtgctgctctgcttctgctgaacctggtcttcctcctggactcgtggattgctctgtataagatgcaaggcctctgcatctcagtggctgtatttcttcattattttctcttggtctcattcacatggatgggcctagaagcattccatatgtacctggcccttgtcaaagtatttaatacttacatccgaaaatacatccttaaattctgcattgtcggttggggggtaccagctgtggttgtgaccatcatcctgactatatccccagataactatgggcttggatcctatgggaaattccccaatggttcaccggatgacttctgctggatcaacaacaatgcagtattctacattacggtggtgggatatttctgtgtgatatttttgctgaacgtcagcatgttcattgtggtcctggttcagctctgtcgaattaaaaagaagaagcaactgggagcccagcgaaaaaccagtattcaagacctcaggagtatcgctggccttacatttttactgggaataacttggggctttgccttctttgcctggggaccagttaacgtgaccttcatgtatctgtttgccatctttaataccttacaaggatttttcatattcatcttttactgtgtggccaaagaaaatgtcaggaagcaatggaggcggtatctttgttgtggaaagttacggctggctgaaaattctgactggagtaaaactgctactaatggtttaaagaagcagactgtaaaccaaggagtgtccagctcttcaaattccttacagtcaagcagtaactccactaactccaccacactgctagtgaataatgattgctcagtacacgcaagcgggaatggaaatgcttctacagagaggaatggggtctcttttagtgttcagaatggagatgtgtgccttcacgatttcactggaaaacagcacatgtttaacgagaaggaagattcctgcaatgggaaaggccgtatggctctcagaaggacttcaaagcggggaagcttacactttattgagcaaatgtgattcctttcttctaaaatcaaagcatgatgcttgacagtgtgaaatgtccaattttaccttttacacaatgtgagatgtatgaaaatcaactcattttattctcggcaacatctggagaagcataagctaattaagggcgatgattattattacaagaagaaaccaagacattacaccatggtttttagacatttctgatttggtttcttatctttcattttataagaaggttggttttaaacaatacactaagaatgactcctataaagaaaacaaaaaaaggtagtgaactttcagctaccttttaaagaggctaagttatctttgataacatcatataaagcaactgttgacttcagcctgttggtgagtttagttgtgcatgcctttgttgtatataagctaaattctagtgacccatgtgtcaaaaatcttacttctacatttttttgtatttattttctactgtgtaaatgtattcctttgtagaatcatggttgttttgtctcacgtgataattcagaaaatccttgctcgttccgcaaatcctaaagctccttttggagatgatataggatgtgaaatacagaaacctcagtgaaatcaagaaataatgatcccagccagactgagaaaatgtaagcagacagtgccacagttagctcatacagtgcctttgagcaagttaggaaaagatgcccccactgggcagacacagccctatgggctcatggtttgacaaacagagtggagagaccatattttagccccactcaccctcttgggtgcacgacctgtacagccaaacacagcatccaatatgaatacccatcccctgaccgcatccccagtagtcagattatagaatctgcaccaagatgtttagctttataccttggccacagagagggatgaactgtcatccagaccatgtgtcaggaaaattgtgaacgtagatgaggtacatacactgccgcttctcaaatccccagagcctttaggaacaggagagtagactaggattccttctcttaaaaaggtacatatatatggaaaaaaatcatattgccgttctttaaaaggcaactgcatggtacattgttgattgttatgactggtacactctggcccagccagagctataattgttttttaaatgtgtcttgaagaatgcacagtgacaaggggagtagctattgggaacagggaactgtcctacactgctattgttgctacatgtatcgagccttgattgctcctagttatatacagggtctatcttgcttcctacctacatctgcttgagcagtgcctcaagtacatccttattaggaacatttcaaaccccttttagttaagtctttcactaaggttctcttgcatatatttcaagtgaatgttggatctcagactaaccatagtaataatacacatttctgtgagtgctgacttgtctttgcaatatttcttttctgatttatttaattttcttgtatttatatgttaaaatcaaaaatgttaaaatcaatgaaataaatttgcagttaagatctttaaaaaaaaaaaaaaaaaaaaaaaaaaaaaaaaaaaaaaaaaaaa

SEQ ID NO: 5130 - DNA, 4823 bp, Homo sapiens
gcgcccagcctcgccgccgccgagcgcccgacgcgccacgccgcgctgggcagctggagagctggcggcggagcgggccgggagcggcgggggcggcgccgaggccgcgggcggggggaggagggccgcagccccggagaggggaaaaggcgggccggacggcgccagcagccagccccgaggacgcgagcggcaggtgtgcacagaggttctccactttgttttctgaactcgcggtcaggatggttttctctgtcaggcagtgtggccatgttggcagaactgaagaagttttactgacgttcaagatattccttgtcatcatttgtcttcatgtcgttctggtaacatccctggaagaagatactgataattccagtttgtcaccaccacctgatgttactttaagcttactcccttcaaacgaaacagaaaaaactaaaatcactatagtaaaaaccttcaatgcatcaggcgtcaaaccccagagaaatatctgcaatttgtcatctatttgcaatgactcagcattttttagaggtgagatcatgtttcaatatgataaagaaagcactgttccccagaatcaacatataacgaatggcaccttaactggagtcctgtctctaagtgaattaaaacgctcagagctcaacaaaaccctgcaaaccctaagtgagacttactttataatgtgtgctacagcagaggcccaaagcacattaaattgtacattcacaataaaactgaataatacaatgaatgcatgtgctgtaatagctgctttggaaagagtaaagattcgaccaatggaacactgctgctgttctgtcaggataccctgcccttcctccccagaagagttggaaaagcttcagtgtgacctgcaggatcccattgtctgtcttgctgaccatccacgtggcccaccattttcttccagccaatccatcccagtggtgcctcgggccactgtgctttcccaggtccccaaagctacctcttttgctgagcctccagattattcacctgtgacccacaatgttccctctccaataggggagattcaacccctttcaccccagccttcagctcccatagcttccagccctgccattgacatgcccccacagtctgaaacgatctcttcccctatgccccaaacccatgtctccggcaccccacctcctgtgaaagcctcattttcctctcccaccgtgtctgcccctgcgaatgtcaacactaccagcgcacctcctgtccagacagacatcgtcaacaccagcagtatttctgatcttgagaaccaagtgttgcagatggagaaggctctgtccttgggcagcctggagcctaacctcgcaggagaaatgatcaaccaagtcagcagactccttcattccccgcctgacatgctggcccctctggctcaaagattgctgaaagtagtggatgacattggcctacagctgaacttttcaaacacgactataagtctaacctccccttctttggctctggctgtgatcagagtgaatgccagtagtttcaacacaactacctttgtggcccaagaccctgcaaatcttcaggtttctctggaaacccaagctcctgagaacagtattggcacaattactcttccttcatcgctgatgaataatttaccagctcatgacatggagctagcttccagggttcagttcaatttttttgaaacacctgctttgtttcaggatccttccctggagaacctctctctgatcagctacgtcatatcatcgagtgttgcaaacctgaccgtcaggaacttgacaagaaacgtgacagtcacattaaagcacatcaacccgagccaggatgagttaacagtgagatgtgtattttgggacttgggcagaaatggtggcagaggaggctggtcagacaatggctgctctgtcaaagacaggagattgaatgaaaccatctgtacctgtagccatctaacaagcttcggcgttctgctggacctatctaggacatctgtgctgcctgctcaaatgatggctctgacgttcattacatatattggttgtgggctttcatcaatttttctgtcagtgactcttgtaacctacatagcttttgaaaagatccggagggattacccttccaaaatcctcatccagctgtgtgctgctctgcttctgctgaacctggtcttcctcctggactcgtggattgctctgtataagatgcaaggcctctgcatctcagtggctgtatttcttcattattttctcttggtctcattcacatggatgggcctagaagcattccatatgtacctggcccttgtcaaagtatttaatacttacatccgaaaatacatccttaaattctgcattgtcggttggggggtaccagctgtggttgtgaccatcatcctgactatatccccagataactatgggcttggatcctatgggaaattccccaatggttcaccggatgacttctgctggatcaacaacaatgcagtattctacattacggtggtgggatatttctgtgtgatatttttgctgaacgtcagcatgttcattgtggtcctggttcagctctgtcgaattaaaaagaagaagcaactgggagcccagcgaaaaaccagtattcaagacctcaggagtatcgctggccttacatttttactgggaataacttggggctttgccttctttgcctggggaccagttaacgtgaccttcatgtatctgtttgccatctttaataccttacaaggatttttcatattcatcttttactgtgtggccaaagaaaatgtcaggaagcaatggaggcggtatctttgttgtggaaagttacggctggctgaaaattctgactggagtaaaactgctactaatggtttaaagaagcagactgtaaaccaaggagtgtccagctcttcaaattccttacagtcaagcagtaactccactaactccaccacactgctagtgaataatgattgctcagtacacgcaagcgggaatggaaatgcttctacagagaggaatggggtctcttttagtgttcagaatggagatgtgtgccttcacgatttcactggaaaacagcacatgtttaacgagaaggaagattcctgcaatgggaaaggccgtatggctctcagaaggacttcaaagcggggaagcttacactttattgagcaaatgtgattcctttcttctaaaatcaaagcatgatgcttgacagtgtgaaatgtccaattttaccttttacacaatgtgagatgtatgaaaatcaactcattttattctcggcaacatctggagaagcataagctaattaagggcgatgattattattacaagaagaaaccaagacattacaccatggtttttagacatttctgatttggtttcttatctttcattttataagaaggttggttttaaacaatacactaagaatgactcctataaagaaaacaaaaaaaggtagtgaactttcagctaccttttaaagaggctaagttatctttgataacatcatataaagcaactgttgacttcagcctgttggtgagtttagttgtgcatgcctttgttgtatataagctaaattctagtgacccatgtgtcaaaaatcttacttctacatttttttgtatttattttctactgtgtaaatgtattcctttgtagaatcatggttgttttgtctcacgtgataattcagaaaatccttgctcgttccgcaaatcctaaagctccttttggagatgatataggatgtgaaatacagaaacctcagtgaaatcaagaaataatgatcccagccagactgagaaaatgtaagcagacagtgccacagttagctcatacagtgcctttgagcaagttaggaaaagatgcccccactgggcagacacagccctatgggctcatggtttgacaaacagagtggagagaccatattttagccccactcaccctcttgggtgcacgacctgtacagccaaacacagcatccaatatgaatacccatcccctgaccgcatccccagtagtcagattatagaatctgcaccaagatgtttagctttataccttggccacagagagggatgaactgtcatccagaccatgtgtcaggaaaattgtgaacgtagatgaggtacatacactgccgcttctcaaatccccagagcctttaggaacaggagagtagactaggattccttctcttaaaaaggtacatatatatggaaaaaaatcatattgccgttctttaaaaggcaactgcatggtacattgttgattgttatgactggtacactctggcccagccagagctataattgttttttaaatgtgtcttgaagaatgcacagtgacaaggggagtagctattgggaacagggaactgtcctacactgctattgttgctacatgtatcgagccttgattgctcctagttatatacagggtctatcttgcttcctacctacatctgcttgagcagtgcctcaagtacatccttattaggaacatttcaaaccccttttagttaagtctttcactaaggttctcttgcatatatttcaagtgaatgttggatctcagactaaccatagtaataatacacatttctgtgagtgctgacttgtctttgcaatatttcttttctgatttatttaattttcttgtatttatatgttaaaatcaaaaatgttaaaatcaatgaaataaatttgcagttaagatctttaaaaaaaaaaaaaaaaaaaaaaaaaaaaaaaaaaaaaaaaaaaa

SEQ ID NO: 5131 - DNA, 4805 bp, Homo sapiens
gcgcccagcctcgccgccgccgagcgcccgacgcgccacgccgcgctgggcagctggagagctggcggcggagcgggccgggagcggcgggggcggcgccgaggccgcgggcggggggaggagggccgcagccccggagaggggaaaaggcgggccggacggcgccagcagccagccccgaggacgcgagcggcaggtgtgcacagaggttctccactttgttttctgaactcgcggtcaggatggttttctctgtcaggcagtgtggccatgttggcagaactgaagaagttttactgacgttcaagatattccttgtcatcatttgtcttcatgtcgttctggtaacatccctggaagaagatactgataattccagtttgtcaccaccacctgaggttgaaacaacaagcctcaatgatgttactttaagcttactcccttcaaacgaaacaggcgtcaaaccccagagaaatatctgcaatttgtcatctatttgcaatgactcagcattttttagaggtgagatcatgtttcaatatgataaagaaagcactgttccccagaatcaacatataacgaatggcaccttaactggagtcctgtctctaagtgaattaaaacgctcagagctcaacaaaaccctgcaaaccctaagtgagacttactttataatgtgtgctacagcagaggcccaaagcacattaaattgtacattcacaataaaactgaataatacaatgaatgcatgtgctgtaatagctgctttggaaagagtaaagattcgaccaatggaacactgctgctgttctgtcaggataccctgcccttcctccccagaagagttggaaaagcttcagtgtgacctgcaggatcccattgtctgtcttgctgaccatccacgtggcccaccattttcttccagccaatccatcccagtggtgcctcgggccactgtgctttcccaggtccccaaagctacctcttttgctgagcctccagattattcacctgtgacccacaatgttccctctccaataggggagattcaacccctttcaccccagccttcagctcccatagcttccagccctgccattgacatgcccccacagtctgaaacgatctcttcccctatgccccaaacccatgtctccggcaccccacctcctgtgaaagcctcattttcctctcccaccgtgtctgcccctgcgaatgtcaacactaccagcgcacctcctgtccagacagacatcgtcaacaccagcagtatttctgatcttgagaaccaagtgttgcagatggagaaggctctgtccttgggcagcctggagcctaacctcgcaggagaaatgatcaaccaagtcagcagactccttcattccccgcctgacatgctggcccctctggctcaaagattgctgaaagtagtggatgacattggcctacagctgaacttttcaaacacgactataagtctaacctccccttctttggctctggctgtgatcagagtgaatgccagtagtttcaacacaactacctttgtggcccaagaccctgcaaatcttcaggtttctctggaaacccaagctcctgagaacagtattggcacaattactcttccttcatcgctgatgaataatttaccagctcatgacatggagctagcttccagggttcagttcaatttttttgaaacacctgctttgtttcaggatccttccctggagaacctctctctgatcagctacgtcatatcatcgagtgttgcaaacctgaccgtcaggaacttgacaagaaacgtgacagtcacattaaagcacatcaacccgagccaggatgagttaacagtgagatgtgtattttgggacttgggcagaaatggtggcagaggaggctggtcagacaatggctgctctgtcaaagacaggagattgaatgaaaccatctgtacctgtagccatctaacaagcttcggcgttctgctggacctatctaggacatctgtgctgcctgctcaaatgatggctctgacgttcattacatatattggttgtgggctttcatcaatttttctgtcagtgactcttgtaacctacatagcttttgaaaagatccggagggattacccttccaaaatcctcatccagctgtgtgctgctctgcttctgctgaacctggtcttcctcctggactcgtggattgctctgtataagatgcaaggcctctgcatctcagtggctgtatttcttcattattttctcttggtctcattcacatggatgggcctagaagcattccatatgtacctggcccttgtcaaagtatttaatacttacatccgaaaatacatccttaaattctgcattgtcggttggggggtaccagctgtggttgtgaccatcatcctgactatatccccagataactatgggcttggatcctatgggaaattccccaatggttcaccggatgacttctgctggatcaacaacaatgcagtattctacattacggtggtgggatatttctgtgtgatatttttgctgaacgtcagcatgttcattgtggtcctggttcagctctgtcgaattaaaaagaagaagcaactgggagcccagcgaaaaaccagtattcaagacctcaggagtatcgctggccttacatttttactgggaataacttggggctttgccttctttgcctggggaccagttaacgtgaccttcatgtatctgtttgccatctttaataccttacaaggatttttcatattcatcttttactgtgtggccaaagaaaatgtcaggaagcaatggaggcggtatctttgttgtggaaagttacggctggctgaaaattctgactggagtaaaactgctactaatggtttaaagaagcagactgtaaaccaaggagtgtccagctcttcaaattccttacagtcaagcagtaactccactaactccaccacactgctagtgaataatgattgctcagtacacgcaagcgggaatggaaatgcttctacagagaggaatggggtctcttttagtgttcagaatggagatgtgtgccttcacgatttcactggaaaacagcacatgtttaacgagaaggaagattcctgcaatgggaaaggccgtatggctctcagaaggacttcaaagcggggaagcttacactttattgagcaaatgtgattcctttcttctaaaatcaaagcatgatgcttgacagtgtgaaatgtccaattttaccttttacacaatgtgagatgtatgaaaatcaactcattttattctcggcaacatctggagaagcataagctaattaagggcgatgattattattacaagaagaaaccaagacattacaccatggtttttagacatttctgatttggtttcttatctttcattttataagaaggttggttttaaacaatacactaagaatgactcctataaagaaaacaaaaaaaggtagtgaactttcagctaccttttaaagaggctaagttatctttgataacatcatataaagcaactgttgacttcagcctgttggtgagtttagttgtgcatgcctttgttgtatataagctaaattctagtgacccatgtgtcaaaaatcttacttctacatttttttgtatttattttctactgtgtaaatgtattcctttgtagaatcatggttgttttgtctcacgtgataattcagaaaatccttgctcgttccgcaaatcctaaagctccttttggagatgatataggatgtgaaatacagaaacctcagtgaaatcaagaaataatgatcccagccagactgagaaaatgtaagcagacagtgccacagttagctcatacagtgcctttgagcaagttaggaaaagatgcccccactgggcagacacagccctatgggctcatggtttgacaaacagagtggagagaccatattttagccccactcaccctcttgggtgcacgacctgtacagccaaacacagcatccaatatgaatacccatcccctgaccgcatccccagtagtcagattatagaatctgcaccaagatgtttagctttataccttggccacagagagggatgaactgtcatccagaccatgtgtcaggaaaattgtgaacgtagatgaggtacatacactgccgcttctcaaatccccagagcctttaggaacaggagagtagactaggattccttctcttaaaaaggtacatatatatggaaaaaaatcatattgccgttctttaaaaggcaactgcatggtacattgttgattgttatgactggtacactctggcccagccagagctataattgttttttaaatgtgtcttgaagaatgcacagtgacaaggggagtagctattgggaacagggaactgtcctacactgctattgttgctacatgtatcgagccttgattgctcctagttatatacagggtctatcttgcttcctacctacatctgcttgagcagtgcctcaagtacatccttattaggaacatttcaaaccccttttagttaagtctttcactaaggttctcttgcatatatttcaagtgaatgttggatctcagactaaccatagtaataatacacatttctgtgagtgctgacttgtctttgcaatatttcttttctgatttatttaattttcttgtatttatatgttaaaatcaaaaatgttaaaatcaatgaaataaatttgcagttaagatctttaaaaaaaaaaaaaaaaaaaaaaaaaaaaaaaaaaaaaaaaaaaa

SEQ ID NO: 5132 - DNA, 2567 bp, Homo sapiens; identical to SEQ ID NO: 618

SEQ ID NO: 5133 - DNA, 3452 bp, Homo sapiens; identical to SEQ ID NO: 1633

SEQ ID NO: 5134 - DNA, 2265 bp, Homo sapiens
ataaggggcgcttggcgcgcaacgaccccaagccgcagctttgaagcctgagcggccgaactcggcagctccaacccaactcggcttaactccgcctcaccgagcccagtccaagactctgtgctccctaggtttgcaacagctctctggatgccgtggcaagcatttcgcagatttggtcaaaagctggtacgcagacgtacactggagtcaggcatggctgagactcgccttgccagatgcctaagcaccctggatttagtggccctgggtgtgggcagcacattgggtgcaggcgtgtatgtcctagctggcgaggtggccaaagataaagcagggccatccattgtgatctgctttttggtggctgccctgtcttctgtgttggctgggctgtgctatgcggagtttggtgcccgggttccccgttctggttcggcatatctctacagctatgtcactgtgggtgaactctgggccttcaccactggctggaacctcatcctctcctatgtcattggtacagccagtgtggcccgggcctggagctctgcttttgacaacctgattgggaaccacatctctaagactctgcaggggtccattgcactgcacgtgccccatgtccttgcagaatatccagatttctttgctttgggcctcgtgttgctgctcactggattgttggctctcggggctagtgagtcggccctggttaccaaagtgttcacaggcgtgaaccttttggttcttgggttcgtcatgatctctggcttcgttaagggggacgtgcacaactggaagctcacagaagaggactacgaattggccatggctgaactcaatgacacctatagcttgggtcctctgggctctggaggatttgtgcctttcggcttcgagggaattctccgtggagcagcgacctgtttctatgcatttgttggtttcgactgtattgctaccactggagaagaagcccagaatccccagcgttccatcccgatgggcattgtgatctcactgtctgtctgctttttggcgtattttgctgtctcttctgcactcaccctgatgatgccttactaccagcttcagcctgagagccctttgcctgaggcatttctctacattggatgggctcctgcccgctatgttgtggctgttggctccctctgtgctctttctaccagcctcctgggctccatgttccccatgcctcgggtgatctacgcgatggcagaggatggcctcctgttccgtgtacttgctcggatccacaccggcacacgcaccccaatcatagccaccgtggtctctggcattattgcagcattcatggcattcctcttcaaactcactgatcttgtggacctcatgtcaattgggaccctgcttgcttactccctggtgtcgatttgtgttctcatcctcaggtatcaacctgatcaggagacaaagactggggaagaagtggagttgcaggaggaggcaataactactgaatcagagaagttgaccctatggggactatttttcccactcaactccatccccactccactctctggccaaattgtctatgtttgttcctcattgcttgctgtcctgctgactgctctttgcctggtgctggcccagtggtcagttccattgctttctggagacctgctgtggactgcagtggttgtgctgctcctgctgctcattattgggatcattgtggtcatctggagacagccacagagttccactccccttcactttaaggtgcctgctttgcctctcctcccactaatgagcatctttgtgaatatttaccttatgatgcagatgacagctggtacctgggcccgatttggggtctggatgctgattggctttgctatctacttcggctatgggatccagcacagcctggaagagattaagagtaaccaaccctcacgcaagtctagagccaaaactgtagaccttgatcccggcactctctatgtccactcagtttgacatcgtcacacctaaatgctgtctggtcccctgcacaataatggagagtactcctgaccccagtgacagctagccctcccctgtgatggtggtggtggatactaatacagttctgtacgatgtgaaggatgtgtctttgctatttcttgtctattttaacccgtctgcttctaaatgatgtctagctgcttaccaactttaaaaaatgatattaaaagaaagtagaaaaataaaaaaaaaaaaaaaaaaaaaaaa

SEQ ID NO: 5135 - DNA, 2289 bp, Homo sapiens; identical to SEQ ID NO: 1584

SEQ ID NO: 5136 - DNA, 4033 bp, Homo sapiens; identical to SEQ ID NO: 755

SEQ ID NO: 5137 - DNA, 3826 bp, Homo sapiens
accgcgcagcggccttttgtcagcgcgcagggccaggagagctctcatttcctcccagcctcgtgcgggaaatggctttaattctgacggcagggctgtgagggactagcgggaacccgagccttttgtcaaggaactgcggcgtcggtggccagtcatccccgccgccgcggagccgctgcactgctgggggatctcccagcagctctgacgagcgcgggctgcagcatgggcagaaaacgctgccctgcagattagctgggtggattttttaagcgcaccccaccccccaaacccataaaataacaaaaccaacccgcagtggccgaccggagatagctaagatgccgcgcaggagtttccacctggatgtttgaggttgtgtagatgtggccggcacccttgagagtggagctagggggtgcagactgagcagtgaacagaaggagccttggacagggctgggccagcctcccgagttccaggagcgaattgcaaacccaccgggaaaatgagcgaagagacggtccccgaggctgcctcgccgccgcccccgcaggggcagccttactttgaccgcttctcagaggacgaccccgagtacatgcgccttcgcaaccgggcggcggacctgcggcaggacttcaacctgatggagcagaagaagcgcgtcaccatgatcctgcagagtccctctttcagggaggagctggaaggcctcatccaggagcagatgaagaaggggaacaactcctccaacatctgggccctgcgacagatcgcggacttcatggccagcacctcccacgcagtcttcccgacatcttccatgaatgtctccatgatgacgcctatcaatgacctccacacagctgactccctgaacctggccaaaggggagcggctcatgcggtgcaagatcagcagtgtctaccgactcctggacctctatggctgggcccagctgagtgacacctatgtcacgttgagagtcagcaaggagcaggaccacttcctgatcagccctaagggagtttcttgcagtgaagtcacagcgtccagcctgatcaaggtgaacattctgggagaggtggtggagaagggcagcagctgcttcccagtggacaccacaggcttctgtctgcactcggccatctatgcagcgaggcccgacgtgcgctgcatcatccacctgcacacaccggccacagcagcggtgtcggccatgaagtggggcctcctgcctgtctcccacaatgccctgctggtgggggacatggcctattatgacttcaatggggaaatggagcaggaagccgatcggatcaacctgcagaagtgccttggacccacctgcaagatcctggtgctaagaaaccatggagtggttgctctgggtgacacggtagaggaggcattttacaagatcttccacctgcaggctgcatgtgagatacaggtgtcggctctgtccagtgccgggggagtggagaacctcatcctcctggagcaggagaagcaccggccccatgaggtgggctccgtgcagtgggccgggagcacctttgggcctatgcagaagagtcggctgggggagcatgagtttgaggccctcatgaggatgctggacaacctgggctacagaacaggttacacgtatcgccacccctttgttcaagagaaaaccaaacacaaaagtgaggtggagattccagccacggtcacagccttcgtgtttgaggaggacggtgccccggtgcccgccctgcgacagcatgcccagaagcagcagaaggagaagacccgctggctcaatacgcccaacacctacctgcgggtcaatgtggccgatgaggtccagaggagcatgggcagcccccgacccaagaccacgtggatgaaggctgacgaggtggagaaatccagcagtggcatgccgattcgcatcgaaaacccaaaccaatttgtgcctctctatactgacccccaggaagtactggagatgaggaacaagattcgagaacaaaaccgacaagatgtgaagtcagcggggcctcagtcccagctcctggcgagcgtcattgccgagaagagccgaagcccggtagagcagaggctgcccctgactggcggggaaacgtgtttgccttcggggtcttctgtgcctggggctgggttgcaggacccctgagtcctcatacccaccttcccctgtgatcttgggtgccggtgctcttgctgcaaaatggaggccaacctcacaggggtgctgtgaggaccagggaggacaatgtctgatggcccctgtgggcactgggctggagaacagcagcccagcctgcctgcaggagtgatgcggccggcttccgtacctcctgccatggaactccactctgtcctcccttactaccccgtgaagtggggactcataggcttggggctggagactcccaggtgccccaggtgtgcccagccctgagagtctctgacctctgagcctggtatgacatcatccaaccagagctctggaaagatgatcatgtacccatagagaaggggtatatagacaggacccatgctcctacaggatgggaagggacaatattacccacacaaacccacattgagttagaaagtattgtaattgtttttgtgcttgagatagaacagtgttttgtctagtgcttagcaaaaggggtgaagttcagaattctggcatgtgtttgaaatcactgctgctccttgcaaggtagcaatgggcatgacattttccttagcagtaaaaattggggaaatacaggaaatgttcctctctgcagggcaaattgtgatgatgcaatgatttcaggtcaagactgcagcccacagggtgggtgcccattggcaggagaagtgtgaaagttgtatcatcacacttacctccccccaaccccaactcagccaagatggggaacactgaatatcccgcagggtcaagtatagaaatagccatgttctggcgggaggtgagagttcattacaatgagcaacactgttaaaaaaacaaacaaaaatctcccctgccatttataccaagtgctcttctcggagtccctcttcttgggtttttggtcttggattctcggttgactccatgattccctacattaggcctactgtggcctcccttttggaaggggcccaggggcagaagacctggcgggccagggcagggaggactggcagcctccaggctcacctccctttggcttcactctctttgctcctcagcttcagagcactgcatcctcaaaggccaagatgaggatgctgaattaggaaaaaaggctgtggagtctgaattttagttcctatcttgggctagaggggtcaaagaattcctgaagcttatgtaagggccggctggtcagctccctagaaccacgggctccacagaggtggcaaaacccagtgattttgccagtatccctgcagggacctgcggtacaggcaggttgaagatctgagactcaggaaccttggcccctttgtcacttacaactgtgtgtgaaacaggactaacagtttggactgagagcactgaagctgctgtgtgttgtgcatataacttaatgctgtgtgttgtggcttgcactgctgtgggggcggggagggcagtggtggggaatggctggcatgaagcttgcttgagccaatgctatgcttgctgggctttggctgactggctttgggccaccaactgtatttgcatagtgatggcttggaagtgtccatagaagggattgcaataaaggtgtgtcttccttctgctcgggaaaaaaaaaaa

SEQ ID NO: 5138 - DNA, 4119 bp, Homo sapiens
accgcgcagcggccttttgtcagcgcgcagggccaggagagctctcatttcctcccagcctcgtgcgggaaatggctttaattctgacggcagggctgtgagggactagcgggaacccgagccttttgtcaaggaactgcggcgtcggtggccagtcatccccgccgccgcggagccgctgcactgctgggggatctcccagcagctctgacgagcgcgggctgcagcatgggcagaaaacgctgccctgcagattagctgggtggattttttaagcgcaccccaccccccaaacccataaaataacaaaaccaacccgcagtggccgaccggagatagctaagatgccgcgcaggagtttccacctggatgtttgaggttgtgtagatgtggccggcacccttgagagtggagctagggggtgcagactgagcagtgaacagaaggagccttggacagggctgggccagcctcccgagttccaggagcgaattgcaaacccaccgggaaaatgagcgaagagacggtccccgaggctgcctcgccgccgcccccgcaggggcagccttactttgaccgcttctcagaggacgaccccgagtacatgcgccttcgcaaccgggcggcggacctgcggcaggacttcaacctgatggagcagaagaagcgcgtcaccatgatcctgcagagtccctctttcagggaggagctggaaggcctcatccaggagcagatgaagaaggggaacaactcctccaacatctgggccctgcgacagatcgcggacttcatggccagcacctcccacgcagtcttcccgacatcttccatgaatgtctccatgatgacgcctatcaatgacctccacacagctgactccctgaacctggccaaaggggagcggctcatgcggtgcaagatcagcagtgtctaccgactcctggacctctatggctgggcccagctgagtgacacctatgtcacgttgagagtcagcaaggagcaggaccacttcctgatcagccctaagggagtttcttgcagtgaagtcacagcgtccagcctgatcaaggtgaacattctgggagaggtggtggagaagggcagcagctgcttcccagtggacaccacaggcttctgtctgcactcggccatctatgcagcgaggcccgacgtgcgctgcatcatccacctgcacacaccggccacagcagcggtgtcggccatgaagtggggcctcctgcctgtctcccacaatgccctgctggtgggggacatggcctattatgacttcaatggggaaatggagcaggaagccgatcggatcaacctgcagaagtgccttggacccacctgcaagatcctggtgctaagaaaccatggagtggttgctctgggtgacacggtagaggaggcattttacaagatcttccacctgcaggctgcatgtgagatacaggtgtcggctctgtccagtgccgggggagtggagaacctcatcctcctggagcaggagaagcaccggccccatgaggtgggctccgtgcagtgggccgggagcacctttgggcctatgcagaagagtcggctgggggagcatgagtttgaggccctcatgaggatgctggacaacctgggctacagaacaggttacacgtatcgccacccctttgttcaagagaaaaccaaacacaaaagtgaggtggagattccagccacggtcacagccttcgtgtttgaggaggacggtgccccggtgcccgccctgcgacagcatgcccagaagcagcagaaggagaagacccgctggctcaatacgcccaacacctacctgcgggtcaatgtggccgatgaggtccagaggagcatgggcagcccccgacccaagaccacgtggatgaaggctgacgaggtggagaaatccagcagtggcatgccgattcgcatcgaaaacccaaaccaatttgtgcctctctatactgacccccaggaagtactggagatgaggaacaagattcgagaacaaaaccgacaagatgtgaagtcagcggggcctcagtcccagctcctggcgagcgtcattgccgagaagagccgaagcccgtctacagagagccagctgatgtccaagggagacgaggataccaaagacgattcagaggagacggtgcccaaccccttcagccaactcactgaccaggagttggaggagtacaagaaagaggtggagaggaagaaactagaacttgatgagacaggacaggaacgagagccaggctctggtccggccgtgtgcgagttcttcagcgttgccctccacatctggagtaacatattggagagaaagaaactgccccagaagagcctggctcacctgcaaagtctgcacctgcttctccagtgcagagcccagcgaaggaggcagagacaaagagccctttagtctctccttccaagtctttagaggaaggtactaagaagacagaaacaagcaaagccgccaccacagagcccgaaacaacccagccggaaggggtggtggtcaacgggagggaggaggagcagacggcagaggaaatcctcagcaaaggcctgagccagatgaccaccagtgctgacacggatgttgatacctctaaggacaaaaccgagtcggtcaccagcggccccatgtccccagagggctcaccttccaagtctccctcaaagaagaaaaagaaattccgaaccccctccttcctgaaaaagagcaaaaagaaggagaaagtggagtcctgattcatgacacccttgggctccctcctgcctcctctctctcctccccttcccttctcccatctctgtccctgcaagcacagggctaaggagggatagagtaggaccctggaccacattcggaaggggaacttagagatcacccgaccaacccttcgttttacagttgcccaagagaaatcaggtgacttgcccaaggtcacacagctagttagcggcagagcctgcactcgaattcaggtctcctgacttccagtccagtgctccttctactacacaacactgcctagttgtgggctgcctttgtttggatgctgtccaccaatctgagcctagggcaagaaggccagaaatgggccgtgagctctcacaggctcagactaaatcagaggtcaaggcttcccctgagtaaggtccatttcttcccaggaatccaatctcctgtggatggagctatctctacatttaaaaatctcttctcttttccactttgggtccctgccctgctgctcaaagtgactagccaaattgacccctccaacagaaagtaatctttgttcccaagggctgatggcttagcttgtactaccccaaacattaaccctgagctttcttcatggaacctcttgaatgatggatggaagagctataagaggtggtaggcataggggcaagccatgtaagctgaggattggggatggtttcatcaacataagaggccaggaacttgacccctttgaattgtgcatctcaggcacttcaaaactaaaaccaaatttagcataggaaaaagttgtttaatgctcagggcagaaatttggggaagttgaaatcctctgttggctttgggttgtataaggaggatcaaaacaacagaggaaatgctgactttctagctttgcatgacacctggagcaatgcactgtacctgcctcactcctgtccagtggtcaggtttcccctgaccttccctcacccccagaaacacttgcttacagaccgaaactggcatcttactcttggcaccttgacttgcaccctctgaggttccaactcagtcattctttgtccagcagaggagaatcagaaatgagcccttcaggattaatcctcttgcaccagctctcagagaaatgctgggtatccctgtccttgtccctatctgtccatcctggggcctggtaatggccacagttattgttttaaatgccaacactgtcttctcatgttcttccgtggggcattgattaatgagcatttgttggctcctaaaaattagacaatccattctcttgaaagcaccgtgtcttgaaagaatatttttccttttgatctgactatcgt

SEQ ID NO: 5139 - DNA, 3787 bp, Homo sapiens
aaaggtttctggtgatgatgtagcatccgaggctcttaggaaatcggggctgcaagcactggcccctgcttggggatggtgggaccctcgcccggagcgtaacgcctgacagtttccacctggatgtttgaggttgtgtagatgtggccggcacccttgagagtggagctagggggtgcagactgagcagtgaacagaaggagccttggacagggctgggccagcctcccgagttccaggagcgaattgcaaacccaccgggaaaatgagcgaagagacggtccccgaggctgcctcgccgccgcccccgcaggggcagccttactttgaccgcttctcagaggacgaccccgagtacatgcgccttcgcaaccgggcggcggacctgcggcaggacttcaacctgatggagcagaagaagcgcgtcaccatgatcctgcagagtccctctttcagggaggagctggaaggcctcatccaggagcagatgaagaaggggaacaactcctccaacatctgggccctgcgacagatcgcggacttcatggccagcacctcccacgcagtcttcccgacatcttccatgaatgtctccatgatgacgcctatcaatgacctccacacagctgactccctgaacctggccaaaggggagcggctcatgcggtgcaagatcagcagtgtctaccgactcctggacctctatggctgggcccagctgagtgacacctatgtcacgttgagagtcagcaaggagcaggaccacttcctgatcagccctaagggagtttcttgcagtgaagtcacagcgtccagcctgatcaaggtgaacattctgggagaggtggtggagaagggcagcagctgcttcccagtggacaccacaggcttctgtctgcactcggccatctatgcagcgaggcccgacgtgcgctgcatcatccacctgcacacaccggccacagcagcggtgtcggccatgaagtggggcctcctgcctgtctcccacaatgccctgctggtgggggacatggcctattatgacttcaatggggaaatggagcaggaagccgatcggatcaacctgcagaagtgccttggacccacctgcaagatcctggtgctaagaaaccatggagtggttgctctgggtgacacggtagaggaggcattttacaagatcttccacctgcaggctgcatgtgagatacaggtgtcggctctgtccagtgccgggggagtggagaacctcatcctcctggagcaggagaagcaccggccccatgaggtgggctccgtgcagtgggccgggagcacctttgggcctatgcagaagagtcggctgggggagcatgagtttgaggccctcatgaggatgctggacaacctgggctacagaacaggttacacgtatcgccacccctttgttcaagagaaaaccaaacacaaaagtgaggtggagattccagccacggtcacagccttcgtgtttgaggaggacggtgccccggtgcccgccctgcgacagcatgcccagaagcagcagaaggagaagacccgctggctcaatacgcccaacacctacctgcgggtcaatgtggccgatgaggtccagaggagcatgggcagcccccgacccaagaccacgtggatgaaggctgacgaggtggagaaatccagcagtggcatgccgattcgcatcgaaaacccaaaccaatttgtgcctctctatactgacccccaggaagtactggagatgaggaacaagattcgagaacaaaaccgacaagatgtgaagtcagcggggcctcagtcccagctcctggcgagcgtcattgccgagaagagccgaagcccgtctacagagagccagctgatgtccaagggagacgaggataccaaagacgattcagaggagacggtgcccaaccccttcagccaactcactgaccaggagttggaggagtacaagaaagaggtggagaggaagaaactagaacttgatggagagaaagaaactgccccagaagagcctggctcacctgcaaagtctgcacctgcttctccagtgcagagcccagcgaaggaggcagagacaaagagccctttagtctctccttccaagtctttagaggaaggtactaagaagacagaaacaagcaaagccgccaccacagagcccgaaacaacccagccggaaggggtggtggtcaacgggagggaggaggagcagacggcagaggaaatcctcagcaaaggcctgagccagatgaccaccagtgctgacacggatgttgatacctctaaggacaaaaccgagtcggtcaccagcggccccatgtccccagagggctcaccttccaagtctccctcaaagaagaaaaagaaattccgaaccccctccttcctgaaaaagagcaaaaagaaggagaaagtggagtcctgattcatgacacccttgggctccctcctgcctcctctctctcctccccttcccttctcccatctctgtccctgcaagcacagggctaaggagggatagagtaggaccctggaccacattcggaaggggaacttagagatcacccgaccaacccttcgttttacagttgcccaagagaaatcaggtgacttgcccaaggtcacacagctagttagcggcagagcctgcactcgaattcaggtctcctgacttccagtccagtgctccttctactacacaacactgcctagttgtgggctgcctttgtttggatgctgtccaccaatctgagcctagggcaagaaggccagaaatgggccgtgagctctcacaggctcagactaaatcagaggtcaaggcttcccctgagtaaggtccatttcttcccaggaatccaatctcctgtggatggagctatctctacatttaaaaatctcttctcttttccactttgggtccctgccctgctgctcaaagtgactagccaaattgacccctccaacagaaagtaatctttgttcccaagggctgatggcttagcttgtactaccccaaacattaaccctgagctttcttcatggaacctcttgaatgatggatggaagagctataagaggtggtaggcataggggcaagccatgtaagctgaggattggggatggtttcatcaacataagaggccaggaacttgacccctttgaattgtgcatctcaggcacttcaaaactaaaaccaaatttagcataggaaaaagttgtttaatgctcagggcagaaatttggggaagttgaaatcctctgttggctttgggttgtataaggaggatcaaaacaacagaggaaatgctgactttctagctttgcatgacacctggagcaatgcactgtacctgcctcactcctgtccagtggtcaggtttcccctgaccttccctcacccccagaaacacttgcttacagaccgaaactggcatcttactcttggcaccttgacttgcaccctctgaggttccaactcagtcattctttgtccagcagaggagaatcagaaatgagcccttcaggattaatcctcttgcaccagctctcagagaaatgctgggtatccctgtccttgtccctatctgtccatcctggggcctggtaatggccacagttattgttttaaatgccaacactgtcttctcatgttcttccgtggggcattgattaatgagcatttgttggctcctaaaaattagacaatccattctcttgaaagcaccgtgtcttgaaagaatatttttccttttgatctgactatcgt

SEQ ID NO: 5140 - DNA, 3707 bp, Homo sapiens
accgcgcagcggccttttgtcagcgcgcagggccaggagagctctcatttcctcccagcctcgtgcgggaaatggctttaattctgacggcagggctgtgagggactagcgggaacccgagccttttgtcaaggaactgcggcgtcggtggccagtcatccccgccgccgcggagccgctgcactgctgggggatctcccagcagctctgacgagcgcgggctgcagcatgggcagaaaacgctgccctgcagattagctgggtggattttttaagcgcaccccaccccccaaacccataaaataacaaaaccaacccgcagtggccgaccggagatagctaagatgccgcgcaggagagttccaggagcgaattgcaaacccaccgggaaaatgagcgaagagacggtccccgaggctgcctcgccgccgcccccgcaggggcagccttactttgaccgcttctcagaggacgaccccgagtacatgcgccttcgcaaccgggcggcggacctgcggcaggacttcaacctgatggagcagaagaagcgcgtcaccatgatcctgcagagtccctctttcagggaggagctggaaggcctcatccaggagcagatgaagaaggggaacaactcctccaacatctgggccctgcgacagatcgcggacttcatggccagcacctcccacgcagtcttcccgacatcttccatgaatgtctccatgatgacgcctatcaatgacctccacacagctgactccctgaacctggccaaaggggagcggctcatgcggtgcaagatcagcagtgtctaccgactcctggacctctatggctgggcccagctgagtgacacctatgtcacgttgagagtcagcaaggagcaggaccacttcctgatcagccctaagggagtttcttgcagtgaagtcacagcgtccagcctgatcaaggtgaacattctgggagaggtggtggagaagggcagcagctgcttcccagtggacaccacaggcttctgtctgcactcggccatctatgcagcgaggcccgacgtgcgctgcatcatccacctgcacacaccggccacagcagcggtgtcggccatgaagtggggcctcctgcctgtctcccacaatgccctgctggtgggggacatggcctattatgacttcaatggggaaatggagcaggaagccgatcggatcaacctgcagaagtgccttggacccacctgcaagatcctggtgctaagaaaccatggagtggttgctctgggtgacacggtagaggaggcattttacaagatcttccacctgcaggctgcatgtgagatacaggtgtcggctctgtccagtgccgggggagtggagaacctcatcctcctggagcaggagaagcaccggccccatgaggtgggctccgtgcagtgggccgggagcacctttgggcctatgcagaagagtcggctgggggagcatgagtttgaggccctcatgaggatgctggacaacctgggctacagaacaggttacacgtatcgccacccctttgttcaagagaaaaccaaacacaaaagtgaggtggagattccagccacggtcacagccttcgtgtttgaggaggacggtgccccggtgcccgccctgcgacagcatgcccagaagcagcagaaggagaagacccgctggctcaatacgcccaacacctacctgcgggtcaatgtggccgatgaggtccagaggagcatgggcagcccccgacccaagaccacgtggatgaaggctgacgaggtggagaaatccagcagtggcatgccgattcgcatcgaaaacccaaaccaatttgtgcctctctatactgacccccaggaagtactggagatgaggaacaagattcgagaacaaaaccgacaagatgtgaagtcagcggggcctcagtcccagctcctggcgagcgtcattgccgagaagagccgaagcccggtagagcagaggctgcccctgactggcggggaaacgtgtttgccttcggggtcttctgtgcctggggctgggttgcaggacccctgagtcctcatacccaccttcccctgtgatcttgggtgccggtgctcttgctgcaaaatggaggccaacctcacaggggtgctgtgaggaccagggaggacaatgtctgatggcccctgtgggcactgggctggagaacagcagcccagcctgcctgcaggagtgatgcggccggcttccgtacctcctgccatggaactccactctgtcctcccttactaccccgtgaagtggggactcataggcttggggctggagactcccaggtgccccaggtgtgcccagccctgagagtctctgacctctgagcctggtatgacatcatccaaccagagctctggaaagatgatcatgtacccatagagaaggggtatatagacaggacccatgctcctacaggatgggaagggacaatattacccacacaaacccacattgagttagaaagtattgtaattgtttttgtgcttgagatagaacagtgttttgtctagtgcttagcaaaaggggtgaagttcagaattctggcatgtgtttgaaatcactgctgctccttgcaaggtagcaatgggcatgacattttccttagcagtaaaaattggggaaatacaggaaatgttcctctctgcagggcaaattgtgatgatgcaatgatttcaggtcaagactgcagcccacagggtgggtgcccattggcaggagaagtgtgaaagttgtatcatcacacttacctccccccaaccccaactcagccaagatggggaacactgaatatcccgcagggtcaagtatagaaatagccatgttctggcgggaggtgagagttcattacaatgagcaacactgttaaaaaaacaaacaaaaatctcccctgccatttataccaagtgctcttctcggagtccctcttcttgggtttttggtcttggattctcggttgactccatgattccctacattaggcctactgtggcctcccttttggaaggggcccaggggcagaagacctggcgggccagggcagggaggactggcagcctccaggctcacctccctttggcttcactctctttgctcctcagcttcagagcactgcatcctcaaaggccaagatgaggatgctgaattaggaaaaaaggctgtggagtctgaattttagttcctatcttgggctagaggggtcaaagaattcctgaagcttatgtaagggccggctggtcagctccctagaaccacgggctccacagaggtggcaaaacccagtgattttgccagtatccctgcagggacctgcggtacaggcaggttgaagatctgagactcaggaaccttggcccctttgtcacttacaactgtgtgtgaaacaggactaacagtttggactgagagcactgaagctgctgtgtgttgtgcatataacttaatgctgtgtgttgtggcttgcactgctgtgggggcggggagggcagtggtggggaatggctggcatgaagcttgcttgagccaatgctatgcttgctgggctttggctgactggctttgggccaccaactgtatttgcatagtgatggcttggaagtgtccatagaagggattgcaataaaggtgtgtcttccttctgctcgggaaaaaaaaaaa

SEQ ID NO: 5141 - DNA, 2431 bp, Homo sapiens; identical to SEQ ID NO: 1621

SEQ ID NO: 5142 - DNA, 3440 bp, Homo sapiens; identical to SEQ ID NO: 143

SEQ ID NO: 5143 - DNA, 8689 bp, Homo sapiens; identical to SEQ ID NO: 2333

SEQ ID NO: 5144 - DNA, 8374 bp, Homo sapiens
gcgctggaggagggaggcggaaggacagcgctgcgccaccacccggaggagggagcgcggtagctgcaggcaggggagggagaggaaagaaaaggaaggacggctcccagacagagagtgggagaaaccggggagcagcgggagcagcaggtccggggggagctgttccgctgcgctgccctcgttattcacacggacgctgcggagcttcccagggctgcttccctgtccccctgggtggaggctgccgtctaaacctgactccagagtttaagatgcaatggccagaagacatgaacgtgtcactagaaggatgtggacatgggctccgggactgttgatgatgactgtggtgttttggggtcatcaggggaatggacaaggccaaggatcgcgtcttcgccaggaggactttcccccgcggattgtggagcatccttccgatgtcatcgtctctaagggcgagcccacgactctgaactgcaaggcggagggccggccaacgcccaccattgagtggtacaaagatggggagcgagtggagactgacaaggacgatccccggtcccacaggatgcttctgcccagcggatccttattcttcttgcgcatcgtgcacgggcgcaggagtaaacctgatgaaggaagctacgtttgtgttgcgaggaactatcttggtgaagcagtgagtcgaaatgcgtctctggaagtggcattgttacgagatgacttccgacaaaaccccacagatgttgtagtggcagctggagagcctgcaatcctggagtgccagcctccccggggacacccagaacccaccatctactggaaaaaagacaaagttcgaattgatgacaaggaagaaagaataagtatccgtggtggaaaactgatgatctccaataccaggaaaagtgatgcagggatgtatacttgtgttggtaccaatatggtgggagaaagggacagtgacccagcagagctgactgtctttgaacgacccacatttctcaggaggccaattaaccaggtggtactggaggaagaagctgtagaatttcgttgtcaagtccaaggagatcctcaaccaactgtgaggtggaaaaaggatgatgcagacttgccaagaggaaggtatgacatcaaagacgattacacactaagaattaaaaagaccatgagtacagatgaaggcacctatatgtgtattgctgagaatcgggttggaaaaatggaagcctctgctacactcaccgtccgagctcccccacagtttgtggttcggccaagagatcagattgttgctcaaggtcgaacagtgacatttccctgtgaaactaaaggaaacccacagccagctgttttttggcagaaagaaggcagccagaacctacttttcccaaaccaaccccagcagcccaacagtagatgctcagtgtcaccaactggagacctcacaatcaccaacattcaacgttccgacgcgggttactacatctgccaggctttaactgtggcaggaagcattttagcaaaagctcaactggaggttactgatgttttgacagatagacctccacctataattctacaaggcccagccaaccaaacgctggcagtggatggtacagcgttactgaaatgtaaagccactggtgatcctcttcctgtaattagctggttaaaggagggatttacttttccgggtagagatccaagagcaacaattcaagagcaaggcacactgcagattaagaatttacggatttctgatactggcacttatacttgtgtggctacaagttcaagtggagagacttcctggagtgcagtgctggatgtgacagagtctggagcaacaatcagtaaaaactatgatttaagtgacctgccagggccaccatccaaaccgcaggtcactgatgttactaagaacagtgtcaccttgtcctggcagccaggtacccctggaacccttccagcaagtgcatatatcattgaggctttcagccaatcagtgagcaacagctggcagaccgtggcaaaccatgtaaagaccaccctctatactgtaagaggactgcggcccaatacaatctacttattcatggtcagagcgatcaacccccaaggtctcagtgacccaagtcccatgtcagatcctgtgcgcacacaagatatcagcccaccagcacaaggagtggaccacaggcaagtgcagaaagagctaggagatgtccttgtccgtcttcataatccagttgtgctgactcccaccacggttcaggtcacatggacggttgatcgccaaccccagtttatccaaggctaccgagtgatgtatcgtcagacttcaggtctgcaggcgacatcttcgtggcagaatttagatgccaaagtcccgactgaacgaagtgctgtcttagtcaacctgaaaaagggggtgacttatgaaattaaagtacggccatattttaatgagttccaaggaatggatagtgaatctaaaacggttcgtactactgaagaagccccaagtgccccaccacagtctgtcactgtactgacagttggaagctacaatagcacaagtattagtgtttcctgggatcctcctcctccagatcaccagaatggaattatccaagaatacaagatctggtgtctaggaaatgaaacgcgattccatatcaacaaaactgtggatgcagccattcggtccgtaataattggtggattattcccaggtattcaataccgggtagaggttgcagctagtaccagtgcaggggttggagtaaagagtgagccacagccaataataatcgggagacgcaatgaagttgtcattactgaaaacaataacagcataactgagcaaatcactgatgtggtgaagcaaccagcctttatagctggtattggtggtgcctgctgggtaattctgatgggttttagcatatggttgtattggcgaagaaagaagaggaagggactcagtaattatgctgttacgtttcaaagaggagatggaggactaatgagcaatggaagccgtccaggtcttctcaatgctggtgatcccagctatccatggcttgctgattcttggccagccacgagcttgccagtaaataatagcaacagtggcccaaatgagattggaaattttggccgtggagatgtgctgccaccagttccaggccaaggggataaaacagcaacgatgctctcagatggagccatttatagtagcattgacttcactaccaaaaccagttacaacagttccagccaaataacacaggctaccccatatgccacgacacagatcttgcattccaacagcatacatgaattggctgtcgatctgcctgatccacaatggaaaagctcaattcagcaaaaaacagatctgatgggatttggttattctctacctgatcagaacaaaggtaacaatggtgggaaaggtggaaaaaagaagaaaaataaaaactcttctaaaccacagaaaaacaatggatccacttgggccaatgtccctctacctccccccccagtccagccccttcctggcacggagctggaacactatgcagtggaacaacaagaaaatggctatgacagtgatagctggtgcccaccattgccagtacaaacttacttacaccaaggtctggaagatgaactggaagaagatgatgatagggtcccaacacctcctgttcgaggcgtggcttcttctcctgctatctcctttggacagcagtccactgcaactcttactccatccccacgggaagagatgcaacccatgctgcaggctcacctggatgagttgacaagagcctatcagtttgatatagcaaaacaaacatggcacattcaaagcaataatcaacctccacagcctccagttccaccgttaggttatgtgtctggagccttgatttctgatttggaaacggatgttgcagatgatgatgccgacgacgaagaggaagctttagaaatccccaggcccctgagagcactggaccagactcctggatccagcatggacaatctagacagctctgtgacaggaaaagcctttacctcctctcaaagacctcgacctaccagcccattttctactgacagtaacaccagtgcagccctgagtcaaagtcagaggcctcggcccactaaaaaacacaagggagggcggatggaccaacaaccagcattgcctcatcgaagggaaggaatgacagatgaggaggccttggtgccctatagcaagcccagtttcccatctccaggtggccacagctcatcaggaacagcttcttctaagggatccactggacctaggaaaaccgaggtgttgagagcaggccaccagcgcaatgccagcgaccttcttgacataggatatatgggctccaacagtcaaggacagtttacaggtgaattatagtaaatgagaggagacatacaaagctgctctgaaggaccatcaggtccggactcatggaagtgatgactctaaacagtgcaatgaacaatttatttatgtactattaaaagaactgtaaatgcaatgtaaagacacacagccacacatatcccacagatattttcattgtgttcttctcttaagtacaccacccaccttaactctttcttgtcaggagtatataaaaaagaaagaaaacaaaactcgccctacaggaagaaaaggattctcctctgtatataatttcttttgtgcattgctatgcaagctcactctttttagctctgctcatattattgtctgttcttattggtctgttgtactatatgtgaattaataggctgtggtgccatatattaacttttaattgtgtaacttttatgtttaaattttgcactgcaattttatttggtgataagcacaaatctctactcctcatgacatgaagaaaaagactgaatgtgaagggagtttctgtactgtaagctagattggataatgatggctgtaacaaatcatgttagatggttttcagttggggtgtagaaataggaagatgcaaaggaacaatggtgttggcaaagtcttctttgaatatcagggactgagtcaataaaaaaaatagtagaaaggtggcttttactattgacaaaagccggggtcaaaaaaagtagtttaagtcttaagactgaatatgcattaaagtatgcaggtagcaaagatgtaataaatttgcttaaaaaaagaaattaaagttttatttagaatcaattttacctgtcattgtaattgacccatctgagaattacaataagcaagaggaaattaaggtgttttgcaagagctgtatttatattacagttttttaaaaacattttctgaattatcgtaattaagctctccaactcgttaagtcagaatataatatgaagttccccaaggaaacgaacaaaatgaactctagaatatctagcaaatagttaaagaagcaatttattattagggcatactcgggctgtttccaaatataaactctattgcaatatcttatttcatctttctaatacatgtacagtgcacactagaggatagagctgcatcacttaaattcatgacttaaaaaataatacagtttatatacaacttgttttttatttgattaagaagtgaagtttacgccacccaatgtatagccaaattgtacgtgcttaaaaaacagtgccgagagtatgttcagttcgcagtaagtagatttattggaataaatattctatggtacattctcagaaattggcttccaactaaaatacgtttgacccattttgaataaggaaattgaaaagaaaaatttaaaaggagaaaaaaatgcatgtttataaactttttaaataaaaccagaccttgtaagtggacattaataattgtcctgcctcatttgttttcacgactttgacaacaagaagttcctgaacattagtcatgtatgctcagaataaatgtgactttgaaatatatgttagctactgtacatgtatagtcagtcaagtagaagaggaccttcctgaaattcccacttgtgacattttcccatgggtttcctacacaatcttaaattttatttctgtctatactttctcaaatttttcctatgataagttcagttgttggtactcttctaaaaatattcaacgtgattaggatcagttctaaaatacgggacccctttgagtgacaattcgcactccatgcattattggctcagtagccaatttttgtcacgtcgttataacaaggagatgacataattaaacatttccatcctttctattccctgagactgcatcagcacaggcaagtatagaatgtaatgttcttcatgggccccaccagctttttggtgccatgtaatttatttcttcgctgaagagaaaaagaattctgagacacagttattaaaccctttatcaactttctaccatcagtgcctgaattctaatgcagtgtgatttctctgggacaaagagactgaggaagatgaaaagtttcttcaaagagtgaatacatacttattcacaactctaggatgtgaggactttaaatatctctttatgaagttccctgcctaacctctttctatttaaaggcaaacaaatttcgaagaggttttgtgttccctctttatgtttctctatgacccagtttagtctaaaaccttagttcattacatatacaacacatagcctttgatccctggtaactggcaggtgttggtgattaataaaccaaggcttcaaagtgaagtatgtgtgtgcagatgacttttggaataacgtgggcatagcatcataccttcctgattgtcttcagcatataaaaattaactgttgtagttaaaattatgtcagtgcagagcttgtggttacttggaatgttctttcagaatagtccatgttgcctattaaacctagttttaaacacattgggcagtcaatttatgcacccaaaatatcaccctcaggtagattgagggcaagataaaatgctgtatgtagctatacaaaggaattcagaaacattactggaaagcaaagcctttgtcagcttgctactgacaaagtagtaaaaagctactaatcagtgttgagtcagatgtcaacagaaaaatacaaatacctatgagagccacagcagtttctcgtttcatagccgattcaatgaatatgattagaaattcactgagctcactcttgcaggtttaaatggaggcctgcataaggactgcaagaggaaatctgggtgggagagaatgtaatctgatcttgcactcataggcaatgctgcaatgcaatcatgtccaatacaagcacagcttcattcataacaggaaacgtcttctttgggaaaatagctctattggtgcccaaactcaggtatgccagtgtatgcaggtggagtcgccctacccctcttccaaacatgtcctgtgagatttttaaaataagatgggatagtacaggggcatgaaaagaattgattccttcacaggatttgaatccagttcaagggagaatgtagaaaattcaaaaccaacatataaggtatcacacaaccaagaaaagtaaaaccattgcaagtttacttgcgttgagtacaaaacagatttaatggtgttctatgtcatagtttaatgctctgggtatttaaatatgttttcaacaggatttgagttgaaagtttgtaatgtgctttgatggaacacctctcaatttctattcaataaacttatgtaattgtccattgacaatataatgataacagtaccattgaactctaaactgtggtttatcttcactactgggaagcaactgtgcatcagtattaaagatatgcagaaacataatattcactaatttgttcatctgcttctgtatattgtttatggaattacatggcaagaactgttctaaagcaacatgtctttccacattattttagaggtgaaattacttttgttttgcttctctataatgtgtacttcaaatgaaacaccatacttttttctaaaaaaagatgttcaatttactaatttttttaaatctcataatttaaaaagcatttgttgtgattttaaagtgttgcaagaaaagggattttgtggccgtgggtagactttttatactttgttttatagatggattttttttaactgtagtttgtttaagtcaccaagcagcatccaaaatcttaatgtgtttcatttgatgttgttagatcagagaagaaattggcataaaatcggttaatagtattgtcaaagaattgtgtattgtgtactcactgggaaaaaataaaatatattcacatttcaaa

SEQ ID NO: 5145 - DNA, 8507 bp, Homo sapiens
gggctgtaaccttgaactttcccagcgcggtgacacattctccccgctctccctcccgcccgcccgctcgccctcctgcgccctcccgcgcccccctccccgccttttttgaaaaagcattttaccaccaaccaccaccccaatccaacccacaccgaaccttcgcgcaccccctacaccccaacaacaacaacaactgcaaaatagaaaacaaatccccaaacccaggcgaaaagcagccaacaccggcggcggcggcggcctcggcaagcacggccagcgcgctcggactgcaagagggttaaaagtgtagattggatttcacccctggaaatctagcacgccgagtgaacttgaatctttggctatttaaggaggactgggtttgttgtgaagttgcggtgatccagcgcagagccccgtcctgattgatcgcatcgcggggctcagatgactgtaaaatgaatagatgaaattcttgcttctcgaagattttcttgggcatctcccggaaagtgcgttttaaggcgaagtcatgatgtattctcccatctgtctcactcaggatgaatttcacccattcatcgaggcacttcttccacatgtccgtgcaattgcctatacttggttcaacctgcaggctcgaaaacgcaagtactttaaaaagcatgagaagcgaatgtcaaaggatgaagaaagagcagtcaaagatgagcttctcagtgaaaagcctgaaatcaaacagaagtgggcatccaggctccttgccaaactgcgcaaagatattcgccaggagtatcgagaggactttgtgctcaccgtgactggcaagaagcacccgtgctgtgtcttatccaatcccgaccagaagggtaagattaggagaatcgactgcctgcgacaggcagacaaagtctggcgtctggatctagtcatggtgatcctgttcaaaggcatccccttggaaagtaccgatggagagcggctcatgaaatccccacattgcacaaacccagcactttgtgtccagccacatcatatcacagtatcagttaaggagcttgatttgtttttggcatactacgtgcaggagcaagattctggacaatcaggaagtccaagccacaatgatcctgccaagaatcctccaggttaccttgaggatagttttgtaaaatctggagtcttcaatgtatcagaacttgtaagagtatccagaacgcccataacccagggaactggagtcaacttcccaattggagaaatcccaagccaaccatactatcatgacatgaactcgggggtcaatcttcagaggtctctgtcttctccaccaagcagcaaaagacccaaaactatatccatagatgaaaatatggaaccaagtcctacaggagacttttacccctctccaagttcaccagctgctggaagtcgaacatggcacgaaagagatcaagatatgtcttctccgactactatgaagaagcctgaaaagccattgttcagctctgcatctccacaggattcttccccaagactgagcactttcccccagcaccaccatcccggaatacctggagttgcacacagtgtcatctcaactcgaactccacctccaccttcaccgttgccatttccaacacaagctatccttcctccagccccatcgagctacttttctcatccaacaatcagatatcctccccacctgaatcctcaggatactctgaagaactatgtaccttcttatgacccatccagtccacaaaccagccagcctaacggcagtggtcaagtagtagggaaagtgcctggccatttcactcctgtcttggcaccctctccccatcccagtgcagtgcgacctgtgaccctgagcatgacagatactaaacccatcactacatccactgaagcctacacagcctcaggcacatctcaagccaatcgatatgtgggactaagcccaagagacccatccttcctacatcagcaacagtcctggtacctgggctagcttggttcctttccaagtgtcaaataggacacccatcttaccggccaatgtccaaaattacggtttgaacataattggagaacctttccttcaagcagaaacaagcaactgagggaaaaagaaacacaacaatagtttaagaaattttttttttaaataaaaaaaaaggaaaagaggaagactggacaaaacaacacaaaggcagaaaggaaagaaactgaagaaagaagataatagaccagcaattgcagcacttacaatcactaattcccttaaggttgaaactgtaatgacataaaaagggtcgatgatatttcactgatggtagatcgcagcccctgcaacgtagcctttgttacatgaagtccgctgggaaatagatgttctgtctctatgacaatatattttaactgactttctagatgccttaatatttgcatgataagctagttttattggtttagtattcttgttgtttacgcatggaatcactattcctggttatctcaccaacgaaggctaggaggcggcgtcagaggtgctgggtgacagagccatgagccagccattttataagcactctgatttctaaaagttaaaaaaaatatatgaaatctctgtagcctttagttatcagtacagatttattaaatttcggcccttaacccagccttttccagtgtgtaacccagtttgaaatcttaaaaaaagaaaaaatgaaaaaaaaaggaaaaaaagaaaaaaggaaaaaaacagtttgaacacaaaggctctatggaagaaatgcctctatgtaggtgaagtgttctctctgcatgcaacagtaaaaattaatataatattttccccacaaaagaaacacttaacagaggcaagtgcaatttataaatttatatctaaaggggaatcatgattataagtccttcagcccttggactctaaattgaggggattaaaaagaatttaaaataattttgaacgaatttattttcccctcagtttttgagggcattaaaaaggcattaaatcaagacaaatcatgtgcttgagaaaaataaaattaatgaaaacacagcacttatgttggtttagctgcagcctccttggaggtagaatttatttatttaaaattactggttgcatcaagaacccatagggtgtacaaaaggttctataaaatctgcattatagagacaaagaggcaggcaaatccatgtcacaagggtaaagcttacagtttacaaactgggaacgccagggtgtaggatataaaaacgcactcttgagaaaacaaatgtaatcagggtgctgaaaacttgcatggtgctttcagacattagccttgttcaacaaatttcttgtattgacagatccatagtgtgcatgggcagacacattttgcctctatgtctcttaaaattttaattaaaaatactctttccagtaatcctaatttgcacgaagatataatgtccacattacgtgccttgccttgaaatctaaaaaacaaaaaacaaaaaaaaaaaaacaaaaaaatacaacaaagtgacatcactacacttgttttgctgcatttattatcattttaaatctttaccatttttatgacaaaatattttgtactccagacgaagaaaaatgtgtgacatcatggattttttagacagttatacctttatctcacatttataaagcatatcatggctgtgtatagttgccgcttaaaaattgtaatcgaccagcaatattttcagtattttggtgtttttttctattaacctttcatgtttttcatcttccaattaatatttgggggggaggggtttcaaatttatacgaattatgcaataccaagttttgcctatgtaggtagtgcttttagctgtattggttattataggtaagtacacagatttaaaaaaaaaataatgtatgcttttttgtttgtttgtttgttttaattgaccaaagtgggtactgctatttttgcagtgtgatgaggtccttttgtgtactgagagatggacaggggattttttttaatatacatatatatatattctggggtgggtgggaggatttttaacactttgcagtgtagctgtgaagcagtgcaccctgagatgggcctgggctgcaaagcgactgttctgcctactgtgacaaacttcaacttacacaggttcccctctctaacttcccacctgggttgcaagctgaactcattactggttttcataacaacacaatagtaagaacaagcaaacacaacaaattctcctggaggcagacttggcttaaaaaggcagacttggcttggtgatagtttttcttgaaagttccagatccacagtggagagtgagcctgtctcatatttggcaaaaatatttgttgaaatgtccacataggggatgttggatgtttaacacttttgagagtttaacacatgaatattctttctcctagaaaacacattagacctgttggagggagtctcccgtattccttttctgccacttttcgtccccatttcatttcattaatgataggatatgatttacctgtgacttactacttcaaatggatggcagtgcacttggatttttttttaatatccagaagattgaacagagggttgctattgttgaatgtatttggactgatagattaaaatcaaagttcaatttttaaggaacaaaaaagtaaatcctgttttcattttatctccccttttaaaactgagaaccagagcagaagggaaatatagaattttaagcaattaatcttcctgtggatgaattaaacccattagatgctgatgggatttttttaaggaatggtaccttaactatatatttgatttcgtttcccctgagggctagaggctgaatggaggctggttttattttgcctttccctcaccgcccagtcccattgagtgtattcattactagaaggaaaatctttcagaattggtgacacatggtaggctgtcttaaggagtcccctggcccccttcccctaggccatggcctaataaaataaactgtcaattgttctcacagcatatcatttaataatgaatactttagaacaatgcttatgggctggagaattgtatttgattagcccattcagtttgatagcccaaatgctgaacagcacagcgggatcctagcagtgcaagttcaaaagtaagtccaatcatttctgtgatactcgccctggtagcaaacagatcatctcagccaagctcttcatgtatctttgacctattaggtgaacaaatgaacctcacaggacacacagtattttttaaaggcagactcgctctcttttttgccagtgagcagttctagctaaccaagttacacactgtgggtattcctgcctgcctcttgaatacaaaggcctagttcaagtgttgctttttttatttcaaatcaattttttcttctttcctttttgagataaaactattaaaagtactactatatatataaaatctcaaatcaacttttcggcctcctcctcgtgtaccaggaagtatattctgacgaagggccccacttttgcaggtcttgcacgcccctcccttacccagaactgcagagcttcaggatggcgaaggtcacccaagggcatgagtagggagtggtgtctccaaccatcagttccgtggcactgttcagcctttgtgtgctgccctgccacccaccactcacagtgcctctgaagcgtgttacccctggagtgacgtgagcatttgaggcttgtctaaggaaaaaaataaaaggcagtgaaggagactgtacataaagacatggcaaaaatcttaattatagcaatatagttatcgggtaatgttcgggtgggcagctccattaaaaaatatgtgaatgaatctgtgaagctgcaagtagcgagaagagcgaaaggtcttcttaatgaaccgcctaccttgtagacagtaatttgtacactgtatagttttgttaagaattttttttaaattaaaattcccatgtttgtaaagctaactttttaacaattataatggaactatatgttgtttccatttttaaagtaaacaagaatattccttgtttagagactggacttgagttaaaactctccagtctcttaagttatgtattaaaaagaaaatctgtccatgttaggagttatttcacagattcctgtgcttgaaaagcataggatactaatcctttaaaaaagtgtaaatggagaaaagttatattttatgaaggttattttgttgtatttagtattggaaaagttggtttccagagcatttcagaatgtcgaagcaccactgtctttttattagtatatacggcctttagcaaaagtttttgtgattgttacgtgatggtatttaaggttaagtttcacagagcattcaggataggcagaaaactaaaacagtgctatgtctcacataacgtgtcctcagggagcagaatcttggatttgtgacttgtagcttcataaggactcaacgaaagagattgcacagggacatcttcagcggtgtgacagcaggacatgttctttacctagattcaaattctatgtactgtgtgaaatgatgaaggctgcagaaagttatcccatattcagtgtacagtattcatttttaatgaaacaactctacaatattgctggcagataggccccaagcatgacattcaatatagtttacatgttcctgtcaaggtcttttgttaacattaaccagctgcatgctttctggactttaagaaattgggtttctatagaaaactttttttttttttttttttttaatgtgcaggctattcaagttcaatagtaaaagctcaaaaatgaatgttctactccatgctgaaggagctgaaagctgccttcttcatattttgcactttctggtagttcccctgttttttctaattccctaaaattgtgtgggtggagtggagccctgcagttggggggtaacatggaccactgattttgccctttgaccctgcacaatgacctttgcatcagccaaactcattgccatgacaactctttgtactgtgtccgtgccacagatctgttggtcacattgttaatagtaaaggggacaagttggagacggtcaatttttacattttttgttgcaattttttcttcaatggttgtaagtagtttttttttttttttaataataaaagggttcactagttaatactctagaaatatctgtgtgttgcaattcaaatgtatgttgagattgtgaaaagcgcttcagtgccactagcttaccggtacactagactaagcccttgatgacttattgcatgatacagtaccaggaacaacaggtggcctaaatacatgaaaagcagtgtaagctagtgacactaaagccagtcttgtattactgtatttttgacagaatggttttgaaaactgtgctacagggactgatgtggcaaatatatctctttatgcagaaggaagtctttttttttcttttttttttttttaagaagtatggctttttatgcatccttcatcgagggcattgaagttgcatggactgataaaagttgatgcaaaacaagaaagaaacaaacaaaaaaaaaaaaccagcaaaatgtttaccaaaaaactcaaacaaatgagcagtgcctgttcaatttcacagtctctgttgagttcagttgtaaatatgtttcaaatgacattttcttgggaaaaaaaatctctacaacattgtagaatgtgaggggtaactacatcccaggcataggtttctcaaagctgcagtagattatgtcttcatcaagctgttaatttgtgcttatatcatatagaacttttagcatcctgggaagagctgcccccacctcaatgatatttctctgagaacaacttttgtaggactgtgtgtttctttagatacatttagtacaactgtaggtgacgagtagtcagttattgcttgctagctacacaccagggttgatccattttaaaacttttggcattttgtcctcatgggccataaatacagaaccttgtattttaattaaatttttttacaaaaggaggcacatgcacaatctccatgtaacaaacctttagcagtaggatgtattatacgacagttacttaatttctagagttcaggcctctgggatcaaccccagactgggccagaatgttagtgaaggttttattgtgcccggttggaggataacgttctttgggtactttttgtgggttgcaaatgaactcaattgccacaagttttaaactggtgtaaatcaagcttgacttaatgtgattgttactgttatatccagcctatactgctagcagctgctcatactgcagtcaattactggaagcggatatatttcctatgcaaaaactgtttaaacaataaaatgagctatgctacagactctgaaaaaaaaaaaaaaaaaaaaa

SEQ ID NO: 5146 - DNA, 8285 bp, Homo sapiens; identical to SEQ ID NO: 784

SEQ ID NO: 5147 - DNA, 8180 bp, Homo sapiens
tattgggcagtacaggtctagatgatcaaatgcctacactgaatgacttcatagaatatcactgttgagctgacaccgatctaaaagattcacatgtcggagcaagactgttagtggagtaaactcctcgagtgtacaggacccctttgttcttgttctattttgtttttaacagcttgctctgctccataaagatccatcagtcaccctcaaactcttcggaccttctgcctgttcattcctatgaagctgcgtttgctaaggtactcggtgacctggagcaaacattctaaaacagcgcaaatggcagaagcagagcctacaggcttcttgtcgggaatccgttcggagtatggaaagaatcccagtgtctgtggacttctgggttgtctgctgtgcagttctgaaatgtaaccctgggattcctaaaagaatgtcaactctgtgctttggattttctgatgaatttcacccattcatcgaggcacttcttccacatgtccgtgcaattgcctatacttggttcaacctgcaggctcgaaaacgcaagtactttaaaaagcatgagaagcgaatgtcaaaggatgaagaaagagcagtcaaagatgagcttctcagtgaaaagcctgaaatcaaacagaagtgggcatccaggctccttgccaaactgcgcaaagatattcgccaggagtatcgagaggactttgtgctcaccgtgactggcaagaagcacccgtgctgtgtcttatccaatcccgaccagaagggtaagattaggagaatcgactgcctgcgacaggcagacaaagtctggcgtctggatctagtcatggtgatcctgttcaaaggcatccccttggaaagtaccgatggagagcggctcatgaaatccccacattgcacaaacccagcactttgtgtccagccacatcatatcacagtatcagttaaggagcttgatttgtttttggcatactacgtgcaggagcaagattctggacaatcaggaagtccaagccacaatgatcctgccaagaatcctccaggttaccttgaggatagttttgtaaaatctggagtcttcaatgtatcagaacttgtaagagtatccagaacgcccataacccagggaactggagtcaacttcccaattggagaaatcccaagccaaccatactatcatgacatgaactcgggggtcaatcttcagaggtctctgtcttctccaccaagcagcaaaagacccaaaactatatccatagatgaaaatatggaaccaagtcctacaggagacttttacccctctccaagttcaccagctgctggaagtcgaacatggcacgaaagagatcaagatatgtcttctccgactactatgaagaagcctgaaaagccattgttcagctctgcatctccacaggattcttccccaagactgagcactttcccccagcaccaccatcccggaatacctggagttgcacacagtgtcatctcaactcgaactccacctccaccttcaccgttgccatttccaacacaagctatccttcctccagccccatcgagctacttttctcatccaacaatcagatatcctccccacctgaatcctcaggatactctgaagaactatgtaccttcttatgacccatccagtccacaaaccagccagtcctggtacctgggctagcttggttcctttccaagtgtcaaataggacacccatcttaccggccaatgtccaaaattacggtttgaacataattggagaacctttccttcaagcagaaacaagcaactgagggaaaaagaaacacaacaatagtttaagaaattttttttttaaataaaaaaaaaggaaaagaggaagactggacaaaacaacacaaaggcagaaaggaaagaaactgaagaaagaagataatagaccagcaattgcagcacttacaatcactaattcccttaaggttgaaactgtaatgacataaaaagggtcgatgatatttcactgatggtagatcgcagcccctgcaacgtagcctttgttacatgaagtccgctgggaaatagatgttctgtctctatgacaatatattttaactgactttctagatgccttaatatttgcatgataagctagttttattggtttagtattcttgttgtttacgcatggaatcactattcctggttatctcaccaacgaaggctaggaggcggcgtcagaggtgctgggtgacagagccatgagccagccattttataagcactctgatttctaaaagttaaaaaaaatatatgaaatctctgtagcctttagttatcagtacagatttattaaatttcggcccttaacccagccttttccagtgtgtaacccagtttgaaatcttaaaaaaagaaaaaatgaaaaaaaaaggaaaaaaagaaaaaaggaaaaaaacagtttgaacacaaaggctctatggaagaaatgcctctatgtaggtgaagtgttctctctgcatgcaacagtaaaaattaatataatattttccccacaaaagaaacacttaacagaggcaagtgcaatttataaatttatatctaaaggggaatcatgattataagtccttcagcccttggactctaaattgaggggattaaaaagaatttaaaataattttgaacgaatttattttcccctcagtttttgagggcattaaaaaggcattaaatcaagacaaatcatgtgcttgagaaaaataaaattaatgaaaacacagcacttatgttggtttagctgcagcctccttggaggtagaatttatttatttaaaattactggttgcatcaagaacccatagggtgtacaaaaggttctataaaatctgcattatagagacaaagaggcaggcaaatccatgtcacaagggtaaagcttacagtttacaaactgggaacgccagggtgtaggatataaaaacgcactcttgagaaaacaaatgtaatcagggtgctgaaaacttgcatggtgctttcagacattagccttgttcaacaaatttcttgtattgacagatccatagtgtgcatgggcagacacattttgcctctatgtctcttaaaattttaattaaaaatactctttccagtaatcctaatttgcacgaagatataatgtccacattacgtgccttgccttgaaatctaaaaaacaaaaaacaaaaaaaaaaaaacaaaaaaatacaacaaagtgacatcactacacttgttttgctgcatttattatcattttaaatctttaccatttttatgacaaaatattttgtactccagacgaagaaaaatgtgtgacatcatggattttttagacagttatacctttatctcacatttataaagcatatcatggctgtgtatagttgccgcttaaaaattgtaatcgaccagcaatattttcagtattttggtgtttttttctattaacctttcatgtttttcatcttccaattaatatttgggggggaggggtttcaaatttatacgaattatgcaataccaagttttgcctatgtaggtagtgcttttagctgtattggttattataggtaagtacacagatttaaaaaaaaaataatgtatgcttttttgtttgtttgtttgttttaattgaccaaagtgggtactgctatttttgcagtgtgatgaggtccttttgtgtactgagagatggacaggggattttttttaatatacatatatatatattctggggtgggtgggaggatttttaacactttgcagtgtagctgtgaagcagtgcaccctgagatgggcctgggctgcaaagcgactgttctgcctactgtgacaaacttcaacttacacaggttcccctctctaacttcccacctgggttgcaagctgaactcattactggttttcataacaacacaatagtaagaacaagcaaacacaacaaattctcctggaggcagacttggcttaaaaaggcagacttggcttggtgatagtttttcttgaaagttccagatccacagtggagagtgagcctgtctcatatttggcaaaaatatttgttgaaatgtccacataggggatgttggatgtttaacacttttgagagtttaacacatgaatattctttctcctagaaaacacattagacctgttggagggagtctcccgtattccttttctgccacttttcgtccccatttcatttcattaatgataggatatgatttacctgtgacttactacttcaaatggatggcagtgcacttggatttttttttaatatccagaagattgaacagagggttgctattgttgaatgtatttggactgatagattaaaatcaaagttcaatttttaaggaacaaaaaagtaaatcctgttttcattttatctccccttttaaaactgagaaccagagcagaagggaaatatagaattttaagcaattaatcttcctgtggatgaattaaacccattagatgctgatgggatttttttaaggaatggtaccttaactatatatttgatttcgtttcccctgagggctagaggctgaatggaggctggttttattttgcctttccctcaccgcccagtcccattgagtgtattcattactagaaggaaaatctttcagaattggtgacacatggtaggctgtcttaaggagtcccctggcccccttcccctaggccatggcctaataaaataaactgtcaattgttctcacagcatatcatttaataatgaatactttagaacaatgcttatgggctggagaattgtatttgattagcccattcagtttgatagcccaaatgctgaacagcacagcgggatcctagcagtgcaagttcaaaagtaagtccaatcatttctgtgatactcgccctggtagcaaacagatcatctcagccaagctcttcatgtatctttgacctattaggtgaacaaatgaacctcacaggacacacagtattttttaaaggcagactcgctctcttttttgccagtgagcagttctagctaaccaagttacacactgtgggtattcctgcctgcctcttgaatacaaaggcctagttcaagtgttgctttttttatttcaaatcaattttttcttctttcctttttgagataaaactattaaaagtactactatatatataaaatctcaaatcaacttttcggcctcctcctcgtgtaccaggaagtatattctgacgaagggccccacttttgcaggtcttgcacgcccctcccttacccagaactgcagagcttcaggatggcgaaggtcacccaagggcatgagtagggagtggtgtctccaaccatcagttccgtggcactgttcagcctttgtgtgctgccctgccacccaccactcacagtgcctctgaagcgtgttacccctggagtgacgtgagcatttgaggcttgtctaaggaaaaaaataaaaggcagtgaaggagactgtacataaagacatggcaaaaatcttaattatagcaatatagttatcgggtaatgttcgggtgggcagctccattaaaaaatatgtgaatgaatctgtgaagctgcaagtagcgagaagagcgaaaggtcttcttaatgaaccgcctaccttgtagacagtaatttgtacactgtatagttttgttaagaattttttttaaattaaaattcccatgtttgtaaagctaactttttaacaattataatggaactatatgttgtttccatttttaaagtaaacaagaatattccttgtttagagactggacttgagttaaaactctccagtctcttaagttatgtattaaaaagaaaatctgtccatgttaggagttatttcacagattcctgtgcttgaaaagcataggatactaatcctttaaaaaagtgtaaatggagaaaagttatattttatgaaggttattttgttgtatttagtattggaaaagttggtttccagagcatttcagaatgtcgaagcaccactgtctttttattagtatatacggcctttagcaaaagtttttgtgattgttacgtgatggtatttaaggttaagtttcacagagcattcaggataggcagaaaactaaaacagtgctatgtctcacataacgtgtcctcagggagcagaatcttggatttgtgacttgtagcttcataaggactcaacgaaagagattgcacagggacatcttcagcggtgtgacagcaggacatgttctttacctagattcaaattctatgtactgtgtgaaatgatgaaggctgcagaaagttatcccatattcagtgtacagtattcatttttaatgaaacaactctacaatattgctggcagataggccccaagcatgacattcaatatagtttacatgttcctgtcaaggtcttttgttaacattaaccagctgcatgctttctggactttaagaaattgggtttctatagaaaactttttttttttttttttttttaatgtgcaggctattcaagttcaatagtaaaagctcaaaaatgaatgttctactccatgctgaaggagctgaaagctgccttcttcatattttgcactttctggtagttcccctgttttttctaattccctaaaattgtgtgggtggagtggagccctgcagttggggggtaacatggaccactgattttgccctttgaccctgcacaatgacctttgcatcagccaaactcattgccatgacaactctttgtactgtgtccgtgccacagatctgttggtcacattgttaatagtaaaggggacaagttggagacggtcaatttttacattttttgttgcaattttttcttcaatggttgtaagtagtttttttttttttttaataataaaagggttcactagttaatactctagaaatatctgtgtgttgcaattcaaatgtatgttgagattgtgaaaagcgcttcagtgccactagcttaccggtacactagactaagcccttgatgacttattgcatgatacagtaccaggaacaacaggtggcctaaatacatgaaaagcagtgtaagctagtgacactaaagccagtcttgtattactgtatttttgacagaatggttttgaaaactgtgctacagggactgatgtggcaaatatatctctttatgcagaaggaagtctttttttttcttttttttttttttaagaagtatggctttttatgcatccttcatcgagggcattgaagttgcatggactgataaaagttgatgcaaaacaagaaagaaacaaacaaaaaaaaaaaaccagcaaaatgtttaccaaaaaactcaaacaaatgagcagtgcctgttcaatttcacagtctctgttgagttcagttgtaaatatgtttcaaatgacattttcttgggaaaaaaaatctctacaacattgtagaatgtgaggggtaactacatcccaggcataggtttctcaaagctgcagtagattatgtcttcatcaagctgttaatttgtgcttatatcatatagaacttttagcatcctgggaagagctgcccccacctcaatgatatttctctgagaacaacttttgtaggactgtgtgtttctttagatacatttagtacaactgtaggtgacgagtagtcagttattgcttgctagctacacaccagggttgatccattttaaaacttttggcattttgtcctcatgggccataaatacagaaccttgtattttaattaaatttttttacaaaaggaggcacatgcacaatctccatgtaacaaacctttagcagtaggatgtattatacgacagttacttaatttctagagttcaggcctctgggatcaaccccagactgggccagaatgttagtgaaggttttattgtgcccggttggaggataacgttctttgggtactttttgtgggttgcaaatgaactcaattgccacaagttttaaactggtgtaaatcaagcttgacttaatgtgattgttactgttatatccagcctatactgctagcagctgctcatactgcagtcaattactggaagcggatatatttcctatgcaaaaactgtttaaacaataaaatgagctatgctacagactctgaaaaaaaaaaaaaaaaaaaaa

SEQ ID NO: 5148 - DNA, 5376 bp, Homo sapiens
gggcttcgctcgccgcctcgcgccgagactagaagcgctgcgggaagcagggacagtggagagggcgctgcgctcgggctacccaatgcgtggactatctgccgccgctgttcgtgcaatatgctggagctccagaacagctaaacggagtcgccacaccactgtttgtgctggatcgcagcgctgcctttccttatgaagaagacacaaacttggattctcacttgcatttatcttcagctgctcctatttaatcctctcgtcaaaactgaagggatctgcaggaatcgtgtgactaataatgtaaaagacgtcactaaattggtggcaaatcttccaaaagactacatgataaccctcaaatatgtccccgggatggatgttttgccaagtcattgttggataagcgagatggtagtacaattgtcagacagcttgactgatcttctggacaagttttcaaatatttctgaaggcttgagtaattattccatcatagacaaacttgtgaatatagtggatgaccttgtggagtgcgtgaaagaaaactcatctaaggatctaaaaaaatcattcaagagcccagaacccaggctctttactcctgaagaattctttagaatttttaatagatccattgatgccttcaaggactttgtagtggcatctgaaactagtgattgtgtggtttcttcaacattaagtcctgagaaagggaaggccaaaaatccccctggagactccagcctacactgggcagccatggcattgccagcattgttttctcttataattggctttgcttttggagccttatactggaagaagagacagccaagtcttacaagggcagttgaaaatatacaaattaatgaagaggataatgagataagtatgttgcaagagaaagagagagagtttcaagaagtgtaattgtggcttgtatcaacactgttactttcgtacattggctggtaacagttcatgtttgcttcataaatgaagcagctttaaacaaattcatattctgtctggagtgacagaccacatctttatctgttcttgctacccatgactttatatggatgattcagaaattggaacagaatgttttactgtgaaactggcactgaattaatcatctataaagaagaacttgcatggagcaggactctattttaaggactgcgggacttgggtctcatttagaacttgcagctgatgttggaagagaaagcacgtgtctcagactgcatgtaccatttgcatggctccagaaatgtctaaatgctgaaaaaacacctagctttattcttcagatacaaactgcagcctgtagttatcctggtctctgcaagtagatttcagcttggatagtgagggtaacaatttttctcaaagggatctggaaaaaatgtttaaaactcagtagtgtcagccactgtacagtgtagaaagcagtgggaactgtgattggatttggcaacatgtcagctttatagttgccgattagtgatatgggtctgatttcgatctcttcctgatgtaaaccatgctcacccatatcccactatacaaatgcaaatggttgcctggttccatttatgcaagggagccagtactgaattatgccttggcagaggggagactccaaaagagtcatcgcaggaagaagttaagaacactgaacatcagaacagtctgccaagaaggacattggcatcctgggaaagtccgccttttcccttgaccactatagggtgtataaatcgtgtttgcaaaatgtgttatgatgtgtttatattctaaaactattacagagctatgtaaagggacttaggagaaaatgctgaatgtaagatggtcccatttcaatttccaccatgggagagcctaaaaataaattatgacatttagtatctaaggttagaaaaccacgcccacatgctaatatgggtgttgaaaactaggttacttataatgcaaggaatcaggaaactttagttatttatagtataatcaccattatctgtttaaaggatccatttagttaaaatcgggcactctatattcattaaggtttatgaattaaaaagaaagctttatgtagttatgcatgtcagtttgctatttaaaatgtgtgacagtgtttgtcatattaagagtgaatttggcaggaattcccaagatggacattgtgcttttaaactagaacttgtaagacattatgtgaatatcccttgccaattttttttataataagaaaacatctgactaaagtcaaagaatgatttcttatggtttattttgatgaaagttcttttaacatgtcttgaatgtacacataaaggaatccaaagctttccattctaacttaatctttgtgataacattattgccatgttctacaaccgtaagatgacagttttcaatgtagtgacacaaaagggcatgaaaaactaactgctagctttcctttcatttcaaaagtccaagaatttctagtatatttggattttagcttctgttcaaagcaaatccagatgcaactccagtaagtggcctttgctcttttttgtaccaaagagcccagatgattcctacagtccctttcttctctaacatgctgtggttccttaaatatgagtaatttctctaagatataacccaggtgctttgagaagctgcattaaggtgttcaggccctcagatatcacatggtacacttgattagtaataaaaccagagatcaatttaaattgctgataggtcctgtctcagtgtgtggcattgactgttttcaggaaaatagatacagattaatatgagttatgcgtgtaggttgtgtatagattgagaagatagatacttctcaatctagtagtttgatttatttaaccaatggtttcagtttgcttgagcatatgaaaatcctgcttaatgtgcttaagagtataataaatgtgtacttttgtcctcaaacctagtagctgggttttaacactcatggacatggtcttaatcaatggagttaaataaacaaattcagcaagttattaaatctgacatggtaggagaggggagatgtgtcctgcttattaaatgtgttggtccattgaaagttacatggattgccaatttttaaaacactaaagttgaataaaatgcatgaacaatagaaaaatgctgaacattattttggatgctagctgcttggacattaactgtgttatttctgctttgagatgaaaatatatatttatctttgcttattttatcccagatgtgttctgaatatccttcttcataaatcatggaaaactcactgctgagatagtaaaccatgaaatcgccttttcagttggtgccatgtatctgacagttccatcttggaaggtttcaaaattaccttttaaaatgatctcagaagtctgtagattctcaatgatactgaaagctttgcacctctttggtagaaaccaggtctatttagaaaatggctttatgataaatgttgcctcctgagtgataatgaagtgttcctggatattgtattgtaatttaatgtgcttaccacactgccacattttaatgagtcagagaaaaattaatttttcttcaatacaataatagaacaagtagcctattctcttaaaaagtatgtgaaaagaaaattatgaaaaaatatgcatacctaatgaagtattggttttagtaagaattaaatacatttcattgagctttaaagtactttggagaaactttggggcacgttttcctactctaattcaactaaagttataaataaagagaaaaactcattcagaaatcatggattttaaaaatattttactgcagccaagttttcatttcaaaatgtaatttcagtttggagcttttaggcattatgtatatttaaaaaatatattcttcaaaaatgcattttggcatggtgggatggatgttgcaaaagatatccggagcctccagtctgtcattaactgatatggtaaatcacctctcttctttgggtctcaattttttatttatctatatggtaaactcagagatcactccttaggggtgagtcctattgcaatatgaccgacaaagaagacaaaatagcattgaaactaacccatacaaaatatccaactctggattctgtgaataagtatcttgaccataaaaagtcattgctgttcttgtttctaatgtaaatagtgtccattagtaaaagtgaaattcagtcttaagtagggtgaattggatcaccatttacacaagagatggctttttcctttgcttgaataaacattttggatcacctccaaagaatgaaaaccagtagtacgttttagtcatattagtcaggatgagaaactataagatgtgtgtaacatttggaaatgcaccaaagtgagcgtttaaatcttctcattttattgaaaactaagagcagaaaatgtaaaatgctcatgaaggttttgaatgccaaaagatattttagaatcaatttataaaggggtaattcattaattacactttaaaattggaaagtgggataagaaatctaaagtaaaccagcttatctttgaaacaatattattttgaaattggctttaaaataaaaccattcagattgaaattctaattagctcatttgtggagtttgatcacacaattcataatgttgctgctttccattaactagtcttgaaatgcctttgtttgtaaaaataaaataatggtactttcattttataacaaggtgtttttttcaagaaataatccatgctaaaatggatatttgtgatcctgaaatgtttactaagcattgtaaatttatttataactgccatctccaactacatccttatgatgtttttaacaataaaattaaaacaactgttaaactaaaaaccacaccgttttccagtacttgatctctgagctacaatactcactaaatataattttccaatcaaaatattctattctatattctaagggttaatatgtgattatagtgtccacttgccaccatttttttaaatcaatggacttgaaaagtattaatttagatggatgcgcagatataccctcagttcagtcatagattggagtttgcatataataatgtaaatgtatgtcgacactattctaaatagttctattatgactgaaatttaattaaataaaaaaggttgtaaaatgtgatgtgtatgtgtatatactgtatgtgtactttttaaaataggtgtatgtcccaacccttttttatacaggtttgaatttaaaattacatgatatatacatatactttattgttctaaataaagaattttatgcactctcaaaaaaaaaaaaaaaaaa

SEQ ID NO: 5149 - DNA, 5460 bp, Homo sapiens; identical to SEQ ID NO: 1499

SEQ ID NO: 5150 - DNA, 5468 bp, Homo sapiens
ccagtccagcgcccgccgcccgccaccccggaccccggtgtctggcttcccccgagccgggaccccgcgatggccaagcgcagctcgctgtacatccgcatcgtggaggggaagaaccttcccgccaaggacatcactggcagcagcgacccctactgcatcgtgaaggtggacaatgagcccatcatcaggacagccacagtgtggaagaccctgtgccccttctggggtgaggagtaccaagtgcacctgccgcccaccttccacgctgtggctttctatgtcatggatgaggatgccctcagccgggacgacgttatcggaaaggtctgccttacaagggacaccatagcctctcaccctaagggtttcagcgggtgggcccacctgacggaggtcgaccccgatgaggaggtgcagggcgagatccacctgcggctggaagtgtggccaggggcccgggcctgccggctacgctgctctgtgctggaggccagggatctggccccaaaggaccgcaatggcacatctgaccccttcgtccgagtgcgctacaagggccggacacgggagacctcgatcgtgaagaagtcatgctacccacgctggaatgagacgtttgaatttgagctgcaggagggggccatggaggcgctgtgcgtggaggcctgggactgggaccttgtcagccgaaacgacttcctgggcaaagtggtgattgatgtccagagactgcgggtggtgcagcaggaggagggctggttccggctgcagcccgaccagtccaagagccggcggcatgacgagggcaacctgggctccttgcagctggaggtgcggctgcgggacgagacggtgctgccctccagctactaccagccactggtgcacctgctgtgccacgaggtcaagctgggcatgcagggcccagggcagctgatcccactcatcgaggagacaaccagcaccgagtgtcgccaggacgtggccacgaacctgctcaagctcttcctggggcaggggctggccaaggacttcctggacctgctcttccagctggagctgagtcgcaccagtgagaccaacaccctgttccggagcaactctctggcctcaaagtccatggagtcttttctgaaggtggccgggatgcagtacctgcacggcgtcctgggccccatcatcaacaaggtgtttgaggagaagaagtacgtggagctggaccccagcaaagtggaagttaaggatgtagggtgctccgggctgcaccgcccgcagaccgaggccgaggtgctggagcagagcgcgcagacgctgcgcgcccacctgggggccctgctgagcgcgctcagccgctcggttcgcgcgtgccccgccgtggtgcgcgccaccttccgccagctcttccggcgcgtgcgcgagcgcttccccggcgcccagcacgagaatgtaccgttcatcgccgtcaccagcttcctgtgcctgcgcttcttctctcccgccatcatgtcgcccaagctcttccacctgcgggagcgccacgcggacgcccgcaccagccgcaccctgctcctgttggccaaggcagtccagaacgtgggcaacatggacacgccggcttccagggccaaggaggcttggatggagccgctgcagcccaccgtgcgccagggcgtggcgcagctgaaggacttcatcaccaagctcgtggacatcgaggagaaggacgagctggacctgcagcggacgctgagtttgcaggcgccacctgtgaaggaggggccactcttcatccacaggaccaagggcaagggccccctcatgtcctcctccttcaagaagctctacttctccctcactaccgaggccctcagcttcgcgaagacgcccagctccaagtgtgtgaatgagcttaaccagtggctgtctgcgctgcggaaggtgagcatcaacaacaccggactgctgggctcctaccaccctggcgtcttccgtggggacaagtggagctgctgccaccaaaaagagaagacaggtcagggctgcgataagacccggtcacgggtgaccctgcaggagtggaatgaccctcttgaccatgaccttgaggcccagctcatctaccggcacctgctgggcgtggaggccatgctgtgggagaggcaccgggagctgagcgggggcgcagaggcaggcacggtgcccacgagccctggcaaagtccccgaggactcattggcccggctgctccgggtgctgcaggacctccgcgaggcccatagctccagcccggccggctccccaccctcagagcccaactgcctcctggagctgcagacgtgaggcccgccctacgctccccttgctgagtcccctgccaagcgctcggagcccccccaggacactctgcaccccctcaccccggtcctcctcattagggtgcagggcctaggtctcttccaggtgggggaggggggagagtcaggaataaggggatccccagaagtgcagagctgagcaggcttgggcctgtcatggctggccggaagtgtccccagctccctacagacgctgtagccatcactgcctctccagggaccctcctctcctgcccaggacagacccagccagaaccactgctaggatgggccgcacccaggggtctggcctccagggacctagagaatgggagggagaacggggccccaggagacccggccgccaccccacccgctacccttgggtgccacagggctgtgctgttgccaacagtaaacctgctcttactgtccaggctctggggtcttgtgatgagggtctggggagaaagtgggcccggggggaccccggaggctgtcggtggatgtgccgatgatggggctgacagtatgggctctgggcatccctgttcccccctctttcttccccccactcttctggggtcgggggttcctttcccttcccagttgctgtccctgggtcccctctttcatgtcccacaggccacagagcccagtgtgtccaaccagctgttctctcctcaaagcagcccccaagcaagtcccttctctagggtgtccctgaggacagcacagaggcgggactcagagaccccattcctcttcacgcagcccttaccccaagccctctagctgtgtggctggcagtgttggccacgtaggggctcccatccccccaccattgtgtcacatgggctgccaggctcagctcccagctgcgtccacagtgacctggatcagggtggggacaaggactggaccctccttctccagaaggccttcagctcttgccttgccatgcagtcacctccttccccctctgaccccagatcccaaaggtgcaccgttgccccagcccctttctggccccatggggtttctctgatgccttcatcatagaggcccggggctggtccgatggttggcaaaacttgactccggcccagtccccactcttggggacttagaacccctgctgtcctgggatctggcctgcctttctttggtcagtccctgtggtcccccaccagctccccctcccatagggctgcccaccaagccctgcccccagcccaagaggagcccccactgcctgcggggcagtgatgtctggccaccggctcacaccaatgacttggtcctggggtggcagaagcagcaggtgacaggagcagggcccctgtccctctcttctggccctgtggtacccaggccacacgttgtgcccgctcttggggctgaccggctgtagggaccaccagccgctgctactgtgggccgccccggggcagggtgggcagggcttttgtgggttatgaggacacagaagtccctgaggcccccagacctggctcagccaacctccttcctcccccggttgccccccactctaaagcctcctccctcccagcgtccactggctccaggctcctcacaacagcagctcatagacacggggcgtctccaggtggtcccagccctccagatgtttctagctctccaggtgggcgctgttttcacgtctgcctgcatccattcattccttcattcctcacctttatcctgttatctctatttttttaagctaccaggaaggaaagggaagaagagatcacgaaactgggacccccagaaaggaggagtgggctttgaacttagacatctacctcagagctcaaataggttgtttaaaatcacattcaattttcagatgaaggggaactttatagttttttttttttttttttttttgagacagagtctcactgtgttgcccaggctggagtgcaaatggcttgatcttggttcactgcaacctctgcctcccaggttcaagcaattctcttgcctcagcctcccgagtagctgggactaaaggcgtgtgccaccatgcccagctaattcttgtatttttagtagagacggagtttctccatgttggccagactggtctcgaactcctgacctcaggtgatctgaccgccttggcctccgaaagtgctgagattacagttgcgagccactgtgcgtggccagaactttataataagagacttgaagctgggtgtgacggtgcacacctctagtcccagctactcgggaggccaagacagaaggatcaccttgaggccaggagtttaaggccagcctgggcaacatagcaaaacctagtccctaaaattaaaaaaaaaaaaaaaaaaaaaaggaaaataaaggagacttgaaatttttgaactaaatagtggtgatggctacacattgtgaatgtaattaacaccactgagttaaacacttaaaatggttaaaatggcaaattgtatgttatacctattttactacaataaaaagtataaaaaagagaagatatttaggtgacttacagcaaccaattgcaacaaaacaaaatgttaagaaatgatctttttatgaggcaattggaaatttgaacactgatcaactataggatgattggaattattaatttttaaaggtgtgataagatactgcacttggctgggcacagtggcacatgcctgtaatcccagctacttggcaggctgaggtgggagaatcgcttgagctcaggagttcgagaccagcctgggcaacgtggcgaaatccccgtctttacaaaaacaaacaaacaaacaaaaaagatattgcagttgtgttgtaagcgtccttatctttcagagctacatagtggaatgtttatggaatatttaggataaatgatataggcatttgggatttgctgcaaaatgacccagaggcaggggtcagggggagaggtagagatgagacaagaggtagaggggagaggtagaggtagccacgagctgataattacagacaagagatgcggagtatgtgggggctcattatcctgcatagtctatctttgtatatctttgaacttttcaagaataaaaaagcttaaaaagtata

SEQ ID NO: 5151 - DNA, 5606 bp, Homo sapiens; identical to SEQ ID NO: 2449

SEQ ID NO: 5152 - DNA, 9127 bp, Homo sapiens; identical to SEQ ID NO: 591

SEQ ID NO: 5153 - DNA, 3054 bp, Homo sapiens; identical to SEQ ID NO: 1680

SEQ ID NO: 5154 - DNA, 3108 bp, Homo sapiens
actcccacgcgcctccgccccgccagcctcatttctggcgcgctctccccgtggctccgcaagatggcggcgggcctgctgagggacttgccttcttaaacttcgagggccggagcttccttaggaagtggttccctcctggtccctgtacttggtggggtgggcggggttcgtgggggcctcagcgtggggtgtggggcgtcctgaaggcatggccctgtagctgagggggctgggccggaagtgcctctggtcccctcgcgcctgtcagctgcgggggacttgctgatggcggctccctcgtgtggcggcgacagaaaagctcgcctgacgccatctttgccgcacgagtctactgcaaatcctgaaactccaaactcaaccatctccagagaggccagcacccagtcctcatcagctgcaaccagccaaggctatattttaccagaaggcaaaatcatgccaaacactgtttttgttggaggaattgatgttaggatggatgaaactgagattagaagcttctttgctagatatggttcagtgaaagaagtgaagataatcactgatcgaactggtgtgtccaaaggctatggatttgtttcattttttaatgacgtggatgtgcagaagatagtagaatcacagataaatttccatggtaaaaagctgaagctgggccctgcaatcaggaaacaaaatttatgtgcttatcatgtgcagccacgtcctttggtttttaatcatcctcctccaccacagtttcagaatgtctggactaatccaaacactgaaacttatatgcagcccacaaccacgatgaatcctataactcagtatgttcaggcatatcctacttacccaaattcaccagttcaggtcatcactggatatcagttgcctgtatataattatcagatgccaccacagtggcctgttggggagcaaaggagctatgttgtacctccggcttattcagctgttaactaccactgtaatgaagttgatccaggagctgaagttgtgccaaatgaatgttcagttcatgaagctactccaccctctggaaatggcccacaaaagaaatctgtggaccgaagcatacaaacggtggtatcttgtctgtttaatccagagaacagactgagaaactctgttgttactcaagatgactacttcaaggataaaagagtgcatcactttagaagaagtcgggcaatgcttaaatctgtttgatcctcctggcttatctagttacatgggaagttgctggttttgaatattaagctaaaaggtttccactattatagaaattctgaattttggtaaatcacactcaaactttgtgtataagttgtattattagactctctagttttatcttaaactgttcttcattagatgtttatttagaaactggttctgtgttgaaatatagttgaaagtaaaaaaataattgagactgaaagaaactaagatttatctgcaaggattttttaaaaattggcattttaagtgtttaaaagcaaatactgattttcaaaaaaatgtttttaaaaacctattttgaaaggtcagaattttgttggtctgaatacaaacatttcacttctccaacaagtacctgtgaacagtacagtatttacagtattgagctttgcatttatgatttctccagaaatttaccacaaaagcaaaatttttaaaactgcatttttaatcagtggaactcaatatatagttagctttattgaagtcttcttatctaaacccagcaaaacagattcaaagcgaacagtccaatcagtgggtcatatgtttattcaaaatattttatcttttagctagaatccacacatatatatcctatttgattagggtagtaattaggataactaaaattctgggcctaattttttaaagaatccaagacaaactaaactttactaggtacataagcttctcaatgagtcaccattcttcttttttgtaaaaacttttttctttgaaatgctaaacttggctgtatgtcaaattgtgcaaaatattggtattaaagaatgctgcaacttttttatgtctcttagaggttaatcagagtatctgaagggaattgtttttataaaaacattgaaatattagttacttgctataaatagatttagtctgttatatttccttttgtaaagtaaaatatgtccagaagagtcaaagtagttagttttggttatttctaaaccacaaaagttgtttaataagtatatcttaagaatgtgctagagttaaaagttagcattgtttctagattagctggtgtcttcattttacattgtgacaaacagctagagcatcagagcccttttgctataccacagtctttcgtttccagcctttgtcactagtctttgaggaggtttgctcctagaactggtgatataaagaatgaaagtagctgtatgagcagagcagttcaagggccaaaccctggaacggtagcaatgggatataatacctttctaagggaaaaagttgtatcagtaccatttgatctgccatggacatgagtttaaagcggctttctggcccttctttcagtgacttcttccctaaaatgtagaaattctaacttaatgtagttactgtgagccatattactagtgccccctagggtctataattccttaaaattttcattctgaatctgaaggagagagtcttttaactttagaattcccaagagggctttattacacctcagaaattgaaagcactatgaatttgtccatttaaaaatgatctgtagtttttttggtgctataacattctgacacatatcattctgtgattaaatctccagcttactataaatgatatctatattctaaagagctacttctaattattccaatatgaccttaaggaaaagtaagggaataaatttttgtctttgttggagtgaagcatttaaaagagtaagggtaaaaaagataaagtcctgaacctttcaaaatggaaaattaattctaaacttagaaatatgcttctgcctattgctgatactgtctttgcatacatgaataaaaataaagtttttttcttcaaaaaaaa

SEQ ID NO: 5155 - DNA, 1398 bp, Homo sapiens; identical to SEQ ID NO: 2525

SEQ ID NO: 5156 - DNA, 1473 bp, Homo sapiens
ctggttcctcccctctcaactgctctggttcttataaaaacctcacagccttccactaacatcccgtaggagcctctctccctactgctgctacacaagaccctgagactgacctgcaggacgaaaccatgaagagcctgatccttcttgccatcctggccgccttagcggtagtaactttgtgttatggagagtggcagaaagaagaaaacttcggctttgatatcgtttcagttctctctctgaactggcatcgtgcccaggaatcacatgaaagcatggaatcttatgaacttaatcccttcattaacaggagaaatgcaaataccttcatatcccctcagcagagatggagagctaaagtccaagagaggatccgagaacgctctaagcctgtccacgagctcaatagggaagcctgtgatgactacagactttgcgaacgctacgccatggtttatggatacaatgctgcctataatcgctacttcaggaagcgccgagggaccaaatgagactgagggaagaaaaaaaatctctttttttctggaggctggcacctgattttgtatccccctgtagcagcattactgaaatacataggcttatatacaatgcttctttcctgtatattctcttgtctggctgcacccctttttcccgcccccagattgataagtaatgaaagtgcactgcagtgagggtcaaaggagagtcaacatatgtgattgttccataataaacttctggtgtgatactttcatcttgtaaatctgctttcttttgggaagatattgagatatttaaatcatggcccaccttacccaaaataggagattctgttcatctcatatctagtattaattagaaaaataactacataaaaagaaggaagctaagaaggcactcactcagccataaattctctaaaccctctctaccttggaatccgtgaatggaatctggtatgttttttgcaggattttcctattgtaaattgtggcaaatacagggctcccttcatttgcttttcatctcttatgcatcaaagtcaaaaacatttctgaatcaagataatctagaagagaaaaaaggaggaaaaggaaaagagaaagcagaagggacaaataaaagcaattggcaaaaactgtcaataatagtttatacacttaactatatcaataatcacattatatgtaaatagtctaaacaatccaattattttttacttctacttatgttatatttttacttctacatttgttaaaggttccacgctacatttttactattcttgctttaaataattttaataatttcttttaaagtttagataataagaaaatatcccgggccaggcacagtggccacacctgtaatctcagtagccatgaccataccaatgcactccagcctgtgaaacagagtgagactctgtctctacagaaaaataaaaaagaaaagaaagaaaag

SEQ ID NO: 5157 - DNA, 4204 bp, Homo sapiens
cagggagaagagaggaagagggagctgcaggtgccagaagagaacagggcggactctcaggacgaaaagagtcaaacctttttgggaaaatcagaggaagtaactggaaagcaagaagatcatggtataaaggagaaaggggtgccagtcagcgggcaggaggcgaaagagccagagagttgggatgggggcaggctgggggcagtgggaagagcgaggagcagggaagaggagaatgagcatcatgggccttcaatgcccgctctgatagcccctgaggactctcctcactgtgacctgtttccaggtgcctcatatctcgtgactcagattcccgggactcagacagagtccagggctgaggaactgtcccccgcagctctgtctccctcgctagagcccatcaggtgctctcaccagcccatttctctactgggctcctttttgactgaggagtcacctgacaaggaaatagatcaaaacagccagcaagagggatccaggctgaggaagggaacagtgtccagccaagggactgaggtggtctttgccagtgcatctgtgactcctccaaggacaccagattcagctcctcccagtcctgctgaagcctaccccatcacacctgcctcggtatctgccaggcccccagttgcctttcccaggagggaaacctcttgtgctgcacgtgctccagaaactgccagtgcccctctctcaatggatgacccatctccctgtgggacttctgagatgtgcccggctgccctctatggcttcccctccaccgggaccagccctccgaggcccccagccaactccacaggcaccgtccagcacttacggagtgactccttccctggttctcacaggacagagcagactccagacctggtgggaatgttgctttcctactcccactcagagctgccccagaggccccccaaacctgccatctacagctctgtgaccccaagaagggacagaaggagtggtagggactacagcaccgtttcagcatcccctactgccttatccacgctgaagcaggactctcaagaatccatctcaaatctagagagacccagcagtcctcccagcatccagccctgggtctccccacataatccagcctttgccacagagtctcccgcctacggttcttccccatcctttgtctccatggaggatgtgaggatccacgaacctctgccccctcctcccccacagaggagggacacccatccctccgtggtggagacagatggccatgctcgtgtagtggttcccacgctgaagcagcatagccaccctcctccattggccctaggttcagggctgcatgccccccataaaggcccacttccccaagcctctgaccccgctgtggccaggcagcaccgacctctgccatctaccccagacagctcccaccatgctcaggccacccccaggtggagatacaacaagccgctaccccctacccctgatttgccgcagccccaccttcctcccatttctgctcctggtagctcaaggatctacaggcctctacccccactacccatcatagaccctcccaccgaaccacccccattgcccccaaagtccagggggaggagcaggagcacttggggaggacatatgaactcagggggtcatgccaaaacaagacctgcttgtcaagactggacagtccccctccctgcctctgctggacgcacctcctggcccccggccacagctagatcaacagagtctttcacttccaccagcaggagtaagagcgaagtgtcccctggcatggctttcagcaacatgacaaacttcctatgcccctcttcccctaccactccctggactccggagctccagggacccacctctaaggatgaagcaggggtctcagaacaccctgaggcccctgcgagagaacctttgagaaggacaacccctcagcaaggagccagtggcccagggaggtcacctgtgggccaagcaaggcagccagaaaaacccagccatctgcacctggagaaggcgtccagctggccccacaggcgggactcagggaggccaccaggggacagcagtggacaggctgtggctcctagtgagggggccaacaagcacaagggctggagccggcagggcctgcgcagaccttccatcttgcctgagggctcttcagattcaagaggtccagccgtggagaaacatccgggaccctcagacactgttgtttttcgggagaaaaaaccaaaggaggtgatgggaggcttttcaagacgctgctccaaactcatcaactcctcccagctgctttaccaggagtatagtgatgttgtcctgaataaggagatccagagccagcagcggctggagagcctgtccgagacacccgggcctagctctccgcggcagcctcggaaggccctggtctcctccgagtcgtacctgcagcggctctccatggcctccagcggctccctctggcaggaaatccccgtggtgcgcaacagcaccgtgctgctctccatgacccatgaagaccaaaagctgcaagagtcaaatttgagctgattgtgtcagaggcctcctacctgcgcagtctaaacatagctgtggatcatttccaactttcaacttcactccgggccacactttccaaccaggagcaccaatggctcttctctcgtttacaggatgtgcgagacgtcagcgccacgttcctttcagacctggaagagaactttgagaacaatatcttctccttccaagtatgtgacgtagtcctgaaccacgccccagacttccgccgggtctacctgccttatgtcaccaaccagacctatcaggaacgcaccttccagagcctgatgaatagcaacagcaatttccgggaggtcttggagaagctggagagcgaccccgtctgccagcgcctttccctcaagtcctttctgattctgcccttccaacgcatcacccgcctcaaactgctgctccagaacattctgaagagaacacagcctggctcctcggaggaggcagaggccacgaaggcacaccacgccctggagcagctgatccgggactgcaataacaatgtccagagtatgcgacggacagaggagctaatctacctgagccagaagattgagtttgagtgcaaaatattcccgctcatttctcagtcacgctggctggtgaaaagtggggagctgacagccttggagttcagtgcttccccagggctacgaaggaagctgaacacgcgtccagtccacctgcacctcttcaatgactgtctgctgctgtctcggccccgagagggtagccgattcctggtatttgaccatgctcccttctcctccattcggggggaaaagtgtgaaatgaagctacatggacctcacaaaaacctgttccgactctttctgcggcagaacactcagggcgcccaggccgagttcctcttccgcacggagactcaaagtgaaaagcttcggtggatctcagccttggccatgccaagagaggagttggaccttctggagtgttacaggatatgggggacaatataacatccatcacagagttcctcctactgggatttcccgttggcccaaggattcagatgctcctctttgggctcttctccctgttctacgtcttcaccctgctggggaacgggaccatactggggctcatctcactggactccagactgcacgcccccatgtacttcttcctctcacacctggcggtcgtcgacatcgcctacgcctgcaacacggtgccccggatgctggtgaacctcctgcatccagccaagcccatctcctttgcgggccgcatgatgcagacctttctgttttccacttttgctgtcacagaatgtctcctcctggtggtgatgtcctatgatctgtacgtggccatctgccaccccctccgatatttggccatcatgacctggagagtctgcatcaccctcgcggtgacttcctggaccactggagtccttttatccttgattcatcttgtgttacttctacctttacccttctgtaggccccagaaaatttatcactttttttgtgaaatcttggctgttctcaaacttgcctgtgcagatacccacatcaatgagaacatggtcttggccggagcaatttctgggctggtgggacccttgtcc

SEQ ID NO: 5158 - DNA, 3112 bp, Homo sapiens
actcggtgtcaccacaggaggagactcaggcaggccgcgctccagcctcaccaggctccccggctcgccgtggctctctgagcccccttttcagggaccccagtcgctggaacatttgcccagactcgtaccaaacttttccgccctgggctcgggatcctggactccggggcctccccgtcctcccctttcccgggttccagctccggcctctggactaggaaccgacagcccccctccccgcgtccctccctctctctccagccgttttggggaggggctctccacgctccggatagttcccgagggtcatccgcgccgcactcgcctttccgtttcgccttcacctggatataatttccgagcgaagctgcccccaggatgaccacgctggccggcgctgtgcccaggatgatgcggccgggcccggggcagaactacccgcgtagcgggttcccgctggaagtgtccactcccctcggccagggccgcgtcaaccagctcggcggtgtttttatcaacggcaggccgctgcccaaccacatccgccacaagatcgtggagatggcccaccacggcatccggccctgcgtcatctcgcgccagctgcgcgtgtcccacggctgcgtctccaagatcctgtgcaggtaccaggagactggctccatacgtcctggtgccatcggcggcagcaagcccaagcaggtgacaacgcctgacgtggagaagaaaattgaggaatacaaaagagagaacccgggcatgttcagctgggaaatccgagacaaattactcaaggacgcggtctgtgatcgaaacaccgtgccgtcagtgagttccatcagccgcatcctgagaagtaaattcgggaaaggtgaagaggaggaggccgacttggagaggaaggaggcagaggaaagcgagaagaaggccaaacacagcatcgacggcatcctgagcgagcgagcctcagcaccccaatcagatgaaggctctgatattgactctgaaccagatttaccactaaagaggaaacagcgcagaagccgaaccaccttcacagcagaacagctggaggaactggagcgtgcttttgagagaactcattaccctgacatttatactagggaggaactggcccagagggcgaagctcaccgaggcccgagtacaggtctggtttagcaaccgccgtgcaagatggaggaagcaagctggggccaatcaactgatggctttcaaccatctcattcccggggggttccctcccactgccatgccgaccttgccaacgtaccagctgtcggagacctcttaccagcccacatctattccacaagctgtgtcagatcccagcagcaccgttcacagacctcaaccgcttcctccaagcactgtacaccaaagcacgattccttccaacccagacagcagctctgcctactgcctccccagcaccaggcatggattttccagctatacagacagctttgtgcctccgtcggggccctccaaccccatgaaccccaccattggcaatggcctctcacctcaggtgcctttcattatctcaagccagatatcgcgtaagtgaactgtccacttggagctaaaactggccctgtttctggtcttcgcagcctagatatgaagaatctgctctgaaaacaaaaaaaaattacccttttgttggggggggtggggcagtggtcccaataggagacaaaggagagtgattgattttcttcctccaatagttggtttcaaatccttttgaacacgttcgacaaaagcagtggagaagaggaagacctggagcaataaaagacaaatgcaacattttaaggcaatggtttcacatggttacatatcaaaacatcccaattctttagtgctgatcatcgaggagctagaacattccatttgcttgtgtgcgtgcgtgcgtgtgtgtgtgtgtgtgtgtattgagatttacccagactggtttgggcaagcagactgttctaaaatataatagaataccctaaagtataacatgtcgatgttcgatgctgatacttctacaactttaaaactgctcatttcatgaagcaagaatggaggaatccttgactcttacacactggaaattgaaataaagataaatgcaaccatttttaggaagctagactagctgtaaaggacctcctaaataaattatttgttactgtatcctcatttgtaatctagttgtcaataaatggcccggacatgtcttgctaacaggatatgggctaccaggaagaaggacttgtttccctttcctgtgtggggagaggtgtgtgacgtttttccagttcacatttatttggtagcccacctgggttggaggaagggcacggtggagagaaagtgacatgcattcacatatctgcttatcagtgtgcaatactgtgtacctcatggatgctttggcaatgcccaaggcgatataagcaaaatcagaagtatatttttgcaggtgcttttattttcacagcccataattcatagtgatagagtgcagtgatgtttgccatttgctggacaaccaacacccgggttgctcctttgattagagaccagatcagataattatgcttttaaactgattacgtttacattcttctcttttctatgaaaggcagggcaagaacagaagtgttcacatggctctcatgtacttttaaattatacaatgatatccaatattaaaagattataggaactgaggtttacatacgtttgtgtggtgacattttagaatgtcaataaatttgctttttgagatgttgagaggaacaagaaggtggaaggcagtgttatttatttctttctattcttggaaccacgaatgaggtaggcacaaatacattccttttagagttaagaactatgacgtagcgagttagtgagactagacatagtaccgaatttagttcatgcattggtcttagagggtgatggaacaagagaagtactatctttgtgttgcagcctcaaccaacaacaatgtgttgtaaaaatgtctttcatgtaaaaagtgcagtaaatatttactatttataatgaataaacagttatgaaaacttgaa

SEQ ID NO: 5159 - DNA, 2941 bp, Homo sapiens; identical to SEQ ID NO: 1762

SEQ ID NO: 5160 - DNA, 1095 bp, Homo sapiens
actcggtgtcaccacaggaggagactcaggcaggccgcgctccagcctcaccaggctccccggctcgccgtggctctctgagcccccttttcagggaccccagtcgctggaacatttgcccagactcgtaccaaacttttccgccctgggctcgggatcctggactccggggcctccccgtcctcccctttcccgggttccagctccggcctctggactaggaaccgacagcccccctccccgcgtccctccctctctctccagccgttttggggaggggctctccacgctccggatagttcccgagggtcatccgcgccgcactcgcctttccgtttcgccttcacctggatataatttccgagcgaagctgcccccaggatgaccacgctggccggcgctgtgcccaggatgatgcggccgggcccggggcagaactacccgcgtagcgggttcccgctggaagtgtccactcccctcggccagggccgcgtcaaccagctcggcggtgtttttatcaacggcaggccgctgcccaaccacatccgccacaagatcgtggagatggcccaccacggcatccggccctgcgtcatctcgcgccagctgcgcgtgtcccacggctgcgtctccaagatcctgtgcaggtaccaggagactggctccatacgtcctggtgccatcggcggcagcaagcccaagcaggtgacaacgcctgacgtggagaagaaaattgaggaatacaaaagagagaacccgggcatgttcagctgggaaatccgagacaaattactcaaggacgcggtctgtgatcgaaacaccgtgccgtcagtgagttccatcagccgcatcctgagaagtaaattcgggaaaggtgaagaggaggaggccgacttggagaggaaggaggcagaggaaagcgagaagaaggccaaacacagcatcgacggcatcctgagcgagcgaggaaaggccctggtctccggagtttcctcgcattaaaggagagagagagagagtactcttttgggcaacggccctccaaaattgcccccacattggctgccttataaatatgtctgtgtgttgactggt

SEQ ID NO: 5161 - DNA, 2032 bp, Homo sapiens
actcggtgtcaccacaggaggagactcaggcaggccgcgctccagcctcaccaggctccccggctcgccgtggctctctgagcccccttttcagggaccccagtcgctggaacatttgcccagactcgtaccaaacttttccgccctgggctcgggatcctggactccggggcctccccgtcctcccctttcccgggttccagctccggcctctggactaggaaccgacagcccccctccccgcgtccctccctctctctccagccgttttggggaggggctctccacgctccggatagttcccgagggtcatccgcgccgcactcgcctttccgtttcgccttcacctggatataatttccgagcgaagctgcccccaggatgaccacgctggccggcgctgtgcccaggatgatgcggccgggcccggggcagaactacccgcgtagcgggttcccgctggaagtgtccactcccctcggccagggccgcgtcaaccagctcggcggtgtttttatcaacggcaggccgctgcccaaccacatccgccacaagatcgtggagatggcccaccacggcatccggccctgcgtcatctcgcgccagctgcgcgtgtcccacggctgcgtctccaagatcctgtgcaggtaccaggagactggctccatacgtcctggtgccatcggcggcagcaagcccaagcaggtgacaacgcctgacgtggagaagaaaattgaggaatacaaaagagagaacccgggcatgttcagctgggaaatccgagacaaattactcaaggacgcggtctgtgatcgaaacaccgtgccgtcagtgagttccatcagccgcatcctgagaagtaaattcgggaaaggtgaagaggaggaggccgacttggagaggaaggaggcagaggaaagcgagaagaaggccaaacacagcatcgacggcatcctgagcgagcgagcctcagcaccccaatcagatgaaggctctgatattgactctgaaccagatttaccactaaagaggaaacagcgcagaagccgaaccaccttcacagcagaacagctggaggaactggagcgtgcttttgagagaactcattaccctgacatttatactagggaggaactggcccagagggcgaagctcaccgaggcccgagtacaggtctggtttagcaaccgccgtgcaagatggaggaagcaagctggggccaatcaactgatggctttcaaccatctcattcccggggggttccctcccactgccatgccgaccttgccaacgtaccagctgtcggagacctcttaccagcccacatctattccacaagctgtgtcagatcccagcagcaccgttcacagacctcaaccgcttcctccaagcactgtacaccaaagcacgattccttccaacccagacagcagctctgcctactgcctccccagcaccaggcatggattttccagctatacagacagctttgtgcctccgtcggggccctccaaccccatgaaccccaccattggcaatggcctctcacctcaggtaatgggactcctgaccaaccacggtggggtacctcatcagccccagactgattacgcgctctcccctctcaccgggggtctggaacctaccaccacggtgtcggccagctgcagtcagagactagaccatatgaagagcttggacagtctgccaacatctcagtcctactgtccacccacctatagcaccacaggctacagtatggaccctgtcacaggctaccaatatgggcagtatggacaaagtaagccttggactttttagggggcaatttctcctggaagggagataaactcaactcttccttaagaaaggtgaattagaggcaagattaagccacacatgccggtatcaatttttttttttttttgcaaagccagctgactgttccagcaggggcttccttgtgtaattattttcttaactgatgtcaacaacatcttgcggttattaattgttgagacgtgaaacctga

SEQ ID NO: 5162 - DNA, 3359 bp, Homo sapiens
actcggtgtcaccacaggaggagactcaggcaggccgcgctccagcctcaccaggctccccggctcgccgtggctctctgagcccccttttcagggaccccagtcgctggaacatttgcccagactcgtaccaaacttttccgccctgggctcgggatcctggactccggggcctccccgtcctcccctttcccgggttccagctccggcctctggactaggaaccgacagcccccctccccgcgtccctccctctctctccagccgttttggggaggggctctccacgctccggatagttcccgagggtcatccgcgccgcactcgcctttccgtttcgccttcacctggatataatttccgagcgaagctgcccccaggatgaccacgctggccggcgctgtgcccaggatgatgcggccgggcccggggcagaactacccgcgtagcgggttcccgctggaagtgtccactcccctcggccagggccgcgtcaaccagctcggcggtgtttttatcaacggcaggccgctgcccaaccacatccgccacaagatcgtggagatggcccaccacggcatccggccctgcgtcatctcgcgccagctgcgcgtgtcccacggctgcgtctccaagatcctgtgcaggtaccaggagactggctccatacgtcctggtgccatcggcggcagcaagcccaagcaggtgacaacgcctgacgtggagaagaaaattgaggaatacaaaagagagaacccgggcatgttcagctgggaaatccgagacaaattactcaaggacgcggtctgtgatcgaaacaccgtgccgtcagtgagttccatcagccgcatcctgagaagtaaattcgggaaaggtgaagaggaggaggccgacttggagaggaaggaggcagaggaaagcgagaagaaggccaaacacagcatcgacggcatcctgagcgagcgagcctcagcaccccaatcagatgaaggctctgatattgactctgaaccagatttaccactaaagaggaaacagcgcagaagccgaaccaccttcacagcagaacagctggaggaactggagcgtgcttttgagagaactcattaccctgacatttatactagggaggaactggcccagagggcgaagctcaccgaggcccgagtacaggtctggtttagcaaccgccgtgcaagatggaggaagcaagctggggccaatcaactgatggctttcaaccatctcattcccggggggttccctcccactgccatgccgaccttgccaacgtaccagctgtcggagacctcttaccagcccacatctattccacaagctgtgtcagatcccagcagcaccgttcacagacctcaaccgcttcctccaagcactgtacaccaaagcacgattccttccaacccagacagcagctctgcctactgcctccccagcaccaggcatggattttccagctatacagacagctttgtgcctccgtcggggccctccaaccccatgaaccccaccattggcaatggcctctcacctcaggtaatgggactcctgaccaaccacggtggggtacctcatcagccccagactgattacgcgctctcccctctcaccgggggtctggaacctaccaccacggtgtcggccagctgcagtcagagactagaccatatgaagagcttggacagtctgccaacatctcagtcctactgtccacccacctatagcaccacaggctacagtatggaccctgtcacaggctaccaatatgggcagtatggacaaagtgcctttcattatctcaagccagatatcgcgtaagtgaactgtccacttggagctaaaactggccctgtttctggtcttcgcagcctagatatgaagaatctgctctgaaaacaaaaaaaaattacccttttgttggggggggtggggcagtggtcccaataggagacaaaggagagtgattgattttcttcctccaatagttggtttcaaatccttttgaacacgttcgacaaaagcagtggagaagaggaagacctggagcaataaaagacaaatgcaacattttaaggcaatggtttcacatggttacatatcaaaacatcccaattctttagtgctgatcatcgaggagctagaacattccatttgcttgtgtgcgtgcgtgcgtgtgtgtgtgtgtgtgtgtattgagatttacccagactggtttgggcaagcagactgttctaaaatataatagaataccctaaagtataacatgtcgatgttcgatgctgatacttctacaactttaaaactgctcatttcatgaagcaagaatggaggaatccttgactcttacacactggaaattgaaataaagataaatgcaaccatttttaggaagctagactagctgtaaaggacctcctaaataaattatttgttactgtatcctcatttgtaatctagttgtcaataaatggcccggacatgtcttgctaacaggatatgggctaccaggaagaaggacttgtttccctttcctgtgtggggagaggtgtgtgacgtttttccagttcacatttatttggtagcccacctgggttggaggaagggcacggtggagagaaagtgacatgcattcacatatctgcttatcagtgtgcaatactgtgtacctcatggatgctttggcaatgcccaaggcgatataagcaaaatcagaagtatatttttgcaggtgcttttattttcacagcccataattcatagtgatagagtgcagtgatgtttgccatttgctggacaaccaacacccgggttgctcctttgattagagaccagatcagataattatgcttttaaactgattacgtttacattcttctcttttctatgaaaggcagggcaagaacagaagtgttcacatggctctcatgtacttttaaattatacaatgatatccaatattaaaagattataggaactgaggtttacatacgtttgtgtggtgacattttagaatgtcaataaatttgctttttgagatgttgagaggaacaagaaggtggaaggcagtgttatttatttctttctattcttggaaccacgaatgaggtaggcacaaatacattccttttagagttaagaactatgacgtagcgagttagtgagactagacatagtaccgaatttagttcatgcattggtcttagagggtgatggaacaagagaagtactatctttgtgttgcagcctcaaccaacaacaatgtgttgtaaaaatgtctttcatgtaaaaagtgcagtaaatatttactatttataatgaataaacagttatgaaaacttgaa

SEQ ID NO: 5163 - DNA, 1504 bp, Homo sapiens
actcggtgtcaccacaggaggagactcaggcaggccgcgctccagcctcaccaggctccccggctcgccgtggctctctgagcccccttttcagggaccccagtcgctggaacatttgcccagactcgtaccaaacttttccgccctgggctcgggatcctggactccggggcctccccgtcctcccctttcccgggttccagctccggcctctggactaggaaccgacagcccccctccccgcgtccctccctctctctccagccgttttggggaggggctctccacgctccggatagttcccgagggtcatccgcgccgcactcgcctttccgtttcgccttcacctggatataatttccgagcgaagctgcccccaggatgaccacgctggccggcgctgtgcccaggatgatgcggccgggcccggggcagaactacccgcgtagcgggttcccgctggaagtgtccactcccctcggccagggccgcgtcaaccagctcggcggtgtttttatcaacggcaggccgctgcccaaccacatccgccacaagatcgtggagatggcccaccacggcatccggccctgcgtcatctcgcgccagctgcgcgtgtcccacggctgcgtctccaagatcctgtgcaggtaccaggagactggctccatacgtcctggtgccatcggcggcagcaagcccaagcaggtgacaacgcctgacgtggagaagaaaattgaggaatacaaaagagagaacccgggcatgttcagctgggaaatccgagacaaattactcaaggacgcggtctgtgatcgaaacaccgtgccgtcagtgagttccatcagccgcatcctgagaagtaaattcgggaaaggtgaagaggaggaggccgacttggagaggaaggaggcagaggaaagcgagaagaaggccaaacacagcatcgacggcatcctgagcgagcgaggtaagcggtggcgccttgggcggcgcacttgctgggtgacttggagggcatcggctagctgacattggtgatctgacggcagccaagcccagctcggatcaaggtcccttcatgcgcggtgtctctgcgcctgagtaacgacatggaactgaaagaccagagggacactaggaatcaaaacaaacatttctattctgcttagtttttctgttttgtaaatctttctttcttaaccactttcagcccctgggattctagaactgtgaattgtgctctgttgtagggggcaggggaagctctcactctgttgccattaaatgtatgagactgggcatctctgagcaattgtagggccggggatagagggtacttgaatcttcagaagttgaagtagcttttatgccctcaggaaaggccctggtctccggagtttcctcgcattaaaggagagagagagagagtactcttttgggcaacggccctccaaaattgcccccacattggctgccttataaatatgtctgtgtgttgactggt

SEQ ID NO: 5164 - DNA, 3356 bp, Homo sapiens
actcggtgtcaccacaggaggagactcaggcaggccgcgctccagcctcaccaggctccccggctcgccgtggctctctgagcccccttttcagggaccccagtcgctggaacatttgcccagactcgtaccaaacttttccgccctgggctcgggatcctggactccggggcctccccgtcctcccctttcccgggttccagctccggcctctggactaggaaccgacagcccccctccccgcgtccctccctctctctccagccgttttggggaggggctctccacgctccggatagttcccgagggtcatccgcgccgcactcgcctttccgtttcgccttcacctggatataatttccgagcgaagctgcccccaggatgaccacgctggccggcgctgtgcccaggatgatgcggccgggcccggggcagaactacccgcgtagcgggttcccgctggaagtgtccactcccctcggccagggccgcgtcaaccagctcggcggtgtttttatcaacggcaggccgctgcccaaccacatccgccacaagatcgtggagatggcccaccacggcatccggccctgcgtcatctcgcgccagctgcgcgtgtcccacggctgcgtctccaagatcctgtgcaggtaccaggagactggctccatacgtcctggtgccatcggcggcagcaagcccaaggtgacaacgcctgacgtggagaagaaaattgaggaatacaaaagagagaacccgggcatgttcagctgggaaatccgagacaaattactcaaggacgcggtctgtgatcgaaacaccgtgccgtcagtgagttccatcagccgcatcctgagaagtaaattcgggaaaggtgaagaggaggaggccgacttggagaggaaggaggcagaggaaagcgagaagaaggccaaacacagcatcgacggcatcctgagcgagcgagcctcagcaccccaatcagatgaaggctctgatattgactctgaaccagatttaccactaaagaggaaacagcgcagaagccgaaccaccttcacagcagaacagctggaggaactggagcgtgcttttgagagaactcattaccctgacatttatactagggaggaactggcccagagggcgaagctcaccgaggcccgagtacaggtctggtttagcaaccgccgtgcaagatggaggaagcaagctggggccaatcaactgatggctttcaaccatctcattcccggggggttccctcccactgccatgccgaccttgccaacgtaccagctgtcggagacctcttaccagcccacatctattccacaagctgtgtcagatcccagcagcaccgttcacagacctcaaccgcttcctccaagcactgtacaccaaagcacgattccttccaacccagacagcagctctgcctactgcctccccagcaccaggcatggattttccagctatacagacagctttgtgcctccgtcggggccctccaaccccatgaaccccaccattggcaatggcctctcacctcaggtaatgggactcctgaccaaccacggtggggtacctcatcagccccagactgattacgcgctctcccctctcaccgggggtctggaacctaccaccacggtgtcggccagctgcagtcagagactagaccatatgaagagcttggacagtctgccaacatctcagtcctactgtccacccacctatagcaccacaggctacagtatggaccctgtcacaggctaccaatatgggcagtatggacaaagtgcctttcattatctcaagccagatatcgcgtaagtgaactgtccacttggagctaaaactggccctgtttctggtcttcgcagcctagatatgaagaatctgctctgaaaacaaaaaaaaattacccttttgttggggggggtggggcagtggtcccaataggagacaaaggagagtgattgattttcttcctccaatagttggtttcaaatccttttgaacacgttcgacaaaagcagtggagaagaggaagacctggagcaataaaagacaaatgcaacattttaaggcaatggtttcacatggttacatatcaaaacatcccaattctttagtgctgatcatcgaggagctagaacattccatttgcttgtgtgcgtgcgtgcgtgtgtgtgtgtgtgtgtgtattgagatttacccagactggtttgggcaagcagactgttctaaaatataatagaataccctaaagtataacatgtcgatgttcgatgctgatacttctacaactttaaaactgctcatttcatgaagcaagaatggaggaatccttgactcttacacactggaaattgaaataaagataaatgcaaccatttttaggaagctagactagctgtaaaggacctcctaaataaattatttgttactgtatcctcatttgtaatctagttgtcaataaatggcccggacatgtcttgctaacaggatatgggctaccaggaagaaggacttgtttccctttcctgtgtggggagaggtgtgtgacgtttttccagttcacatttatttggtagcccacctgggttggaggaagggcacggtggagagaaagtgacatgcattcacatatctgcttatcagtgtgcaatactgtgtacctcatggatgctttggcaatgcccaaggcgatataagcaaaatcagaagtatatttttgcaggtgcttttattttcacagcccataattcatagtgatagagtgcagtgatgtttgccatttgctggacaaccaacacccgggttgctcctttgattagagaccagatcagataattatgcttttaaactgattacgtttacattcttctcttttctatgaaaggcagggcaagaacagaagtgttcacatggctctcatgtacttttaaattatacaatgatatccaatattaaaagattataggaactgaggtttacatacgtttgtgtggtgacattttagaatgtcaataaatttgctttttgagatgttgagaggaacaagaaggtggaaggcagtgttatttatttctttctattcttggaaccacgaatgaggtaggcacaaatacattccttttagagttaagaactatgacgtagcgagttagtgagactagacatagtaccgaatttagttcatgcattggtcttagagggtgatggaacaagagaagtactatctttgtgttgcagcctcaaccaacaacaatgtgttgtaaaaatgtctttcatgtaaaaagtgcagtaaatatttactatttataatgaataaacagttatgaaaacttgaa

SEQ ID NO: 5165 - DNA, 3188 bp, Homo sapiens
actcggtgtcaccacaggaggagactcaggcaggccgcgctccagcctcaccaggctccccggctcgccgtggctctctgagcccccttttcagggaccccagtcgctggaacatttgcccagactcgtaccaaacttttccgccctgggctcgggatcctggactccggggcctccccgtcctcccctttcccgggttccagctccggcctctggactaggaaccgacagcccccctccccgcgtccctccctctctctccagccgttttggggaggggctctccacgctccggatagttcccgagggtcatccgcgccgcactcgcctttccgtttcgccttcacctggatataatttccgagcgaagctgcccccaggatgaccacgctggccggcgctgtgcccaggatgatgcggccgggcccggggcagaactacccgcgtagcgggttcccgctggaagtgtccactcccctcggccagggccgcgtcaaccagctcggcggtgtttttatcaacggcaggccgctgcccaaccacatccgccacaagatcgtggagatggcccaccacggcatccggccctgcgtcatctcgcgccagctgcgcgtgtcccacggctgcgtctccaagatcctgtgcaggtaccaggagactggctccatacgtcctggtgccatcggcggcagcaagcccaagcaggtgacaacgcctgacgtggagaagaaaattgaggaatacaaaagagagaacccgggcatgttcagctgggaaatccgagacaaattactcaaggacgcggtctgtgatcgaaacaccgtgccgtcagtgagttccatcagccgcatcctgagaagtaaattcgggaaaggtgaagaggaggaggccgacttggagaggaaggaggcagaggaaagcgagaagaaggccaaacacagcatcgacggcatcctgagcgagcgagcctcagcaccccaatcagatgaaggctctgatattgactctgaaccagatttaccactaaagaggaaacagcgcagaagccgaaccaccttcacagcagaacagctggaggaactggagcgtgcttttgagagaactcattaccctgacatttatactagggaggaactggcccagagggcgaagctcaccgaggcccgagtacaggtctggtttagcaaccgccgtgcaagatggaggaagcaagctggggccaatcaactgatggctttcaaccatctcattcccggggggttccctcccactgccatgccgaccttgccaacgtaccagctgtcggagacctcttaccagcccacatctattccacaagctgtgtcagatcccagcagcaccgttcacagacctcaaccgcttcctccaagcactgtacaccaaagcacgattccttccaacccagacagcagctctgcctactgcctccccagcaccaggcatggattttccagctatacagacagctttgtgcctccgtcggggccctccaaccccatgaaccccaccattggcaatggcctctcacctcaggtaatgggactcctgaccaaccacggtggggtacctcatcagccccagactgattacgcgctctcccctctcaccgggggtctggaacctaccaccacggtgtcggccagctgcagtcagagactagaccatatgaagagcttggacagtctgccaacatctcagtcctactgtccacccacctatagcaccacaggctacagtatggaccctgtcacaggctaccaatatgggcagtatggacaaagtgcctttcattatctcaagccagatatcgcttggtttcaaatccttttgaacacgttcgacaaaagcagtggagaagaggaagacctggagcaataaaagacaaatgcaacattttaaggcaatggtttcacatggttacatatcaaaacatcccaattctttagtgctgatcatcgaggagctagaacattccatttgcttgtgtgcgtgcgtgcgtgtgtgtgtgtgtgtgtgtattgagatttacccagactggtttgggcaagcagactgttctaaaatataatagaataccctaaagtataacatgtcgatgttcgatgctgatacttctacaactttaaaactgctcatttcatgaagcaagaatggaggaatccttgactcttacacactggaaattgaaataaagataaatgcaaccatttttaggaagctagactagctgtaaaggacctcctaaataaattatttgttactgtatcctcatttgtaatctagttgtcaataaatggcccggacatgtcttgctaacaggatatgggctaccaggaagaaggacttgtttccctttcctgtgtggggagaggtgtgtgacgtttttccagttcacatttatttggtagcccacctgggttggaggaagggcacggtggagagaaagtgacatgcattcacatatctgcttatcagtgtgcaatactgtgtacctcatggatgctttggcaatgcccaaggcgatataagcaaaatcagaagtatatttttgcaggtgcttttattttcacagcccataattcatagtgatagagtgcagtgatgtttgccatttgctggacaaccaacacccgggttgctcctttgattagagaccagatcagataattatgcttttaaactgattacgtttacattcttctcttttctatgaaaggcagggcaagaacagaagtgttcacatggctctcatgtacttttaaattatacaatgatatccaatattaaaagattataggaactgaggtttacatacgtttgtgtggtgacattttagaatgtcaataaatttgctttttgagatgttgagaggaacaagaaggtggaaggcagtgttatttatttctttctattcttggaaccacgaatgaggtaggcacaaatacattccttttagagttaagaactatgacgtagcgagttagtgagactagacatagtaccgaatttagttcatgcattggtcttagagggtgatggaacaagagaagtactatctttgtgttgcagcctcaaccaacaacaatgtgttgtaaaaatgtctttcatgtaaaaagtgcagtaaatatttactatttataatgaataaacagttatgaaaacttgaa

SEQ ID NO: 5166 - DNA, 1753 bp, Homo sapiens; identical to SEQ ID NO: 202

SEQ ID NO: 5167 - DNA, 5544 bp, Homo sapiens
acttcgcctcgcagctccccttcccatcaccgccccctgctcctccccggcgtctgcgattttcccaggcacccggtgtgagtgcggcgtgcgtgtgagtgtgtgtcagggtattgtgttgtgggagagtgtgtgagtgtgtgtgagtgtgtgtgtgcatgagtgtgtggagtgcggggctcctgcgctccgctcgccgccgccgccggggaaggacagacggacggcgcttcctccttcggcgagcggttcccgggcacctcggcttggcccgggcgcgagtggagcgcgcctggctggccgccggcctcctgaaggtcccgttgcgtaccccctgggctggatatgttcatgttcacgtgaagatggatttactgtacggtctcgtgtggctgctgacagtcctcctggaggggatctctggccaaggagtgtacgctcctcccacggttcgtattgtgcactcaggcttggcctgtaacattgaagaggagcgctactccgaaagggtctacactatccgggaaggagaaacccttgagttgacttgtctagtcacaggacatccacgtccacagatcaggtggaccaaaacagcaggaagtgcctctgacagattccaagactcaagtgtcttcaatgagactttgaggattacaaatattcagcgacaccaaggaggccggtattactgtaaagcagagaatggcttggggtctccagcgataaagtcaatcagagtggatgtatactatttggatgatccagtagtaactgttcatcaaagtataggtgaagctaaagaacaattttactatgagagaacagtgttcctccggtgtgttgccaattccaatcctcctgttcggtatagctggagacgtggccaggaggtcttgctgcaaggatctgataaaggagttgagatttatgaaccattctttacccagggtgaaacaaagatcttaaaactaaagaatcttcgacctcaggactatgctaattatagctgcattgcttcagtgaggaatgtatgtaatattcctgataagatggtgtcgtttagactgtccaataaaacagcatcaccgtcaattaaactcttggtggatgatcctatagttgtaaatcctggagaggccataacattagtatgtgttacaacaggaggagagcctgcaccttctctcacctgggtcaggtcctttgggactctgcctgaaaagactgttttgaatggaggaactttgaccatacctgccatcacctcagatgatgctggtacttacagctgcattgccaataataatgtgggaaaccctgcaaaaaagtccaccaacatcattgtgagagcattaaaaaaaggacgattttggatcacaccagatccttatcacaaagatgacaacatccagattggccgtgaggtgaaaatatcttgccaagtagaagctgttccttctgaggagctaacatttagttggtttaaaaatggtcgtccattaagaagttctgagcggatggtcattacacagactgatcctgatgtctctccgggaacaacaaacttggacatcattgatttaaaattcacggattttgggacgtacacatgtgtagcatctctgaagggaggaggaatatctgatatcagtatcgatgttaatatatccagcagcacagttccacccaatctgactgttccacaggaaaaatcaccattggtcaccagagaaggagacacaatagaactgcaatgtcaagtaactggcaaacctaaaccaatcatcctttggtctagagcggataaagaagttgcaatgcctgatggatcaatgcaaatggagagttatgatggaacactgaggattgtgaatgtatctagggaaatgtcaggaatgtacagatgtcagaccagccaatacaatggatttaacgtgaaaccaagggaagccttggtgcagctcatcgttcagtatccccctgcagtggaaccagcattcttggaaatccggcaaggacaggatcgaagtgtcactatgagttgcagagtactgagagcctatccaatacgggtgctgacctatgagtggcgcttgggcaataaattattacggacgggtcaatttgactctcaggaatacacagagtacgctgtgaagagtctttccaatgaaaactatggggtttataactgtagcatcataaatgaagctggagctgggagatgcagctttcttgttacaggaaaggcctatgctccagaattctattatgatacctacaatccagtatggcagaacagacaccgtgtttattcttacagtctacagtggacacagatgaatcctgatgcagtggatcggattgttgcataccggttgggcatcaggcaggctggacagcagcgctggtgggagcaggagattaaaataaatgggaatattcaaaagggagaattaattacatataacttgacagagctaattaaaccagaagcttatgaagtccgactgactcctctcaccaaatttggtgaaggagattcaacaattcgtgtgatcaaatatagtgctcctgtaaatcctcatttgagagaatttcattgtggatttgaagatggtaatatttgtttgttcactcaagatgatacagataattttgactggacaaagcaaagtacagcaacaagaaatacaaaatatactcctaatacaggacctaatgctgaccgtagtggctccaaagaaggtttttatatgtacattgagacatcacgacccagattggaaggcgaaaaggctcgacttctcagccctgttttcagcatagctcccaaaaacccttatggacccacaaacactgcatattgtttcagcttcttttatcacatgtatggacaacatataggtgtcttaaatgtttatctacgtttgaaagggcaaacaacaatagagaatccactgtggtcttcaagtgggaataaaggacaaagatggaatgaggctcatgttaatatatacccaattacttcatttcagctcatttttgaaggtatccgaggtcctggaatagaaggtgacattgctattgatgatgtatcaattgcagaaggagaatgtgcaaaacaagacctagcaactaagaattccgttgatggtgctgttgggattttggttcatatatggctttttcccattatcgtcctcatctctatcttaagtcctcgaaggtgaccttatcctggcagaggctataaaagattcaccaggcactggcatgaagaaagagtctttgtaaatggacattgaacaaacaaactaccaaagattcctccactgactactgactcaaaaataaaataataaaaacaaatttttttaagcactggggataaaaagacatcatggaagtataacttattccagactaaacataaaagataatcttgacctgagtagagaagagaccttcaggtgcttttgtggctaaaaagattacagcgtcatctggttgaactctggaaaaaaaaaaaaaaatgaaaaaaagaaaaaaaaaagagctatagaaatccttgtcaaagcacaaagtcatggctggttttgtttcaaatgaatagtttgcttgttaccatggaaacctaatggcctgccaacaaaaacctcactgtaaacagggtacgtgaagagctggcatttattttccttacgagaaggttttcgtagagaattaaataaatgtaggcccttttacctttggctgttacccttccttgaaaataacccgaactcagaattatttaaagcattcatgtttctccccaccttatccccatcccacctttattattattatttttctcccatggctaagctagataactgtatgctgtctctttttgcatgcactactatccaggatggtaaacctgggcttacatgttacacaggcttatcggagtttgcttgcggccacttgaacacccaaactacgtcatctgttccaatgaagaaaccaaaccaccatcttttataaattgccatggaaaccaagtgccttcaatgaaacaagcctgaataattttcaactcagaagcttgcactgctaagagtggtttgtgtaaaactattttataaacaaactacagagcctaaatgtgcaaattacaggcaagacaacaaagccgcttctgaagaagaaaggaccgaagctgctgcgtaagcccatgcagacaagatatttgttgtttaacctcctagacagccatggcctttcggcttattgtccattagaaaatcacttccattgagaccagacatggagcaacactttttttcttccaggttattaaatgggtcaaccagagcaaaaggttattaagaatacttagtgcagaaggtggtaaaacacaaaagtgatttttttactctaacctccatttgaaatgaaattggccctagctttagagggaacaagaaaatgtttgggattgcagtgcatactaactctacagtggaactgggcctgaaaaatctggctttattctaaactctgagggtaatatgcctctgccctttagtcagactctgtgcaaattgtgaaatattattttattattttaccaagattataaaaacacttttacaaaaaaacaaaaacctgtaaaaataattttgagctacctgacgacaaatcatatctttaaccagccagttttccaatgcattgtaaatttcacttaaacctgttggttatgaaaatttgaagatcattttccttaaattatctcagcttttaacttcatttaaaaagacttttgtctaagaagaatattattattatatgttctttcaacaccccaggattaaaaaaactgattatgcaagcaattggaatataagtattaaattatagcatttgcaaatattaatataaaagcacaacaaaatgtagtggaaaatgacaaagcttgttttttaaaacaattctgtagaaatgtttgtgcaaattcagtaattcaacttaaaatataattttacagctatgttcaataaagcctctttccaggtaaggtatgacaagcagtatgtgtgtttgttgagcaatgttcacttatcactaaaatgaaattagttatacaatttattggttaccatgggataaatcttcagtgctccacataccttaatgtctgcagaaagaaattttaataggaactccctgatgcactcccctatattgtaatacatgcagaaagcagttaaacctttgaaggtaaaatatgaaacatatatgaacctggaatttaatgtctattttcagtcagttcaaaaggggaccagtttgaatatttaggtagtgatggaattgatctgaaccaagtcctttaaattaaacataataaacaaatgagtttcataacttatttgaatgaattagacatcttaaaattttttcagagtttcacagtaacccatatactttatcagaccaaagagattcaagtacacaatatctggggcatttcttttacgttttacaaaa

SEQ ID NO: 5168 - DNA, 1103 bp, Homo sapiens
ggagaaggggtggggcagggtatcgctgactcagcagcttccaggttgctctgatgatatattaaggctcctgaatcctaagagaatgttggtgaagatcttaacaccacgccttgagcaagtcgcaagagcgggaggacacagaccaggaaccgagaagggacaagcacatggaagccagcccagcatccgggcccagacacttgatggatccacacatattcacttccaactttaacaatggcattggaaggcataagacctacctgtgctacgaagtggagcgcctggacaatggcacctcggtcaagatggaccagcacaggggctttctacacaaccaggctaagaatcttctctgtggcttttacggccgccatgcggagctgcgcttcttggacctggttccttctttgcagttggacccggcccagatctacagggtcacttggttcatctcctggagcccctgcttctcctggggctgtgccggggaagtgcgtgcgttccttcaggagaacacacacgtgagactgcgtatcttcgctgcccgcatctatgattacgaccccctatataaggaggcactgcaaatgctgcgggatgctggggcccaagtctccatcatgacctacgatgaatttaagcactgctgggacacctttgtggaccaccagggatgtcccttccagccctgggatggactagatgagcacagccaagccctgagtgggaggctgcgggccattctccagaatcagggaaactgaaggatgggcctcagtctctaaggaaggcagagacctgggttgagcagcagaataaaagatcttcttccaagaaatgcaaacagaccgttcaccaccatctccagctgctcacagacaccagcaaagcaatgtgctcctgatcaagtagattttttaaaaatcagagtcaattaattttaattgaaaatttctcttatgttccaagtgtacaagagtaagattatgctcaatattcccagaatagttttcaatgtattaatgaagtgattaattggctccatatttagactaataaaacattaagaatcttccataattgtttccacaaacact

SEQ ID NO: 5169 - DNA, 2810 bp, Homo sapiens; identical to SEQ ID NO: 135

SEQ ID NO: 5170 - DNA, 2482 bp, Homo sapiens
cgtccacaggcggcggagcggccacaatcacagctccgggcattgggggaacccgagccggctgcgccgggggaatccgtgcgggcgccttccgtcccggtcccatcctcgccgcgctccagcacctctgaagttttgcagcgcccagaaaggaggcgaggaaggagggagtgtgtgagaggagggagcaaaaagctcaccctaaaacatttatttcaaggagaaaagaaaaagggggggcgcaaaaatggctggggcaattatagaaaacatgagcaccaagaagctgtgcattgttggtgggattctgctcgtgttccaaatcatcgcctttctggtgggaggcttgattggagaaaatgcagaagtctccatggacgtttccctggcttaccgtgatgacgcgtttgctgagtggactgaaatggcccatgaaagagtaccacggaaactcaaatgcaccttcacatctcccaagactccagagcatgagggccgttactatgaatgtgatgtccttcctttcatggaaattgggtctgtggcccataagttttaccttttaaacatccggctgcctgtgaatgagaagaagaaaatcaatgtgggaattggggagataaaggatatccggttggtggggatccaccaaaatggaggcttcaccaaggtgtggtttgccatgaagaccttccttacgcccagcatcttcatcattatggtgtggtattggaggaggatcaccatgatgtcccgacccccagtgcttctggaaaaagtcatctttgcccttgggatttccatgacctttatcaatatcccagtggaatggttttccatcgggtttgactggacctggatgctgctgtttggtgacatccgacagggcatcttctatgcgatgcttctgtccttctggatcatcttctgtggcgagcacatgatggatcagcacgagcggaaccacatcgcagggtattggaagcaagtcggacccattgccgttggctccttctgcctcttcatatttgacatgtgtgagagaggggtacaactcacgaatcccttctacagtatctggactacagacattggaacagagctggccatggccttcatcatcgtggctggaatctgcctctgcctctacttcctgtttctatgcttcatggtatttcaggtgtttcggaacatcagtgggaagcagtccagcctgccagctatgagcaaagtccggcggctacactatgaggggctaatttttaggttcaagttcctcatgcttatcaccttggcctgcgctgccatgactgtcatcttcttcatcgttagtcaggtaacggaaggccattggaaatggggcggcgtcacagtccaagtgaacagtgcctttttcacaggcatctatgggatgtggaatctgtatgtctttgctctgatgttcttgtatgcaccatcccataaaaactatggagaagaccagtccaatggcgatctgggtgtccatagtggggaagaactccagctcaccaccactatcacccatgtggacggacccactgagatctacaagttgacccgcaaggaggcccaggagtaggaggctgcagcgcccggctgggacggtctctccataccccagcccctctaactagagtggggagcatgccagagagagctcaatgtacaaatgaatgcctcatggctcttagctgtggtttcttggaccagcggcatggacatttgtcagtttgccttctgacggtagcttttggaggaagattcctgcagccactaatgcattgtgtatgataacaaaaactctggtatgacacattttctgtgatcattgttaattagtgacatagtaacatctgtagcagctggttagtaaacctcatgtgggggtggggtgggggtgtattccttgggggatggtttgggccgaatggggagtggaatatttgacatttttcctgttttaaattctaggatagattttaacatcctttgcggtcccagtccaaggtaggctggtgtcatagtcttctcactcctaatccatgaccactgtttttttcctatttatatcaccaggtagcccactgagttaatatttaagttgtcaatagataagtgtccctgttttgtggcataatataactgaatttcatgagaagatttattccaccaggggtatttcagctttgaaaccaaatctgtgtatctaatactaaccaatctgttggatgtgggttttaaaaaatgtttgctaaactacccaagtaagatttactgtattaaatggccttcgggtctgaaaagcttttttaacttcttgcttaaaatgcgttttattttgataagatacttcaaatagcctccaaaagtgtagatccaatcatttaaataaacctgtatgtatatgcatatgtgtacatgcatatcccctcctgctaaaactcataaaaaaaaaaaaaaa

SEQ ID NO: 5171 - DNA, 2069 bp, Homo sapiens
cgtccacaggcggcggagcggccacaatcacagctccgggcattgggggaacccgagccggctgcgccgggggaatccgtgcgggcgccttccgtcccggtcccatcctcgccgcgctccagcacctctgaagttttgcagcgcccagaaaggaggcgaggaaggagggagtgtgtgagaggagggagcaaaaagctcaccctaaaacatttatttcaaggagaaaagaaaaagggggggcgcaaaaatggctggggcaattatagaaaacatgagcaccaagaagctgtgcattgttggtgggattctgctcgtgttccaaatcatcgcctttctggtgggaggcttgattgggcccacaacggcagtgtcctacatgtcggtgaaatgtgtggatgcccgtaagaaccatcacaagacaaaatggttcgtgccttggggacccaatcattgtgacaagatccgagacattgaagaggcaattccaagggaaattgaagccaatgacatcgtgttttctgttcacattcccctcccccacatggagatgagtccttggttccaattcatgctgtttatcctgcagctggacattgccttcaagctaaacaaccaaatcagagaaaatgcagaagtctccatggacgtttccctggcttaccgtgatgacgcgtttgctgagtggactgaaatggcccatgaaagagtaccacggaaactcaaatgcaccttcacatctcccaagactccagagcatgagggccgttactatgaatgtgatgtccttcctttcatggaaattgggtctgtggcccataagttttaccttttaaacatccggctgcctgtgaatgagaagaagaaaatcaatgtgggaattggggagataaaggatatccggttggtggggatccaccaaaatggaggcttcaccaaggtgtggtttgccatgaagaccttccttacgcccagcatcttcatcattatggtgtggtattggaggaggatcaccatgatgtcccgacccccagtgcttctggaaaaagtcatctttgcccttgggatttccatgacctttatcaatatcccagtggaatggttttccatcgggtttgactggacctggatgctgctgtttggtgacatccgacagggcatcttctatgcgatgcttctgtccttctggatcatcttctgtggcgagcacatgatggatcagcacgagcggaaccacatcgcagggtattggaagcaagtcggacccattgccgttggctccttctgcctcttcatatttgacatgtgtgagagaggggtacaactcacgaatcccttctacagtatctggactacagacattggaacagagctggccatggccttcatcatcgtggctggaatctgcctctgcctctacttcctgtttctatgcttcatggtatttcaggtgtttcggaacatcagtgggaagcagtccagcctgccagctatgagcaaagtccggcggctacactatgaggggctaatttttaggttcaagttcctcatgcttatcaccttggcctgcgctgccatgactgtcatcttcttcatcgttagtcaggtaacggaaggccattggaaatggggcggcgtcacagtccaagtgaacagtgcctttttcacaggcatctatgggatgtggaatctgtatgtctttgctctgatgttcttgtatgcaccatcccataaaaactatggagaagaccagtccaatggaatgcaactcccatgtaaatcgagggaagattgtgctttgtttgtttcggaactttatcaagaattgttcagcgcttcgaaatattccttcatcaatgacaacgcagcttctggtatttgagtcaacaaggcaacacatgtttatcagctttgcatttgcagttgtcacagtcacattgattgtacttgtatacgcacacaaatacactcatttagcctttatctcaaaatgttaaatataaggaaaaaagcgtcaacaataaatattctttgagtattgtcttacttctcttaaaaaaaaaaaaaaaaaa

SEQ ID NO: 5172 - DNA, 4024 bp, Homo sapiens; identical to SEQ ID NO: 113

SEQ ID NO: 5173 - DNA, 3830 bp, Homo sapiens
cttcttcagccactgcgaggtgaagctttaaacttcagacttggaggtgggctgtgtgcagtaaactggaatgctctccctcgctcactcctcagtgtaggagtgatctgaagcaggacaagctcagcctgcagctgccgtgggctttgtgtggactggacgcagagcttgggagacgggggagggctattactccaattcactgtcaatggaattacagctatagcggcagtgtatataggattgctttttctcgtcttcctgggttctgaagtaacggaagctaccttgtataaagacctcaacactgctgaccatgatcagcgcagcctggagcatcttcctcatcgggactaaaattgggctgttccttcaagtagcacctctatcagttatggctaaatcctgtccatctgtgtgtcgctgcgatgcgggtttcatttactgtaatgatcgctttctgacatccattccaacaggaataccagaggatgctacaactctctaccttcagaacaaccaaataaataatgctgggattccttcagatttgaaaaacttgctgaaagtagaaagaatatacctataccacaacagtttagatgaatttcctaccaacctcccaaagtatgtaaaagagttacatttgcaagaaaataacataaggactatcacttatgattcactttcaaaaattccctatctggaagaattacatttagatgacaactctgtctctgcagttagcatagaagagggagcattccgagacagcaactatctccgactgcttttcctgtcccgtaatcaccttagcacaattccctggggtttgcccaggactatagaagaactacgcttggatgataatcgcatatccactatttcatcaccatctcttcaaggtctcactagtctaaaacgcctggttctagatggaaacctgttgaacaatcatggtttaggtgacaaagttttcttcaacctagttaatttgacagagctgtccctggtgcggaattccctgactgctgcaccagtaaaccttccaggcacaaacctgaggaagctttatcttcaagataaccacatcaatcgggtgcccccaaatgctttttcttatctaaggcagctctatcgactggatatgtccaataataacctaagtaatttacctcagggtatctttgatgatttggacaatataacacaactgattcttcgcaacaatccctggtattgcgggtgcaagatgaaatgggtacgtgactggttacaatcactacctgtgaaggtcaacgtgcgtgggctcatgtgccaagccccagaaaaggttcgtgggatggctattaaggatctcaatgcagaactgtttgattgtaaggacagtgggattgtaagcaccattcagataaccactgcaatacccaacacagtgtatcctgcccaaggacagtggccagctccagtgaccaaacagccagatattaagaaccccaagctcactaaggatcaccaaaccacagggagtccctcaagaaaaacaattacaattactgtgaagtctgtcacctctgataccattcatatctcttggaaacttgctctacctatgactgctttgagactcagctggcttaaactgggccatagcccggcatttggatctataacagaaacaattgtaacaggggaacgcagtgagtacttggtcacagccctggagcctgattcaccctataaagtatgcatggttcccatggaaaccagcaacctctacctatttgatgaaactcctgtttgtattgagactgaaactgcaccccttcgaatgtacaaccctacaaccaccctcaatcgagagcaagagaaagaaccttacaaaaaccccaatttacctttggctgccatcattggtggggctgtggccctggttaccattgcccttcttgctttagtgtgttggtatgttcataggaatggatcgctcttctcaaggaactgtgcatatagcaaagggaggagaagaaaggatgactatgcagaagctggcactaagaaggacaactctatcctggaaatcagggaaacttcttttcagatgttaccaataagcaatgaacccatctcgaaggaggagtttgtaatacacaccatatttcctcctaatggaatgaatctgtacaaaaacaatcacagtgaaagcagtagtaaccgaagctacagagacagtggtattccagactcagatcactcacactcatgatgctgaaggactcacagcagacttgtgttttgggttttttaaacctaagggaggtgatggtaggaaccctgttctactgcaaaacactggaaaaagagactgaaaaaaagcaatgtactgtacatttgccatataatttatatttaagaactttttattaaaagtttcaaatttcaggttactgctgcgattgatgtagtggagatgcctgaacacaattctatattttagtattttttagtaatttgtactgtattttccttgcaaatattggagttataaaccatttactttgtgttctactgagtaagatgacttgttgactgtgaaagtgaattttcttgctgtgtcgaacaatcaggactgcattcatatgagatccttgtagtataagcacaggccatttttcactttggtattaataaaatgtaaaaaaaaaaaactggctgaatggctgaatgagataaaatttaattttaaaaaatggttatgaaataatgttccaattattaaatttgtattatcccagtggtattcaataaatcaaaatgtgtgaagtaatgggcaatatcaaacttcctgcatatctccatttttgctctaggcaaattaattatccttaaaaaagttaagcatatcttctgaactgaatacatcagctggcataaaaggagcatgaagtctgttaaagccattgtcagcaaagctttgaaaataaaggacttcacaaaaacggtaatgtaaatgtgcttccaagttggggggaaaatgtgtacttaggaaaacatggaaacttagacttgtatagtgtaatgaacacaaataccaaaactgcattttggttttgcctataccatcctgatttttgaaaagtgaattataaacacaaaattgttagtgtttatgatgtttttatcataaaggatgtcagagaaactttatgcatattaaaaatgtaatgtaattataagcgattcccctcaacaatccagagaaagtagttctttaaataagagataatttaaagaaaaataaatactagacatcaaatttagatctggtttatgtcaaaggttttaacactgtacataaatgttcaatttacttttacaaagatcaagaatactgcccattactgtcacaattttccagatattatataatgaactcgtaatgtaacatttccttctagcttcctactgaattgtgagctgttacttgttgaaaaaccatatcacttttctgttgccatgattttttttttttcaacaaaaaaccaaagtgcattgtacgccctttggccagtcttgtatgtgccttgatccaacgctacatgtattcagcttttaaaactccacaaatttttcatactccttaaatatgaaaaattatggtcttattgctgaataaaacttttaaaaagtacagaataattgtgcttgctttttcaggattgtgttactatcactaagtagcaaattgcccagcacattagtcctaaacgtcccatgtatttttctaggcataaaaataaaagttggctaaaaattttaaaaaatcaaca

SEQ ID NO: 5174 - DNA, 1312 bp, Homo sapiens; identical to SEQ ID NO: 813

SEQ ID NO: 5175 - DNA, 1083 bp, Homo sapiens
atggcgggacacctggcttcggatgcctgccttcttgccccctccaggcggtggaggtgatgggccaggggggccggagccgggctgggttgatcctcggacctggctaagcttccaaggccctcctggagggccaggaatcgggccgggagttgggtcaggctctgaggtgtgggggattcccccatgccccccgctgtatgagttctgtggggggatggcgtactgtgggcctcaggttggagtgcggctagtgccccaaggcggcttggagacctctcagcctgagggcgaagcaggagtcagggtggagagcaactccgatggcacctccctggagccctgcaccgtcccccctggtgccgtgaaactggagaaggagaagctggagcaaaacccgcaggagtcccagaacatcaaagctctgcagaaagaactcgaacaatttgccaagctcctgaagcagaagaggatcaccctgggatatacacaggccgatgtggggctcaccctgggggttctatttgggaaggtgttcagccaaacgaccatctgccgctttgagggtctgcagcttagcttcaagaacatgtgtaagctgcggcccttgctgcagaagtgggtggaggaagctgacaacaatgaaaatcttcaggagacatgcaaagcagaaaccctcttgcaggctcgaaagagaaagcgaaccagtatcgagaaccgagtgagaggcaacctggagaatttgttcctgcagtgcccgaaacccacactgcagcagatcagccacatcgcccagcagcttgggctcgagaaggatgtggtccgagtgtggttctgtaaccggtgccagaaaggcaagcaatcaagcagcgactatgcataacgagaggattttgaggctgctgggtctcctttctcaggggtaccagtatcctttcctctggccccagggccccattttggtaccccaggctatgggagccctcacttcactgcactgtactcctcggtccctttccctgagggggaagcctttcccccgtctccgtcaccaccctgggctctcccatgcattcaaactga

SEQ ID NO: 5176 - DNA, 2644 bp, Homo sapiens
ctcaaaaggggccggatttccttctcctggaggcagatgttgcctctctctctcgctcggattggttcagtgcactctagaaacactgctgtggtggagaaactggaccccaggtctggagcgaattccagcctgcagggctgataagcgaggcattagtgagattgagagagactttaccccgccgtggtggttggagggcgcgcagtagagcagcagcacaggcgcgggtcccgggaggccggctctgctcgcgccgagatgtggaatctccttcacgaaaccgactcggctgtggccaccgcgcgccgcccgcgctggctgtgcgctggggcgctggtgctggcgggtggcttctttctcctcggcttcctcttcggttaaaagccaactgcaaggtctaatgactgcaggatctagctatccattgtttctggccgcctatgcgtgcactgggtgtctggcagagaggctggggtggtttataaaatcctccaatgaagctactaacattactccaaagcataatatgaaagcatttttggatgaattgaaagctgagaacatcaagaagttcttatataattttacacagataccacatttagcaggaacagaacaaaactttcagcttgcaaagcaaattcaatcccagtggaaagaatttggcctggattctgttgagctagcacattatgatgtcctgttgtcctacccaaataagactcatcccaactacatctcaataattaatgaagatggaaatgagattttcaacacatcattatttgaaccacctcctccaggatatgaaaatgtttcggatattgtaccacctttcagtgctttctctcctcaaggaatgccagagggcgatctagtgtatgttaactatgcacgaactgaagacttctttaaattggaacgggacatgaaaatcaattgctctgggaaaattgtaattgccagatatgggaaagttttcagaggaaataaggttaaaaatgcccagctggcaggggccaaaggagtcattctctactccgaccctgctgactactttgctcctggggtgaagtcctatccagatggttggaatcttcctggaggtggtgtccagcgtggaaatatcctaaatctgaatggtgcaggagaccctctcacaccaggttacccagcaaatgaatatgcttataggcgtggaattgcagaggctgttggtcttccaagtattcctgttcatccaattggatactatgatgcacagaagctcctagaaaaaatgggtggctcagcaccaccagatagcagctggagaggaagtctcaaagtgccctacaatgttggacctggctttactggaaacttttctacacaaaaagtcaagatgcacatccactctaccaatgaagtgacaagaatttacaatgtgataggtactctcagaggagcagtggaaccagacagatatgtcattctgggaggtcaccgggactcatgggtgtttggtggtattgaccctcagagtggagcagctgttgttcatgaaattgtgaggagctttggaacactgaaaaaggaagggtggagacctagaagaacaattttgtttgcaagctgggatgcagaagaatttggtcttcttggttctactgagtgggcagaggagaattcaagactccttcaagagcgtggcgtggcttatattaatgctgactcatctatagaaggaaactacactctgagagttgattgtacaccgctgatgtacagcttggtacacaacctaacaaaagagctgaaaagccctgatgaaggctttgaaggcaaatctctttatgaaagttggactaaaaaaagtccttccccagagttcagtggcatgcccaggataagcaaattgggatctggaaatgattttgaggtgttcttccaacgacttggaattgcttcaggcagagcacggtatactaaaaattgggaaacaaacaaattcagcggctatccactgtatcacagtgtctatgaaacatatgagttggtggaaaagttttatgatccaatgtttaaatatcacctcactgtggcccaggttcgaggagggatggtgtttgagctagccaattccatagtgctcccttttgattgtcgagattatgctgtagttttaagaaagtatgctgacaaaatctacagtatttctatgaaacatccacaggaaatgaagacatacagtgtatcatttgattcacttttttctgcagtaaagaattttacagaaattgcttccaagttcagtgagagactccaggactttgacaaaagcaagcatgtcatctatgctccaagcagccacaacaagtatgcaggggagtcattcccaggaatttatgatgctctgtttgatattgaaagcaaagtggacccttccaaggcctggggagaagtgaagagacagatttatgttgcagccttcacagtgcaggcagctgcagagactttgagtgaagtagcctaagaggattctttagagaatccgtattgaatttgtgtggtatgtcactcagaaagaatcgtaatgggtatattgataaattttaaaattggtatatttgaaataaagttgaatattatatataaaaaa

SEQ ID NO: 5177 - DNA, 2737 bp, Homo sapiens
ctcaaaaggggccggatttccttctcctggaggcagatgttgcctctctctctcgctcggattggttcagtgcactctagaaacactgctgtggtggagaaactggaccccaggtctggagcgaattccagcctgcagggctgataagcgaggcattagtgagattgagagagactttaccccgccgtggtggttggagggcgcgcagtagagcagcagcacaggcgcgggtcccgggaggccggctctgctcgcgccgagatgtggaatctccttcacgaaaccgactcggctgtggccaccgcgcgccgcccgcgctggctgtgcgctggggcgctggtgctggcgggtggcttctttctcctcggcttcctcttcggttaaaagccaactgcaaggtctaatgactgcaggatctagctatccattgtttctggccgcctatgcgtgcactgggtgtctggcagagaggctggggtggtttataaaatcctccaatgaagctactaacattactccaaagcataatatgaaagcatttttggatgaattgaaagctgagaacatcaagaagttcttatataattttacacagataccacatttagcaggaacagaacaaaactttcagcttgcaaagcaaattcaatcccagtggaaagaatttggcctggattctgttgagctagcacattatgatgtcctgttgtcctacccaaataagactcatcccaactacatctcaataattaatgaagatggaaatgagattttcaacacatcattatttgaaccacctcctccaggatatgaaaatgtttcggatattgtaccacctttcagtgctttctctcctcaaggaatgccagagggcgatctagtgtatgttaactatgcacgaactgaagacttctttaaattggaacgggacatgaaaatcaattgctctgggaaaattgtaattgccagatatgggaaagttttcagaggaaataaggttaaaaatgcccagctggcaggggccaaaggagtcattctctactccgaccctgctgactactttgctcctggggtgaagtcctatccagatggttggaatcttcctggaggtggtgtccagcgtggaaatatcctaaatctgaatggtgcaggagaccctctcacaccaggttacccagcaaatgaatatgcttataggcgtggaattgcagaggctgttggtcttccaagtattcctgttcatccaattggatactatgatgcacagaagctcctagaaaaaatgggtggctcagcaccaccagatagcagctggagaggaagtctcaaagtgccctacaatgttggacctggctttactggaaacttttctacacaaaaagtcaagatgcacatccactctaccaatgaagtgacaagaatttacaatgtgataggtactctcagaggagcagtggaaccagacagatatgtcattctgggaggtcaccgggactcatgggtgtttggtggtattgaccctcagagtggagcagctgttgttcatgaaattgtgaggagctttggaacactgaaaaaggaagggtggagacctagaagaacaattttgtttgcaagctgggatgcagaagaatttggtcttcttggttctactgagtgggcagaggagaattcaagactccttcaagagcgtggcgtggcttatattaatgctgactcatctatagaaggaaactacactctgagagttgattgtacaccgctgatgtacagcttggtacacaacctaacaaaagagctgaaaagccctgatgaaggctttgaaggcaaatctctttatgaaagttggactaaaaaaagtccttccccagagttcagtggcatgcccaggataagcaaattgggatctggaaatgattttgaggtgttcttccaacgacttggaattgcttcaggcagagcacggtatactaaaaattgggaaacaaacaaattcagcggctatccactgtatcacagtgtctatgaaacatatgagttggtggaaaagttttatgatccaatgtttaaatatcacctcactgtggcccaggttcgaggagggatggtgtttgagctagccaattccatagtgctcccttttgattgtcgagattatgctgtagttttaagaaagtatgctgacaaaatctacagtatttctatgaaacatccacaggaaatgaagacatacagtgtatcatttgattcacttttttctgcagtaaagaattttacagaaattgcttccaagttcagtgagagactccaggactttgacaaaagcaacccaatagtattaagaatgatgaatgatcaactcatgtttctggaaagagcatttattgatccattagggttaccagacaggcctttttataggcatgtcatctatgctccaagcagccacaacaagtatgcaggggagtcattcccaggaatttatgatgctctgtttgatattgaaagcaaagtggacccttccaaggcctggggagaagtgaagagacagatttatgttgcagccttcacagtgcaggcagctgcagagactttgagtgaagtagcctaagaggattctttagagaatccgtattgaatttgtgtggtatgtcactcagaaagaatcgtaatgggtatattgataaattttaaaattggtatatttgaaataaagttgaatattatatataaaaaa

SEQ ID NO: 5178 - DNA, 2266 bp, Homo sapiens
ctcaaaaggggccggatttccttctcctggaggcagatgttgcctctctctctcgctcggattggttcagtgcactctagaaacactgctgtggtggagaaactggaccccaggtctggagcgaattccagcctgcagggctgataagcgaggcattagtgagattgagagagactttaccccgccgtggtggttggagggcgcgcagtagagcagcagcacaggcgcgggtcccgggaggccggctctgctcgcgccgagatgtggaatctccttcacgaaaccgactcggctgtggccaccgcgcgccgcccgcgctggctgtgcgctggggcgctggtgctggcgggtggcttctttctcctcggcttcctcttcgggtggtttataaaatcctccaatgaagctactaacattactccaaagcataatatgaaagcatttttggatgaattgaaagctgagaacatcaagaagttcttataattttcaacacatcattatttgaaccacctcctccaggatatgaaaatgtttcggatattgtaccacctttcagtgctttctctcctcaaggaatgccagagggcgatctagtgtatgttaactatgcacgaactgaagacttctttaaattggaacgggacatgaaaatcaattgctctgggaaaattgtaattgccagatatgggaaagttttcagaggaaataagaatatgcttataggcgtggaattgcagaggctgttggtcttccaagtattcctgttcatccaattggatactatgatgcacagaagctcctagaaaaaatgggtggctcagcaccaccagatagcagctggagaggaagtctcaaagtgccctacaatgttggacctggctttactggaaacttttctacacaaaaagtcaagatgcacatccactctaccaatgaagtgacaagaatttacaatgtgataggtactctcagaggagcagtggaaccagacagatatgtcattctgggaggtcaccgggactcatgggtgtttggtggtattgaccctcagagtggagcagctgttgttcatgaaattgtgaggagctttggaacactgaaaaaggaagggtggagacctagaagaacaattttgtttgcaagctgggatgcagaagaatttggtcttcttggttctactgagtgggcagaggagaattcaagactccttcaagagcgtggcgtggcttatattaatgctgactcatctatagaaggaaactacactctgagagttgattgtacaccgctgatgtacagcttggtacacaacctaacaaaagagctgaaaagccctgatgaaggctttgaaggcaaatctctttatgaaagttggactaaaaaaagtccttccccagagttcagtggcatgcccaggataagcaaattgggatctggaaatgattttgaggtgttcttccaacgacttggaattgcttcaggcagagcacggtatactaaaaattgggaaacaaacaaattcagcggctatccactgtatcacagtgtctatgaaacatatgagttggtggaaaagttttatgatccaatgtttaaatatcacctcactgtggcccaggttcgaggagggatggtgtttgagctagccaattccatagtgctcccttttgattgtcgagattatgctgtagttttaagaaagtatgctgacaaaatctacagtatttctatgaaacatccacaggaaatgaagacatacagtgtatcatttgattcacttttttctgcagtaaagaattttacagaaattgcttccaagttcagtgagagactccaggactttgacaaaagcaacccaatagtattaagaatgatgaatgatcaactcatgtttctggaaagagcatttattgatccattagggttaccagacaggcctttttataggcatgtcatctatgctccaagcagccacaacaagtatgcaggggagtcattcccaggaatttatgatgctctgtttgatattgaaagcaaagtggacccttccaaggcctggggagaagtgaagagacagatttatgttgcagccttcacagtgcaggcagctgcagagactttgagtgaagtagcctaagaggattctttagagaatccgtattgaatttgtgtggtatgtcactcagaaagaatcgtaatgggtatattgataaattttaaaattggtatatttgaaataaagttgaatattatatataaaaaa

SEQ ID NO: 5179 - DNA, 1084 bp, Homo sapiens
catggcgggacacctggcttcggatttcgccttctcaccccctccaggcggtggaggtgatgggccaggggggccggagccgggctgggttgatcctcggacctggctaagcttccaaggccctcctggagggccaggaatcgggccggggtttgggccaggctctgaggagtgggggattcccccatgtcccccgccgtatgagttctgcggggggatggcgtactgtgggcctcagactggagtggggctagtgccccaagacggcttggagacctctcagcctgagggcgaagcaggagtcggggtggagagcaactccgatggggcctccccggagccctgcaccgtcccctctggtgccgtgaagctggagaaggagaagctggagcaaaacccggaggagtcccaggacatcaaagctctgcagaaagaactcgagcaatttgccaagctcctgaagcagaagaggatcaccctgggatatacacaggccgatgtggctcaccctgggggttctatttgggaaggtgttcagccaaacgaccatctgccgctttgaggctctgcagcttagcttcaagaacatgtgtgagctgcggcccttgctgcagaagtgggtggaggaagctgacaacaatgaaaatcttcaggagatatgcaaagcagaaaccctcgtgcaggcccgaaagagaaagcgaaccagtatcgagaaccaagtgagaggcaacctggagaatttgttcctgcggtgcccgaaacccacactgcagcagatcagccacatcgcccagcagcttgggctggagaaggatgtggtccgagtgtggttctgtaaccggcgccagaagggcaagcgatcaagcagtggctatgcacaacgagaggattttgaggctgttgggtctcctttctcagggggaccagtgtcctttcctctggccccagggccccattttggtaccccaggctatgggagccctcacttcactgcactgtactcctcggtccctttccctgagggggaagcctttccccctgtctccgtcaccactctgggctctcccatgcattcaaactgagg

SEQ ID NO: 5180 - DNA, 6305 bp, Homo sapiens; identical to SEQ ID NO: 163

SEQ ID NO: 5181 - DNA, 6322 bp, Homo sapiens
agtccgagcctcagacgcgcgggcgcgggggacggcgcaggggccgcctggctggagcagccagaggggatagcttcgtcgagaacggaggacaccggcggtccagggtcctgggcagtcgcgccagagctgagcggagggcgcggcgcgagaacgaatctttgtgacattctctctcagcattctttatcccctgtttgctgaagacttcgacaaaagctggtcttagctgttggcattctcctgagaaaaggatagcttcagaaatcagaaaaacatttgggaggtgtctagcccagtggaccttctgaagagcaatgctaagaagacgtttggtttaaagaattaaaaggaagaacaacttaagagcttcttcaaagtttcccgcatgaaaattacttaaacgttgcacacaacgtttcacaaaatcttttgtgaaagaagaaaaggaaattcagtgtgtgagtctcagcaggagttaagctaatgcagcttaaaataatgccgaaaaagaagcgcttatctgcgggcagagtgcccctgattctcttcctgtgccagatgattagtgcactggaagtacctcttgatctggtacagcctccaaccatcacccaacagtctccaaaagattacattattgaccctcgggagaatattgtaatccagtgtgaagccaaagggaaaccgcccccaagcttttcctggacccgtaatgggactcattttgacatcgataaagaccctctggtcaccatgaagcctggcacaggaacgctcataattaacatcatgagcgaagggaaagctgagacctatgaaggagtctatcagtgtacagcaaggaacgaacgcggagctgcagtttctaataacattgttgtccgcccatccagatcaccattgtggaccaaagaaaaacttgaaccaatcacacttcaaagtggtcagtctttagtacttccctgcagacccccaattggattaccaccacctataatattttggatggataattcctttcaaagacttccacaaagtgagagagtttctcaaggtttgaatggggacctttatttttccaatgtcctcccagaggacacccgcgaagactatatctgttatgctagatttaatcatactcaaaccatacagcagaagcaacctatttctgtgaaggtgatttcagtggatgaattgaatgacactatagctgctaatttgagtgacactgagttttatggtgctaaatcaagtagagagaggccaccaacatttttaactccagaaggcaatgcaagtaacaaagaggaattaagaggaaatgtgctttcactggagtgcattgcagaaggactgcctaccccaattatttactgggcaaaggaagatggaatgctacccaaaaacaggacagtttataagaactttgagaaaaccttgcagatcattcatgtttcagaagcagactctggaaattaccaatgtatagcaaaaaacgcattaggagccatccaccataccatttctgttagagttaaagcggctccatactggatcacagcccctcaaaatcttgtgctgtccccaggagaggatgggaccttgatctgcagagctaatggcaaccccaaacccagaattagctggttaacaaatggagtcccaatagaaattgcccctgatgaccccagcagaaaaatagatggcgataccattattttttcaaatgttcaagaaagatcaagtgcagtctatcagtgcaatgcctctaatgaatatggatatttactggcaaacgcatttgtaaatgtgctggctgagccaccacgaatcctcacacctgcaaacacactctaccaggtcattgcaaacaggcctgctttactagactgtgccttctttgggtctcctctcccaaccatcgagtggtttaaaggagctaaaggaagtgctcttcatgaagatatttatgttttacatgaaaatggaactttggaaattcctgtggcccaaaaggacagtacaggaacttatacgtgtgttgcaaggaataaattagggatggcgaagaatgaagttcacttagaaatcaaagatcctacatggatcgttaaacagcccgaatatgcagttgtgcaaagagggagcatggtgtcctttgaatgcaaagtgaaacatgatcacaccttatccctcactgtcctgtggctgaaggacaacagggaactgcccagtgatgaaaggttcactgttgacaaggatcatctagtggtagctgatgtcagtgacgatgacagcgggacctacacgtgtgtggccaacaccactctggacagcgtctccgccagcgctgtgcttagcgttgttgatgtcccaaatcctccctttgacttagaactgacagatcaacttgacaaaagtgttcagctgtcatggaccccaggcgatgacaacaatagccccattacaaaattcatcatcgaatatgaagatgcaatgcacaagccagggctgtggcaccaccaaactgaagtttctggaacacagaccacagcccagctgaagctgtctccttacgtgaactactccttccgcgtgatggcagtgaacagcattgggaagagcttgcccagcgaggcgtctgagcagtatttgacgaaagcctcagaaccagataaaaaccccacagctgtggaaggactgggatcagagcctgataatttggtgattacgtggaagcccttgaatggtttcgaatctaatgggccaggccttcagtacaaagttagctggcgccagaaagatggtgatgatgaatggacatctgtggttgtggcaaatgtatccaaatatattgtctcaggcacgccaacctttgttccatacctgatcaaagttcaggccctgaatgacatggggtttgcccccgagccagctgtagtcatgggacattctggagaagacctcccaatggtggctcctgggaacgtgcgtgtgaatgtggtgaacagtaccttagccgaggtgcactgggacccagtacctctgaaaagcatccgaggacacctacaaggctatcggatttactattggaagacccagagttcatctaaaagaaacagacgtcacattgagaaaaagatcctcaccttccaaggcagcaagactcatggcatgttgccggggctagagccctttagccactacacactgaatgtccgagtggtcaatgggaaaggggagggcccagccagccctgacagagtctttaatactccagaaggagtccccagtgctccctcgtctttgaagattgtgaatccaacactggactctctcactttggaatgggatccaccgagccacccgaatggcattttgacagagtacaccttaaagtatcagccaattaacagcacacatgaattaggccctctggtagatttgaaaattcctgccaacaagacacggtggactttaaaaaatttaaatttcagcactcgatataagttttatttctatgcacaaacatcagcaggatcaggaagtcaaattacagaggaagcagtaacaactgtggatgaagcgatggcaagccggcaggtggatattgcaactcagggctggttcattggtctgatgtgtgctgttgctctccttatcttaattttgctgattgtttgcttcatcagaagaaacaagggtggtaaatatccagttaaagaaaaggaagatgcccatgctgaccctgaaatccagcctatgaaggaagatgatgggacatttggagaatacagtgatgcagaagaccacaagcctttgaaaaaaggaagtcgaactccttcagacaggactgtgaaaaaagaagatagtgacgacagcctagttgactatggagaaggggttaatggccagttcaatgaggatggctcctttattggacaatacagtggtaagaaagagaaagagccggctgaaggaaacgaaagctcagaggcaccttctcctgtcaacgccatgaattcctttgtttaatttttaagctctttgccaatattccatttctctagaatgtttatcctaagcacttgtttgtcagccctctcatactatgaacatatgggtagagagtatattttctgctgtatgttagtattatgagaatagttacagcaaaaacataactcagtcaaatgatatgttaatatgaactggaatgcaaagtgcatactttttcattcaaaatgggtattcttgatttcctcagaactgataaaaaataatgcaacatcaccaacagatcctgttatttcctctgcaggatacagttcaatatgatgcatgaaaaatgctccacatttaaaggacatacccgtgtatgttatgaaaacatggtttgatactttgtttatactaccctcagctgaacccctatatatgaattccgttttcattgtcaagaatgttactgtagtattctctagaacttcaatgtctttgtggacattgttgtgaaattggtgactatgtatagctgtcgttagtctttttgggagactgttaggaacagtttgtacagtatatacttgctaaatgagttcattatgacagtcacattgctgatgcttactgagaactattacctactcttggctcctgttactccgtaggcttcttaatcttccaggcattacagcagcacagtgttctactttttacatcatttctatgttcggttgtttttaggcataaacaatgtgtattgcagtgcatttcggcatttgtgccatactgaaagaatcaaaaacaaatcatccaaattaaatttcaaacattatttcagagaacacagggcaagacacatacagtgccttcagatattaagcattccacaacatcgtgcattctgtatcagctggtccagtccattctgggtcctagattactgtcattgtctaaaagtaacttttaaaaagcagagttcatgaaaactgcaatgctgggaaaagaaggaaacatgaaaataaaaataagacagtttattagaaatagcatttcctcataagcataaaaagaaaatctttgttgccaactgaagcacatgatgattttgtggtcctttatggtttctattacattcagtaagaaagatgtcaacatgctagaaaattaattttaaaactaagttattccaacactaaaagcatacaacagcatgccaacagtaatatattattctccaagactttacctatgtaagtgttcaaaactctgcagcattaaacaacgtgtatgcaaattgttatggatacatttcagaatctaagaaatcaggcaagtgcttaaaaggccaacggtccaagggattacatctgcagtttaaaaagtaaatatatattctatcgtattcataaacaatatctatcaaatgggttacctccaaatatgaaaatctataacaacctatggttgaaggaatgctcagtttcatttgccaataaattggtttctcataacttgcatcaagtttaattttaagtaaagctttttatatgtagatattttgttgaatttgtaaatacacttaaaatgtagatgctatatgcttataggtgttacatacaaataaacatgcaatgtttatgttgtactgtataagaggtaagctaattaatgcagtgaatgggattggaaagcatctacttaaatatctattgggttcccccctccccccaccttttttgctgtgaaactgaaatagtgaacttttctacgtattgacagcagatttttcgatgaaatcttcagagctttgcctatggggcacagtaggcctagtaacctggcatgtttgatatatgtaggtaaagcataatttaaagtaatcccaggtaaagatggccctaaatactttcatgtctctatattcatttttcacagatccacctgtctcttgaaaatataaaaagacaaaacaggtttgccttggcatcagagagcacaaagattaaaagttactttaaatttgccaatattttgggagaacaataaaactacattttttcctcttccatactggtagatgcgaaatttatctgtgcatgaaagggtcacttctgtaatagtgcaacagatttggtattaaaaattaaatgtggttttaaaagttcctctctcttttgtaatttatgttcccaattgagtgtgaatgtccaagtaatggtgtatgtaatggtacaggcaaatgtgactggatttccctcaaaaaagtaactattaaacagtcttgatctctttgtgacttttaactttttcaaac

SEQ ID NO: 5182 - DNA, 6406 bp, Homo sapiens
agtccgagcctcagacgcgcgggcgcgggggacggcgcaggggccgcctggctggagcagccagaggggatagcttcgtcgagaacggaggacaccggcggtccagggtcctgggcagtcgcgccagagctgagcggagggcgcggcgcgagaacgaatctttgtgacattctctctcagcattctttatcccctgtttgctgaagacttcgacaaaagctggtcttagctgttggcattctcctgagaaaaggatagcttcagaaatcagaaaaacatttgggaggtgtctagcccagtggaccttctgaagagcaatgctaagaagacgtttggtttaaagaattaaaaggaagaacaacttaagagcttcttcaaagtttcccgcatgaaaattacttaaacgttgcacacaacgtttcacaaaatcttttgtgaaagaagaaaaggaaattcagtgtgtgagtctcagcaggagttaagctaatgcagcttaaaataatgccgaaaaagaagcgcttatctgcgggcagagtgcccctgattctcttcctgtgccagatgattagtgcactggaagtacctcttgatccaaaacttcttgaagacttggtacagcctccaaccatcacccaacagtctccaaaagattacattattgaccctcgggagaatattgtaatccagtgtgaagccaaagggaaaccgcccccaagcttttcctggacccgtaatgggactcattttgacatcgataaagaccctctggtcaccatgaagcctggcacaggaacgctcataattaacatcatgagcgaagggaaagctgagacctatgaaggagtctatcagtgtacagcaaggaacgaacgcggagctgcagtttctaataacattgttgtccgcccatccagatcaccattgtggaccaaagaaaaacttgaaccaatcacacttcaaagtggtcagtctttagtacttccctgcagacccccaattggattaccaccacctataatattttggatggataattcctttcaaagacttccacaaagtgagagagtttctcaaggtttgaatggggacctttatttttccaatgtcctcccagaggacacccgcgaagactatatctgttatgctagatttaatcatactcaaaccatacagcagaagcaacctatttctgtgaaggtgatttcagtggatgaattgaatgacactatagctgctaatttgagtgacactgagttttatggtgctaaatcaagtagagagaggccaccaacatttttaactccagaaggcaatgcaagtaacaaagaggaattaagaggaaatgtgctttcactggagtgcattgcagaaggactgcctaccccaattatttactgggcaaaggaagatggaatgctacccaaaaacaggacagtttataagaactttgagaaaaccttgcagatcattcatgtttcagaagcagactctggaaattaccaatgtatagcaaaaaacgcattaggagccatccaccataccatttctgttagagttaaagcggctccatactggatcacagcccctcaaaatcttgtgctgtccccaggagaggatgggaccttgatctgcagagctaatggcaaccccaaacccagaattagctggttaacaaatggagtcccaatagaaattgcccctgatgaccccagcagaaaaatagatggcgataccattattttttcaaatgttcaagaaagatcaagtgcagtctatcagtgcaatgcctctaatgaatatggatatttactggcaaacgcatttgtaaatgtgctggctgagccaccacgaatcctcacacctgcaaacacactctaccaggtcattgcaaacaggcctgctttactagactgtgccttctttgggtctcctctcccaaccatcgagtggtttaaaggagctaaaggaagtgctcttcatgaagatatttatgttttacatgaaaatggaactttggaaattcctgtggcccaaaaggacagtacaggaacttatacgtgtgttgcaaggaataaattagggatggcgaagaatgaagttcacttagaaatcaaagatcctacatggatcgttaaacagcccgaatatgcagttgtgcaaagagggagcatggtgtcctttgaatgcaaagtgaaacatgatcacaccttatccctcactgtcctgtggctgaaggacaacagggaactgcccagtgatgaaaggttcactgttgacaaggatcatctagtggtagctgatgtcagtgacgatgacagcgggacctacacgtgtgtggccaacaccactctggacagcgtctccgccagcgctgtgcttagcgttgttgctcctactccaactccagctcccgtttacgatgtcccaaatcctccctttgacttagaactgacagatcaacttgacaaaagtgttcagctgtcatggaccccaggcgatgacaacaatagccccattacaaaattcatcatcgaatatgaagatgcaatgcacaagccagggctgtggcaccaccaaactgaagtttctggaacacagaccacagcccagctgaagctgtctccttacgtgaactactccttccgcgtgatggcagtgaacagcattgggaagagcttgcccagcgaggcgtctgagcagtatttgacgaaagcctcagaaccagataaaaaccccacagctgtggaaggactgggatcagagcctgataatttggtgattacgtggaagcccttgaatggtttcgaatctaatgggccaggccttcagtacaaagttagctggcgccagaaagatggtgatgatgaatggacatctgtggttgtggcaaatgtatccaaatatattgtctcaggcacgccaacctttgttccatacctgatcaaagttcaggccctgaatgacatggggtttgcccccgagccagctgtagtcatgggacattctggagaagacctcccaatggtggctcctgggaacgtgcgtgtgaatgtggtgaacagtaccttagccgaggtgcactgggacccagtacctctgaaaagcatccgaggacacctacaaggctatcggatttactattggaagacccagagttcatctaaaagaaacagacgtcacattgagaaaaagatcctcaccttccaaggcagcaagactcatggcatgttgccggggctagagccctttagccactacacactgaatgtccgagtggtcaatgggaaaggggagggcccagccagccctgacagagtctttaatactccagaaggagtccccagtgctccctcgtctttgaagattgtgaatccaacactggactctctcactttggaatgggatccaccgagccacccgaatggcattttgacagagtacaccttaaagtatcagccaattaacagcacacatgaattaggccctctggtagatttgaaaattcctgccaacaagacacggtggactttaaaaaatttaaatttcagcactcgatataagttttatttctatgcacaaacatcagcaggatcaggaagtcaaattacagaggaagcagtaacaactgtggatgaagctggtattcttccacctgatgtaggtgcaggcaaagcgatggcaagccggcaggtggatattgcaactcagggctggttcattggtctgatgtgtgctgttgctctccttatcttaattttgctgattgtttgcttcatcagaagaaacaagggtggtaaatatccagttaaagaaaaggaagatgcccatgctgaccctgaaatccagcctatgaaggaagatgatgggacatttggagaatacagtgatgcagaagaccacaagcctttgaaaaaaggaagtcgaactccttcagacaggactgtgaaaaaagaagatagtgacgacagcctagttgactatggagaaggggttaatggccagttcaatgaggatggctcctttattggacaatacagtggtaagaaagagaaagagccggctgaaggaaacgaaagctcagaggcaccttctcctgtcaacgccatgaattcctttgtttaatttttaagctctttgccaatattccatttctctagaatgtttatcctaagcacttgtttgtcagccctctcatactatgaacatatgggtagagagtatattttctgctgtatgttagtattatgagaatagttacagcaaaaacataactcagtcaaatgatatgttaatatgaactggaatgcaaagtgcatactttttcattcaaaatgggtattcttgatttcctcagaactgataaaaaataatgcaacatcaccaacagatcctgttatttcctctgcaggatacagttcaatatgatgcatgaaaaatgctccacatttaaaggacatacccgtgtatgttatgaaaacatggtttgatactttgtttatactaccctcagctgaacccctatatatgaattccgttttcattgtcaagaatgttactgtagtattctctagaacttcaatgtctttgtggacattgttgtgaaattggtgactatgtatagctgtcgttagtctttttgggagactgttaggaacagtttgtacagtatatacttgctaaatgagttcattatgacagtcacattgctgatgcttactgagaactattacctactcttggctcctgttactccgtaggcttcttaatcttccaggcattacagcagcacagtgttctactttttacatcatttctatgttcggttgtttttaggcataaacaatgtgtattgcagtgcatttcggcatttgtgccatactgaaagaatcaaaaacaaatcatccaaattaaatttcaaacattatttcagagaacacagggcaagacacatacagtgccttcagatattaagcattccacaacatcgtgcattctgtatcagctggtccagtccattctgggtcctagattactgtcattgtctaaaagtaacttttaaaaagcagagttcatgaaaactgcaatgctgggaaaagaaggaaacatgaaaataaaaataagacagtttattagaaatagcatttcctcataagcataaaaagaaaatctttgttgccaactgaagcacatgatgattttgtggtcctttatggtttctattacattcagtaagaaagatgtcaacatgctagaaaattaattttaaaactaagttattccaacactaaaagcatacaacagcatgccaacagtaatatattattctccaagactttacctatgtaagtgttcaaaactctgcagcattaaacaacgtgtatgcaaattgttatggatacatttcagaatctaagaaatcaggcaagtgcttaaaaggccaacggtccaagggattacatctgcagtttaaaaagtaaatatatattctatcgtattcataaacaatatctatcaaatgggttacctccaaatatgaaaatctataacaacctatggttgaaggaatgctcagtttcatttgccaataaattggtttctcataacttgcatcaagtttaattttaagtaaagctttttatatgtagatattttgttgaatttgtaaatacacttaaaatgtagatgctatatgcttataggtgttacatacaaataaacatgcaatgtttatgttgtactgtataagaggtaagctaattaatgcagtgaatgggattggaaagcatctacttaaatatctattgggttcccccctccccccaccttttttgctgtgaaactgaaatagtgaacttttctacgtattgacagcagatttttcgatgaaatcttcagagctttgcctatggggcacagtaggcctagtaacctggcatgtttgatatatgtaggtaaagcataatttaaagtaatcccaggtaaagatggccctaaatactttcatgtctctatattcatttttcacagatccacctgtctcttgaaaatataaaaagacaaaacaggtttgccttggcatcagagagcacaaagattaaaagttactttaaatttgccaatattttgggagaacaataaaactacattttttcctcttccatactggtagatgcgaaatttatctgtgcatgaaagggtcacttctgtaatagtgcaacagatttggtattaaaaattaaatgtggttttaaaagttcctctctcttttgtaatttatgttcccaattgagtgtgaatgtccaagtaatggtgtatgtaatggtacaggcaaatgtgactggatttccctcaaaaaagtaactattaaacagtcttgatctctttgtgacttttaactttttcaaac

SEQ ID NO: 5183 - DNA, 6349 bp, Homo sapiens
agtccgagcctcagacgcgcgggcgcgggggacggcgcaggggccgcctggctggagcagccagaggggatagcttcgtcgagaacggaggacaccggcggtccagggtcctgggcagtcgcgccagagctgagcggagggcgcggcgcgagaacgaatctttgtgacattctctctcagcattctttatcccctgtttgctgaagacttcgacaaaagctggtcttagctgttggcattctcctgagaaaaggatagcttcagaaatcagaaaaacatttgggaggtgtctagcccagtggaccttctgaagagcaatgctaagaagacgtttggtttaaagaattaaaaggaagaacaacttaagagcttcttcaaagtttcccgcatgaaaattacttaaacgttgcacacaacgtttcacaaaatcttttgtgaaagaagaaaaggaaattcagtgtgtgagtctcagcaggagttaagctaatgcagcttaaaataatgccgaaaaagaagcgcttatctgcgggcagagtgcccctgattctcttcctgtgccagatgattagtgcactggaagtacctcttgatccaaaacttcttgaagacttggtacagcctccaaccatcacccaacagtctccaaaagattacattattgaccctcgggagaatattgtaatccagtgtgaagccaaagggaaaccgcccccaagcttttcctggacccgtaatgggactcattttgacatcgataaagaccctctggtcaccatgaagcctggcacaggaacgctcataattaacatcatgagcgaagggaaagctgagacctatgaaggagtctatcagtgtacagcaaggaacgaacgcggagctgcagtttctaataacattgttgtccgcccatccagatcaccattgtggaccaaagaaaaacttgaaccaatcacacttcaaagtggtcagtctttagtacttccctgcagacccccaattggattaccaccacctataatattttggatggataattcctttcaaagacttccacaaagtgagagagtttctcaaggtttgaatggggacctttatttttccaatgtcctcccagaggacacccgcgaagactatatctgttatgctagatttaatcatactcaaaccatacagcagaagcaacctatttctgtgaaggtgatttcagctaaatcaagtagagagaggccaccaacatttttaactccagaaggcaatgcaagtaacaaagaggaattaagaggaaatgtgctttcactggagtgcattgcagaaggactgcctaccccaattatttactgggcaaaggaagatggaatgctacccaaaaacaggacagtttataagaactttgagaaaaccttgcagatcattcatgtttcagaagcagactctggaaattaccaatgtatagcaaaaaacgcattaggagccatccaccataccatttctgttagagttaaagcggctccatactggatcacagcccctcaaaatcttgtgctgtccccaggagaggatgggaccttgatctgcagagctaatggcaaccccaaacccagaattagctggttaacaaatggagtcccaatagaaattgcccctgatgaccccagcagaaaaatagatggcgataccattattttttcaaatgttcaagaaagatcaagtgcagtctatcagtgcaatgcctctaatgaatatggatatttactggcaaacgcatttgtaaatgtgctggctgagccaccacgaatcctcacacctgcaaacacactctaccaggtcattgcaaacaggcctgctttactagactgtgccttctttgggtctcctctcccaaccatcgagtggtttaaaggagctaaaggaagtgctcttcatgaagatatttatgttttacatgaaaatggaactttggaaattcctgtggcccaaaaggacagtacaggaacttatacgtgtgttgcaaggaataaattagggatggcgaagaatgaagttcacttagaaatcaaagatcctacatggatcgttaaacagcccgaatatgcagttgtgcaaagagggagcatggtgtcctttgaatgcaaagtgaaacatgatcacaccttatccctcactgtcctgtggctgaaggacaacagggaactgcccagtgatgaaaggttcactgttgacaaggatcatctagtggtagctgatgtcagtgacgatgacagcgggacctacacgtgtgtggccaacaccactctggacagcgtctccgccagcgctgtgcttagcgttgttgctcctactccaactccagctcccgtttacgatgtcccaaatcctccctttgacttagaactgacagatcaacttgacaaaagtgttcagctgtcatggaccccaggcgatgacaacaatagccccattacaaaattcatcatcgaatatgaagatgcaatgcacaagccagggctgtggcaccaccaaactgaagtttctggaacacagaccacagcccagctgaagctgtctccttacgtgaactactccttccgcgtgatggcagtgaacagcattgggaagagcttgcccagcgaggcgtctgagcagtatttgacgaaagcctcagaaccagataaaaaccccacagctgtggaaggactgggatcagagcctgataatttggtgattacgtggaagcccttgaatggtttcgaatctaatgggccaggccttcagtacaaagttagctggcgccagaaagatggtgatgatgaatggacatctgtggttgtggcaaatgtatccaaatatattgtctcaggcacgccaacctttgttccatacctgatcaaagttcaggccctgaatgacatggggtttgcccccgagccagctgtagtcatgggacattctggagaagacctcccaatggtggctcctgggaacgtgcgtgtgaatgtggtgaacagtaccttagccgaggtgcactgggacccagtacctctgaaaagcatccgaggacacctacaaggctatcggatttactattggaagacccagagttcatctaaaagaaacagacgtcacattgagaaaaagatcctcaccttccaaggcagcaagactcatggcatgttgccggggctagagccctttagccactacacactgaatgtccgagtggtcaatgggaaaggggagggcccagccagccctgacagagtctttaatactccagaaggagtccccagtgctccctcgtctttgaagattgtgaatccaacactggactctctcactttggaatgggatccaccgagccacccgaatggcattttgacagagtacaccttaaagtatcagccaattaacagcacacatgaattaggccctctggtagatttgaaaattcctgccaacaagacacggtggactttaaaaaatttaaatttcagcactcgatataagttttatttctatgcacaaacatcagcaggatcaggaagtcaaattacagaggaagcagtaacaactgtggatgaagctggtattcttccacctgatgtaggtgcaggcaaagcgatggcaagccggcaggtggatattgcaactcagggctggttcattggtctgatgtgtgctgttgctctccttatcttaattttgctgattgtttgcttcatcagaagaaacaagggtggtaaatatccagttaaagaaaaggaagatgcccatgctgaccctgaaatccagcctatgaaggaagatgatgggacatttggagaatacagtgatgcagaagaccacaagcctttgaaaaaaggaagtcgaactccttcagacaggactgtgaaaaaagaagatagtgacgacagcctagttgactatggagaaggggttaatggccagttcaatgaggatggctcctttattggacaatacagtggtaagaaagagaaagagccggctgaaggaaacgaaagctcagaggcaccttctcctgtcaacgccatgaattcctttgtttaatttttaagctctttgccaatattccatttctctagaatgtttatcctaagcacttgtttgtcagccctctcatactatgaacatatgggtagagagtatattttctgctgtatgttagtattatgagaatagttacagcaaaaacataactcagtcaaatgatatgttaatatgaactggaatgcaaagtgcatactttttcattcaaaatgggtattcttgatttcctcagaactgataaaaaataatgcaacatcaccaacagatcctgttatttcctctgcaggatacagttcaatatgatgcatgaaaaatgctccacatttaaaggacatacccgtgtatgttatgaaaacatggtttgatactttgtttatactaccctcagctgaacccctatatatgaattccgttttcattgtcaagaatgttactgtagtattctctagaacttcaatgtctttgtggacattgttgtgaaattggtgactatgtatagctgtcgttagtctttttgggagactgttaggaacagtttgtacagtatatacttgctaaatgagttcattatgacagtcacattgctgatgcttactgagaactattacctactcttggctcctgttactccgtaggcttcttaatcttccaggcattacagcagcacagtgttctactttttacatcatttctatgttcggttgtttttaggcataaacaatgtgtattgcagtgcatttcggcatttgtgccatactgaaagaatcaaaaacaaatcatccaaattaaatttcaaacattatttcagagaacacagggcaagacacatacagtgccttcagatattaagcattccacaacatcgtgcattctgtatcagctggtccagtccattctgggtcctagattactgtcattgtctaaaagtaacttttaaaaagcagagttcatgaaaactgcaatgctgggaaaagaaggaaacatgaaaataaaaataagacagtttattagaaatagcatttcctcataagcataaaaagaaaatctttgttgccaactgaagcacatgatgattttgtggtcctttatggtttctattacattcagtaagaaagatgtcaacatgctagaaaattaattttaaaactaagttattccaacactaaaagcatacaacagcatgccaacagtaatatattattctccaagactttacctatgtaagtgttcaaaactctgcagcattaaacaacgtgtatgcaaattgttatggatacatttcagaatctaagaaatcaggcaagtgcttaaaaggccaacggtccaagggattacatctgcagtttaaaaagtaaatatatattctatcgtattcataaacaatatctatcaaatgggttacctccaaatatgaaaatctataacaacctatggttgaaggaatgctcagtttcatttgccaataaattggtttctcataacttgcatcaagtttaattttaagtaaagctttttatatgtagatattttgttgaatttgtaaatacacttaaaatgtagatgctatatgcttataggtgttacatacaaataaacatgcaatgtttatgttgtactgtataagaggtaagctaattaatgcagtgaatgggattggaaagcatctacttaaatatctattgggttcccccctccccccaccttttttgctgtgaaactgaaatagtgaacttttctacgtattgacagcagatttttcgatgaaatcttcagagctttgcctatggggcacagtaggcctagtaacctggcatgtttgatatatgtaggtaaagcataatttaaagtaatcccaggtaaagatggccctaaatactttcatgtctctatattcatttttcacagatccacctgtctcttgaaaatataaaaagacaaaacaggtttgccttggcatcagagagcacaaagattaaaagttactttaaatttgccaatattttgggagaacaataaaactacattttttcctcttccatactggtagatgcgaaatttatctgtgcatgaaagggtcacttctgtaatagtgcaacagatttggtattaaaaattaaatgtggttttaaaagttcctctctcttttgtaatttatgttcccaattgagtgtgaatgtccaagtaatggtgtatgtaatggtacaggcaaatgtgactggatttccctcaaaaaagtaactattaaacagtcttgatctctttgtgacttttaactttttcaaac

SEQ ID NO: 5184 - DNA, 6313 bp, Homo sapiens
agtccgagcctcagacgcgcgggcgcgggggacggcgcaggggccgcctggctggagcagccagaggggatagcttcgtcgagaacggaggacaccggcggtccagggtcctgggcagtcgcgccagagctgagcggagggcgcggcgcgagaacgaatctttgtgacattctctctcagcattctttatcccctgtttgctgaagacttcgacaaaagctggtcttagctgttggcattctcctgagaaaaggatagcttcagaaatcagaaaaacatttgggaggtgtctagcccagtggaccttctgaagagcaatgctaagaagacgtttggtttaaagaattaaaaggaagaacaacttaagagcttcttcaaagtttcccgcatgaaaattacttaaacgttgcacacaacgtttcacaaaatcttttgtgaaagaagaaaaggaaattcagtgtgtgagtctcagcaggagttaagctaatgcagcttaaaataatgccgaaaaagaagcgcttatctgcgggcagagtgcccctgattctcttcctgtgccagatgattagtgcactggaagtacctcttgatccaaaacttcttgaagacttggtacagcctccaaccatcacccaacagtctccaaaagattacattattgaccctcgggagaatattgtaatccagtgtgaagccaaagggaaaccgcccccaagcttttcctggacccgtaatgggactcattttgacatcgataaagaccctctggtcaccatgaagcctggcacaggaacgctcataattaacatcatgagcgaagggaaagctgagacctatgaaggagtctatcagtgtacagcaaggaacgaacgcggagctgcagtttctaataacattgttgtccgcccatccagatcaccattgtggaccaaagaaaaacttgaaccaatcacacttcaaagtggtcagtctttagtacttccctgcagacccccaattggattaccaccacctataatattttggatggataattcctttcaaagacttccacaaagtgagagagtttctcaaggtttgaatggggacctttatttttccaatgtcctcccagaggacacccgcgaagactatatctgttatgctagatttaatcatactcaaaccatacagcagaagcaacctatttctgtgaaggtgatttcagctaaatcaagtagagagaggccaccaacatttttaactccagaaggcaatgcaagtaacaaagaggaattaagaggaaatgtgctttcactggagtgcattgcagaaggactgcctaccccaattatttactgggcaaaggaagatggaatgctacccaaaaacaggacagtttataagaactttgagaaaaccttgcagatcattcatgtttcagaagcagactctggaaattaccaatgtatagcaaaaaacgcattaggagccatccaccataccatttctgttagagttaaagcggctccatactggatcacagcccctcaaaatcttgtgctgtccccaggagaggatgggaccttgatctgcagagctaatggcaaccccaaacccagaattagctggttaacaaatggagtcccaatagaaattgcccctgatgaccccagcagaaaaatagatggcgataccattattttttcaaatgttcaagaaagatcaagtgcagtctatcagtgcaatgcctctaatgaatatggatatttactggcaaacgcatttgtaaatgtgctggctgagccaccacgaatcctcacacctgcaaacacactctaccaggtcattgcaaacaggcctgctttactagactgtgccttctttgggtctcctctcccaaccatcgagtggtttaaaggagctaaaggaagtgctcttcatgaagatatttatgttttacatgaaaatggaactttggaaattcctgtggcccaaaaggacagtacaggaacttatacgtgtgttgcaaggaataaattagggatggcgaagaatgaagttcacttagaaatcaaagatcctacatggatcgttaaacagcccgaatatgcagttgtgcaaagagggagcatggtgtcctttgaatgcaaagtgaaacatgatcacaccttatccctcactgtcctgtggctgaaggacaacagggaactgcccagtgatgaaaggttcactgttgacaaggatcatctagtggtagctgatgtcagtgacgatgacagcgggacctacacgtgtgtggccaacaccactctggacagcgtctccgccagcgctgtgcttagcgttgttgctcctactccaactccagctcccgtttacgatgtcccaaatcctccctttgacttagaactgacagatcaacttgacaaaagtgttcagctgtcatggaccccaggcgatgacaacaatagccccattacaaaattcatcatcgaatatgaagatgcaatgcacaagccagggctgtggcaccaccaaactgaagtttctggaacacagaccacagcccagctgaagctgtctccttacgtgaactactccttccgcgtgatggcagtgaacagcattgggaagagcttgcccagcgaggcgtctgagcagtatttgacgaaagcctcagaaccagataaaaaccccacagctgtggaaggactgggatcagagcctgataatttggtgattacgtggaagcccttgaatggtttcgaatctaatgggccaggccttcagtacaaagttagctggcgccagaaagatggtgatgatgaatggacatctgtggttgtggcaaatgtatccaaatatattgtctcaggcacgccaacctttgttccatacctgatcaaagttcaggccctgaatgacatggggtttgcccccgagccagctgtagtcatgggacattctggagaagacctcccaatggtggctcctgggaacgtgcgtgtgaatgtggtgaacagtaccttagccgaggtgcactgggacccagtacctctgaaaagcatccgaggacacctacaaggctatcggatttactattggaagacccagagttcatctaaaagaaacagacgtcacattgagaaaaagatcctcaccttccaaggcagcaagactcatggcatgttgccggggctagagccctttagccactacacactgaatgtccgagtggtcaatgggaaaggggagggcccagccagccctgacagagtctttaatactccagaaggagtccccagtgctccctcgtctttgaagattgtgaatccaacactggactctctcactttggaatgggatccaccgagccacccgaatggcattttgacagagtacaccttaaagtatcagccaattaacagcacacatgaattaggccctctggtagatttgaaaattcctgccaacaagacacggtggactttaaaaaatttaaatttcagcactcgatataagttttatttctatgcacaaacatcagcaggatcaggaagtcaaattacagaggaagcagtaacaactgtggatgaagcgatggcaagccggcaggtggatattgcaactcagggctggttcattggtctgatgtgtgctgttgctctccttatcttaattttgctgattgtttgcttcatcagaagaaacaagggtggtaaatatccagttaaagaaaaggaagatgcccatgctgaccctgaaatccagcctatgaaggaagatgatgggacatttggagaatacagtgatgcagaagaccacaagcctttgaaaaaaggaagtcgaactccttcagacaggactgtgaaaaaagaagatagtgacgacagcctagttgactatggagaaggggttaatggccagttcaatgaggatggctcctttattggacaatacagtggtaagaaagagaaagagccggctgaaggaaacgaaagctcagaggcaccttctcctgtcaacgccatgaattcctttgtttaatttttaagctctttgccaatattccatttctctagaatgtttatcctaagcacttgtttgtcagccctctcatactatgaacatatgggtagagagtatattttctgctgtatgttagtattatgagaatagttacagcaaaaacataactcagtcaaatgatatgttaatatgaactggaatgcaaagtgcatactttttcattcaaaatgggtattcttgatttcctcagaactgataaaaaataatgcaacatcaccaacagatcctgttatttcctctgcaggatacagttcaatatgatgcatgaaaaatgctccacatttaaaggacatacccgtgtatgttatgaaaacatggtttgatactttgtttatactaccctcagctgaacccctatatatgaattccgttttcattgtcaagaatgttactgtagtattctctagaacttcaatgtctttgtggacattgttgtgaaattggtgactatgtatagctgtcgttagtctttttgggagactgttaggaacagtttgtacagtatatacttgctaaatgagttcattatgacagtcacattgctgatgcttactgagaactattacctactcttggctcctgttactccgtaggcttcttaatcttccaggcattacagcagcacagtgttctactttttacatcatttctatgttcggttgtttttaggcataaacaatgtgtattgcagtgcatttcggcatttgtgccatactgaaagaatcaaaaacaaatcatccaaattaaatttcaaacattatttcagagaacacagggcaagacacatacagtgccttcagatattaagcattccacaacatcgtgcattctgtatcagctggtccagtccattctgggtcctagattactgtcattgtctaaaagtaacttttaaaaagcagagttcatgaaaactgcaatgctgggaaaagaaggaaacatgaaaataaaaataagacagtttattagaaatagcatttcctcataagcataaaaagaaaatctttgttgccaactgaagcacatgatgattttgtggtcctttatggtttctattacattcagtaagaaagatgtcaacatgctagaaaattaattttaaaactaagttattccaacactaaaagcatacaacagcatgccaacagtaatatattattctccaagactttacctatgtaagtgttcaaaactctgcagcattaaacaacgtgtatgcaaattgttatggatacatttcagaatctaagaaatcaggcaagtgcttaaaaggccaacggtccaagggattacatctgcagtttaaaaagtaaatatatattctatcgtattcataaacaatatctatcaaatgggttacctccaaatatgaaaatctataacaacctatggttgaaggaatgctcagtttcatttgccaataaattggtttctcataacttgcatcaagtttaattttaagtaaagctttttatatgtagatattttgttgaatttgtaaatacacttaaaatgtagatgctatatgcttataggtgttacatacaaataaacatgcaatgtttatgttgtactgtataagaggtaagctaattaatgcagtgaatgggattggaaagcatctacttaaatatctattgggttcccccctccccccaccttttttgctgtgaaactgaaatagtgaacttttctacgtattgacagcagatttttcgatgaaatcttcagagctttgcctatggggcacagtaggcctagtaacctggcatgtttgatatatgtaggtaaagcataatttaaagtaatcccaggtaaagatggccctaaatactttcatgtctctatattcatttttcacagatccacctgtctcttgaaaatataaaaagacaaaacaggtttgccttggcatcagagagcacaaagattaaaagttactttaaatttgccaatattttgggagaacaataaaactacattttttcctcttccatactggtagatgcgaaatttatctgtgcatgaaagggtcacttctgtaatagtgcaacagatttggtattaaaaattaaatgtggttttaaaagttcctctctcttttgtaatttatgttcccaattgagtgtgaatgtccaagtaatggtgtatgtaatggtacaggcaaatgtgactggatttccctcaaaaaagtaactattaaacagtcttgatctctttgtgacttttaactttttcaaac

SEQ ID NO: 5185 - DNA, 6227 bp, Homo sapiens; identical to SEQ ID NO: 155

SEQ ID NO: 5186 - DNA, 2008 bp, Homo sapiens; identical to SEQ ID NO: 1769

SEQ ID NO: 5187 - DNA, 2423 bp, Homo sapiens
ggtctcactctgttgctgtcttcacggagagcaggagcagaggctttgagaagccagtgggccttggcctcagccctgccggcagagggtccccaccatgcagctgaagtgccagggtgcttgtgaagtctaagcccttgtctggcatttgtcaggaatataggcgcacacttaagcggcccgggcgggtaccgccgtcccgccatggctctgaggcgcgccctgcccgcgctgcgcccctgcattccccgcttcgtcccgctgtccacggcgccggcctcccgcgagcagcccgcagcgggcccagcggccgtgccaggaggtgggtcggccacggcagtgcggccgccggtgcccgccgtggacttcggcaacgcgcaggaggcgtaccgcagccggcgaacctgggagctggcgcggagcctgctggtgctgcgcttgtgcgcctggcccgcgctgctggcgcgccacgagcagctgctgtatgtttccaggaaacttctaggacagaggctattcaacaagctcatgaagatgaccttctatgggcattttgtagccggggaggaccaggagtccatccagcccctgcttcggcactacagggccttcggtgtcagcgccatcctggactatggagtggaggaggacctgagccccgaggaggcagagcacaaggagatggagtcctgcacctcagctgcggagagggatggcagtggcacgaataagcgggacaagcaataccaggcccaccgggccttcggggaccgcaggaatggtgtcatcagtgcccgcacctacttctacgccaatgaggccaagtgcgacagccacatggagacattcttgcgctgcatcgaagcctcaggtagagtcagcgatgacggcttcatagccattaagctcacagcactggggagaccccagtttctgctgcagttctcagaggtgctggccaagtggaggtgcttctttcaccaaatggctgtggagcaagggcaggcgggcctggctgccatggacaccaagctggaggtggcggtgctgcaggaaagtgtcgcaaagttgggcatcgcatccagggctgagattgaggactggttcacggcagagaccctgggagtgtctggcaccatggacctgctggactggagcagcctcatcgacagcaggaccaagctgtccaagcacttggtagtccccaacgcacagacaggacagctggagcccctgctgtcccggttcactgaggaggaggagctacagatgaccaggatgctacagcggatggatgtcctggccaagaaagccacagagatgggcgtgcggctgatggtggatgccgagcagacctacttccagccggccatcagccgcctgacgctggagatgcagcggaagttcaatgtggagaagccgctcatcttcaacacataccagtgctacctcaaggatgcctatgacaatgtgaccctggacgtggagctggctcgccgtgagggctggtgttttggggccaagctggtgcggggcgcatacctggcccaggagcgagcccgtgcggcagagatcggctatgaggaccccatcaaccccacgtacgaggccaccaacgccatgtaccacaggtgcctggactacgtgttggaggagctgaagcacaacgccaaggccaaggtgatggtggcctcccacaatgaggacacagtgcgctttgcactgcgcaggatggaggagctgggcctgcatcctgctgaccaccaggtgtactttggacagctgctaggcatgtgtgaccagatcagcttcccgctgggccaggccggctaccccgtgtacaagtacgtgccctatggccccgtgatggaggtgctgccctacttgtcccgccgtgccctggagaacagcagcctcatgaagggcacccatcgggagcggcagctgctgtggctggagctcttgaggcggctccgaactggcaacctcttccatcgccctgcctagcacccgccagcacacccttagcctccagcaccccccgcccccgcccaggccatcaccacagctgcagccaaccccatcctcacacagattcaccttttttcaccccacacttgcagagctgctggaggtgaggtcaggtgcctcccagccctgcccagagtatgggcactcaggtgtgggccgaacctgatacctgcctgggacagccactggaaacttttgggaactctcctcgaatgtgtgggcccaaggcccccacctctgtgacccccatgtccttggacctagaggattgtccaccttctgccaaggccagcccacacagcccgagccccttggggagcagtggccgggctggggaggcctgcctggtcaataaaccactgttcctgcagctgagaaaaaaaaaaaaaaaa

SEQ ID NO: 5188 - DNA, 5882 bp, Homo sapiens; identical to SEQ ID NO: 672

SEQ ID NO: 5189 - DNA, 5966 bp, Homo sapiens
gtgatgttatctgctggcagcagaaggttcgctccgagcggagctccagaagctcctgacaagagaaagacagattgagatagagatagaaagagaaagagagaaagagacagcagagcgagagcgcaagtgaaagaggcaggggagggggatggagaatattagcctgacggtctagggagtcatccaggaacaaactgaggggctgcccggctgcagacaggaggagacagagaggatctattttagggtggcaagtgcctacctaccctaagcgagcaattccacgttggggagaagccagcagaggttgggaaagggtgggagtccaagggagcccctgcgcaaccccctcaggaataaaactccccagccagggtgtcgcaagggctgccgttgtgatccgcagggggtgaacgcaaccgcgacggctgatcgtctgtggctgggttggcgtttggagcaagagaaggaggagcaggagaaggagggagctggaggctggaagcgtttgcaagcggcggcggcagcaacgtggagtaaccaagcgggtcagcgcgcgcccgccagggtgtaggccacggagcgcagctcccagagcaggatccgcgccgcctcagcagcctctgcggcccctgcggcacccgaccgagtaccgagcgccctgcgaagcgcaccctcctccccgcggtgcgctgggctcgcccccagcgcgcgcacacgcacacacacacacacacacacacacgcacgcacacacgtgtgcgcttctctgctccggagctgctgctgctcctgctctcagcgccgcagtggaaggcaggaccgaaccgctccttctttaaatatataaatttcagcccaggtcagcctcggcggcccccctcaccgcgctcccggcgcccctcccgtcagttcgccagctgccagccccgggaccttttcatctcttcccttttggccggaggagccgagttcagatccgccactccgcacccgagactgacacactgaactccacttcctcctcttaaatttatttctacttaatagccactcgtctctttttttccccatctcattgctccaagaatttttttcttcttactcgccaaagtcagggttccctctgcccgtcccgtattaatatttccacttttggaactactggccttttctttttaaaggaattcaagcaggatacgtttttctgttgggcattgactagattgtttgcaaaagtttcgcatcaaaaacaacaacaacaaaaaaccaaacaactctccttgatctatactttgagaattgttgatttcttttttttattctgacttttaaaaacaacttttttttccacttttttaaaaaatgcactactgtgtgctgagcgcttttctgatcctgcatctggtcacggtcgcgctcagcctgtctacctgcagcacactcgatatggaccagttcatgcgcaagaggatcgaggcgatccgcgggcagatcctgagcaagctgaagctcaccagtcccccagaagactatcctgagcccgaggaagtccccccggaggtgatttccatctacaacagcaccagggacttgctccaggagaaggcgagccggagggcggccgcctgcgagcgcgagaggagcgacgaagagtactacgccaaggaggtttacaaaatagacatgccgcccttcttcccctccgaaactgtctgcccagttgttacaacaccctctggctcagtgggcagcttgtgctccagacagtcccaggtgctctgtgggtaccttgatgccatcccgcccactttctacagaccctacttcagaattgttcgatttgacgtctcagcaatggagaagaatgcttccaatttggtgaaagcagagttcagagtctttcgtttgcagaacccaaaagccagagtgcctgaacaacggattgagctatatcagattctcaagtccaaagatttaacatctccaacccagcgctacatcgacagcaaagttgtgaaaacaagagcagaaggcgaatggctctccttcgatgtaactgatgctgttcatgaatggcttcaccataaagacaggaacctgggatttaaaataagcttacactgtccctgctgcacttttgtaccatctaataattacatcatcccaaataaaagtgaagaactagaagcaagatttgcaggtattgatggcacctccacatataccagtggtgatcagaaaactataaagtccactaggaaaaaaaacagtgggaagaccccacatctcctgctaatgttattgccctcctacagacttgagtcacaacagaccaaccggcggaagaagcgtgctttggatgcggcctattgctttagaaatgtgcaggataattgctgcctacgtccactttacattgatttcaagagggatctagggtggaaatggatacacgaacccaaagggtacaatgccaacttctgtgctggagcatgcccgtatttatggagttcagacactcagcacagcagggtcctgagcttatataataccataaatccagaagcatctgcttctccttgctgcgtgtcccaagatttagaacctctaaccattctctactacattggcaaaacacccaagattgaacagctttctaatatgattgtaaagtcttgcaaatgcagctaaaattcttggaaaagtggcaagaccaaaatgacaatgatgatgataatgatgatgacgacgacaacgatgatgcttgtaacaagaaaacataagagagccttggttcatcagtgttaaaaaatttttgaaaaggcggtactagttcagacactttggaagtttgtgttctgtttgttaaaactggcatctgacacaaaaaaagttgaaggccttattctacatttcacctactttgtaagtgagagagacaagaagcaaattttttttaaagaaaaaaataaacactggaagaatttattagtgttaattatgtgaacaacgacaacaacaacaacaacaacaaacaggaaaatcccattaagtggagttgctgtacgtaccgttcctatcccgcgcctcacttgatttttctgtattgctatgcaataggcacccttcccattcttactcttagagttaacagtgagttatttattgtgtgttactatataatgaacgtttcattgcccttggaaaataaaacaggtgtataaagtggagaccaaatactttgccagaaactcatggatggcttaaggaacttgaactcaaacgagccagaaaaaaagaggtcatattaatgggatgaaaacccaagtgagttattatatgaccgagaaagtctgcattaagataaagaccctgaaaacacatgttatgtatcagctgcctaaggaagcttcttgtaaggtccaaaaactaaaaagactgttaataaaagaaactttcagtcagaataagtctgtaagtttttttttttctttttaattgtaaatggttctttgtcagtttagtaaaccagtgaaatgttgaaatgttttgacatgtactggtcaaacttcagaccttaaaatattgctgtatagctatgctataggttttttcctttgttttggtatatgtaaccatacctatattattaaaatagatggatatagaagccagcataattgaaaacacatctgcagatctcttttgcaaactattaaatcaaaacattaactactttatgtgtaatgtgtaaatttttaccatattttttatattctgtaataatgtcaactatgatttagattgacttaaatttgggctctttttaatgatcactcacaaatgtatgtttcttttagctggccagtacttttgagtaaagcccctatagtttgacttgcactacaaatgcattttttttttaataacatttgccctacttgtgctttgtgtttctttcattattatgacataagctacctgggtccacttgtcttttcttttttttgtttcacagaaaagatgggttcgagttcagtggtcttcatcttccaagcatcattactaaccaagtcagacgttaacaaatttttatgttaggaaaaggaggaatgttatagatacatagaaaattgaagtaaaatgttttcattttagcaaggatttagggttctaactaaaactcagaatctttattgagttaagaaaagtttctctaccttggtttaatcaatatttttgtaaaatcctattgttattacaaagaggacacttcataggaaacatctttttctttagtcaggtttttaatattcagggggaaattgaaagatatatattttagtcgatttttcaaaaggggaaaaaagtccaggtcagcataagtcattttgtgtatttcactgaagttataaggtttttataaatgttctttgaaggggaaaaggcacaagccaatttttcctatgatcaaaaaattctttctttcctctgagtgagagttatctatatctgaggctaaagtttaccttgctttaataaataatttgccacatcattgcagaagaggtatcctcatgctggggttaatagaatatgtcagtttatcacttgtcgcttatttagctttaaaataaaaattaataggcaaagcaatggaatatttgcagtttcacctaaagagcagcataaggaggcgggaatccaaagtgaagttgtttgatatggtctacttcttttttggaatttcctgaccattaattaaagaattggatttgcaagtttgaaaactggaaaagcaagagatgggatgccataatagtaaacagcccttgtgttggatgtaacccaatcccagatttgagtgtgtgttgattatttttttgtcttccacttttctattatgtgtaaatcacttttatttctgcagacattttcctctcagataggatgacattttgttttgtattattttgtctttcctcatgaatgcactgataatattttaaatgctctattttaagatctcttgaatctgttttttttttttttaatttgggggttctgtaaggtctttatttcccataagtaaatattgccatgggaggggggtggaggtggcaaggaaggggtgaagtgctagtatgcaagtgggcagcaattatttttgtgttaatcagcagtacaatttgatcgttggcatggttaaaaaatggaatataagattagctgttttgtattttgatgaccaattacgctgtattttaacacgatgtatgtctgtttttgtggtgctctagtggtaaataaattatttcgatgatatgtggatgtctttttcctatcagtaccatcatcgagtctagaaaacacctgtgatgcaataagactatctcaagctggaaaagtcataccacctttccgattgccctctgtgctttctcccttaaggacagtcacttcagaagtcatgctttaaagcacaagagtcaggccatatccatcaaggatagaagaaatccctgtgccgtctttttattcccttatttattgctatttggtaattgtttgagatttagtttccatccagcttgactgccgaccagaaaaaatgcagagagatgtttgcaccatgctttggctttctggttctatgttctgccaacgccagggccaaaagaactggtctagacagtatcccctgtagccccataacttggatagttgctgagccagccagatataacaagagccacgtgctttctggggttggttgtttgggatcagctacttgcctgtcagtttcactggtaccactgcaccacaaacaaaaaaacccaccctatttcctccaatttttttggctgctacctacaagaccagactcctcaaacgagttgccaatctcttaataaataggattaataaaaaaagtaattgtgactcaaaaaaaaaaaaaa

SEQ ID NO: 5190 - DNA, 5426 bp, Homo sapiens; identical to SEQ ID NO: 1490

SEQ ID NO: 5191 - DNA, 2168 bp, Homo sapiens; identical to SEQ ID NO: 404

SEQ ID NO: 5192 - DNA, 8463 bp, Homo sapiens; identical to SEQ ID NO: 702

SEQ ID NO: 5193 - DNA, 7592 bp, Homo sapiens
acttcattatgattcagtgcaaagtactgacagcactggggcttccggaagggagtggtgtcgggatgggggttgctgttggcaagaggcttaattgacacctttgatgtagcctaagacagaacctgcacctcccactgctgcttgggagacgtcagctttacgcagaaaaggcatctgctgatgaatcctgcatctcattcagcctgctctgggagcagccttagccatccttaaactcatccaaccgattcccatttccgcgggtgcttggcttagtgctgagacgggattccgccgttggtattcaggtccaacactaagactgtgtccatgttagaactcatagaagttaatggaacccctggtagtcagctctctactccgcgctcaggcaagtcgccaagcccatcacccaccagcccaggaagcctgcggaagcagaggagctctcagcatggcggctcctctacgtcacttgcgtccaccaaagtctgcagctcgatggatgagaacgatggccctggagaagaagtgtcggaggaaggcttccagattccagctacaataacagaacgatataaagtcggaagaacaataggagatggaaattttgctgttgtcaaggaatgtgtagaaagatcgactgctagagagtatgctctgaaaattatcaagaaaagcaaatgtcgaggcaaagagcacatgatccagaatgaagtgtctattttaagaagagtgaagcatcccaatatcgttcttctgattgaggagatggatgtgccaactgaactgtatcttgtcatggaattagtaaaggggggagacctttttgatgccattacttccactaacaaatacaccgagagagacgccagtgggatgctgtacaacctagccagcgccatcaaatacctgcatagcctgaacatcgtccaccgtgatatcaagccagagaacctgctggtgtatgagcaccaagatggcagcaaatcactgaagctgggtgactttggactggccaccattgtagacggccccctgtacacagtctgtggcaccccaacatacgtggctccagaaatcattgcagagactggatacggcctcaaggtggacatctgggcagcaggtgtaatcacttatatcctgctgtgtggtttccctccattccgtggaagtggtgatgaccaggaggtgctttttgatcagattttgatggggcaggtggactttccttctccatactgggataatgtttccgattctgcaaaggagctcattaccatgatgctgttggtcgatgtagatcagcgattttctgctgttcaagtacttgagcatccctgggttaatgatgatggcctcccagaaaatgaacatcagctgtcagtagctggaaagataaagaagcatttcaacacaggccccaagccgaatagcacagcagctggagtttctgtcatagcactggaccacgggtttaccatcaagagatcagggtctttggactactaccagcaaccaggaatgtattggataagaccaccgctcttgataaggagaggcaggttttccgacgaagacgcaaccaggatgtgaggagccggtacaaggcgcagccagctcctcccgaactcaactcggaatcggaagactactccccaagctcctccgagactgttcgctcccctaactcgcccttttaataagacccttttactcaaagtcctagcttaaccctttgagactctgagatttttttcccccaaatttgtgtaaaacagtttcatctgatctatctagcgctcaatgcttgaatggcagaactgaaagtgttttcaggtatctttgtagcggtttccctttactgaataagatgacacgtggtgattgtgaagatggtaatttgctgctaatagagtcctcaaagggttaaggccaatttgcaatttttttttaaacttagaagcaatgaatgttttcatcagtcaagctaggatctgcagtatgtaatatagcacttgttaaccctctgagtgcatagaattttattgagaattcttgtttgggaatttttcaggcctttggatgtatacacacatgtttcttgattttactgcagatcaaggggtgttgttagatgctgaaatgtccagaaaagaaggacatttagaatgatatcttgtttgtccttttctgtgggtttagaacgtggcaggtttataacttcgacacacgcacggttctttcttcttcacaatcctattcagaaacagattttttttttcattagagatatgactgtcagttgcagtgagttctgcatcccaagtggagggaattgggtttgtggcaaagagcttgacccaggaaatagatggtgccccccaaattgtctccacatgaagatgtactgatgacgccccagaaatgctgcttccatatcagctgctgctagcgccagcgcagactctcagggagtcaccacagcttgtcttgtgcttggtgagtgagggtctctctactcagtgtcagacatctacaggaaagaaacaactggtggaaaagagcaataaattgcccggtgctctgcagggctggaatttcaaacagaaagagggaataagatcctgtgatttttctcacctgcttttccacgcactgtggtcatcactgtgcaatctacatctagtatgaaatccacacataggagagctggggcacaaggggactggaggcagttgctttgcaagatggctgaggagaaagcacactgggaacacaatccagaatgttctaacaataagttttcagtgaataaaccactggcaagacaattccatgtgcacctttaggttacctatatagtctcctaggaagatcaggatgaaagacctagatgatacccctgaggataaaacctccatcccctaaaatgattttttttaaataccactgtctttagctgtccaggaggtcagagtgttttttctgtctttgggccaagtcctgtctgagacctgtattttcactcttgttaccaaatctatctccctagtgcagtgtctccaggcctgagtttcttctggaacagattccattttagaatggggattcacaggttctgtgcatcaccacagtgctcagagaggattctcctggggtgtcttagaggcaggtgcccaactcaaatgtattcccaaggtttgctgggctctgggatccacgagacaaccagagagggatatctcatgaaatttgcatctggtggctgaacagtacctatgttctctgttttgaatatactttaatacctgagagtcttaaaatttgtgaacaacgtttctatagtcctttattttcaaatgcacattgatcttcacttgctgcatttttactcttcaaccctgaaactatggtctacattaatatggatttttaaatcacatgtcattacttttgcaacaccatcaccaaaattttttgctcttttacatttaggttcatctctgtggtctgtgttgtcctgacatgtaaaaagcatatcgtttattgaggtttttttcccccccttttagagcatccggaagtgataacacgcaaaatcacaaagtagcataaatcagtaaattagttgagttgtttttgggggggaggtgggggtagggggcacagaacaccagaaagagtgttggtgtgtaggtagattccatattaatgaggaacactgaactagttggaaattactgctttctctagaaatataaagcaaagcactattccaaggctatggagtagctctacagcctggcctcaactctaaaagtgtgaagaatgcaatgggcagagacctacctgcagtggactgtcattttcctttctttctctgaattactgctttttctgtgggcattaactatattgctacagcatctagtgtactgagcctgcggtgcatggctcaggccttttcccatcgacgtctagggggactctggaccgtgtgaagctagggggtgtttctcagcacactgcagaagggcagctcagaagaatgcagggcccattcagcatggggatcccagcacatcactgtagaatttgagtgatctatgctgaataaacagtggaatgtgaccagtcaagtagaaatcttgagtaatcagatggaatgcaatctttctaacattaagctaccaagatcctgaatgtcagagatgtactcagagggttaacagacaagcacaaggcatgctgactacattggtgtatccagattgctttgcttttagccagtgctttctaatttttttctcgacattcttgggatagttcaagtttgaaataattaagtggtggtgttctttaaggaatttctataaccaaattgatcttatttttgatttcacttatcatagaacaaatatgtatcattatggcagtgtatctatgtaattatcaatttaatcatcaccaccggtgtttccatattttttcccaagtatttaatatagctctcttatggtggtggcctggtgatggggaccgtctttcttttactgacacatgaccaatcatatggtattttcaagggaattttaagattcatcttttcagtttgatagtagactagttaaggaagaactctttcattacttgcatcgtgtaaatcatctctgtagacatgtgttcatattaatgaacacattttttctcaacattgtagcagaaatcattttattcgtcatgatcaatgaatatgtgatttgctccagatcgttagaaggaaaagtaagatttcagtcatcaaaaatgtttttaccgtagccctcatctaacttacacgtggtgcatattaaaataagcagagaaaaaaaaatgtgaataaactactgaaaacacttggtgttttgtgttcaatgagaccttcctgcaacctgctccccatgggtggcagttaacaggcccatcagatattgttgaaagaaagcaatatatccatgaatgaaggctaaaattgcaatcctttaccctttgaggcatatttcagttgaaaacaaaaagaaaagaaaatttggcttagagggtcacagagctcccatatgaccaagtctcaagcacattaaatcatggttgtttactggccaagggcgtccactagacaactctatcccttgcgctgaagctcaatcgtgctgagggagagctttcttaatattactgtgttgctcttagcccttctctgggttaggatctgtcagcatttctatgataaactcctattctcaaaggtttttaatttgaccataaaaatgtgccccaggctgaagtttgctatacagggctgtaccaaagagtgaaggtttacttccttctctttccaacttcttccccattctccaaggaaaagaacaacaaaaaaatctggtatggtccctccttaatagtgatttcagaattttggaaagcaccaagatccaagatggtagttttaatgtagttactcattcgcacacattttttaaatttaatgggtcacctggcatatattgtagataacatatcttttctataatttgtaagtcaataatttttttaactgctacatgatatttttttttgcccaaagattttaaaagacttgaagttggtcagttcaaaactcagatttttctacacattgtctgccatgtccattaggagtttggggaaaatactctcacacagacccttactttgcatgcagtttagagggtaagatacgtgcttcttttggggataaagatttccttacttaattgtcaaatttcatggagccattctagtctgttggggaaaatagtgattaaaagcacttccaaaattaacattttttgacaattcagatatgaaaagaagcaggggaaaataatacactttactcttttcttgcttaaaggcaaacaaatcaatgaaacttgaggacacactaaacatttgataactgcaaatgtgctttaaaaattggttcaatggtgcttacacatgaaacggtaacaaatggggttcctaggacgtcagaaggaatctttagtttgtatgtaattacacactagaggaggaggtgcttttaagccagtcttttatttttaatcatctcaaatatgcaaccatacatgcagtaacattaagggtcgtaaactggtgggaaacaggaacttcagtggagaggcttaaatgcctctggttagagtgggggtttttgtttgtttgtttattgttgggtttcaacactgagcatcatttctgtgatcaagtttctaactggcatgtgttttgatcatgaggtttaccatatcttgcccatacagacaaatgagagatctagtttcattttgttccctaaagaaagaacactctctaaaattaaatcatacctgtaaatttcttcagcatttgtttctgttcaatgaaattgagacccttaatgttgctttaatgtaaaattgaatattttgtctgtgatatactttaataatttaaagtaagtaatagttctaaagtcttcactgttgctactaagagaaaatagaattttaaaggtgatgataaagatgctataatgtcagttcactccagtccaatcaaatgtagtaagaaaaagtccttgaatagttctctagggacaatttctcacttgccattgacattaatctttggtgtattctcagaaaaaataaaaagaaattgaaactggtccaaggttatagtcatatcctcgataacttttgaaaaaaaattttattaggaaattaatactagcctttttcattctggctgaaagaaaattattaaaggattagttgagtgtgaaattcaacagtattttgctcatacatactaaaaaggtgcgtagggacttggcgcatttaaacaagtttctgaaaggtttcaatttgactcaagaaaaaaattcaatatttcttttgaaaatactgaatttatcacttgctgcatggatcagatggcataggttaatctttgattttcagaatcctaatgaaataactttcaaacaatttgtgtccttaattaaaggtggaatgagatccaatttttccccctaatccttcagtttaagctgatacatgtaggttaatgtggaatgaaatcatctgtgatatattatgttcatttatcaactgagcttttttgatgttgcctgtttttatgtaaaacatgttcttaaagttaataaaataatagtacttggtgtatgaactactacataataccttagctgaagggtacgctcctcagttcatttgccatattggagtaaaatttcaccttagttcaattcacaattgacacattcagttcacgaaggaatagcccagctgtgttcttagggggaattctctctatgcaaggctttaaaaattagtcatgcggtcagagtgtagctttcccacatgtcctccatagcacagtgtgtatttcatgagcataattcaaaaacagctatttcaaaaatgtcccttgtcatatattacgttcctgcctgggccactgacttggataaatacaaataaaccaaataccattca

SEQ ID NO: 5194 - DNA, 7518 bp, Homo sapiens
acttcattatgattcagtgcaaagtactgacagcactggggcttccggaagggagtggtgtcgggatgggggttgctgttggcaagaggcttaattgacacctttgatgtagcctaagacagaacctgcacctcccactgctgcttgggagacgtcagctttacgcagaaaaggcatctgctgatgaatcctgcatctcattcagcctgctctgggagcagccttagccatccttaaactcatccaaccgattcccatttccgcgggtgcttggcttagtgctgagacgggattccgccgttggtattcaggtccaacactaagactgtgtccatgttagaactcatagaagttaatggaacccctggtagtcagctctctactccgcgctcaggcaagtcgccaagcccatcacccaccagcccaggaagcctgcggaagcagaggagctctcagcatggcggctcctctacgtcacttgcgtccaccaaagtctgcagctcgatggatgagaacgatggccctggagaagaagtgtcggaggaaggcttccagattccagctacaataacagaacgatataaagtcggaagaacaataggagatggaaattttgctgttgtcaaggaatgtgtagaaagatcgactgctagagagtatgctctgaaaattatcaagaaaagcaaatgtcgaggcaaagagcacatgatccagaatgaagtgtctattttaagaagagtgaagcatcccaatatcgttcttctgattgaggagatggatgtgccaactgaactgtatcttgtcatggaattagtaaaggggggagacctttttgatgccattacttccactaacaaatacaccgagagagacgccagtgggatgctgtacaacctagccagcgccatcaaatacctgcatagcctgaacatcgtccaccgtgatatcaagccagagaacctgctggtgtatgagcaccaagatggcagcaaatcactgaagctgggtgactttggactggccaccattgtagacggccccctgtacacagtctgtggcaccccaacatacgtggctccagaaatcattgcagagactggatacggcctcaaggtggacatctgggcagcaggtgtaatcacttatatcctgctgtgtggtttccctccattccgtggaagtggtgatgaccaggaggtgctttttgatcagattttgatggggcaggtggactttccttctccatactgggataatgtttccgattctgcaaaggagctcattaccatgatgctgttggtcgatgtagatcagcgattttctgctgttcaagtacttgagcatccctgggttaatgatgatggcctcccagaaaatgaacatcagctgtcagtagctggaaagataaagaagcatttcaacacaggccccaagccgaatagcacagcagctggagtttctgtcatagcaaccaccgctcttgataaggagaggcaggttttccgacgaagacgcaaccaggatgtgaggagccggtacaaggcgcagccagctcctcccgaactcaactcggaatcggaagactactccccaagctcctccgagactgttcgctcccctaactcgcccttttaataagacccttttactcaaagtcctagcttaaccctttgagactctgagatttttttcccccaaatttgtgtaaaacagtttcatctgatctatctagcgctcaatgcttgaatggcagaactgaaagtgttttcaggtatctttgtagcggtttccctttactgaataagatgacacgtggtgattgtgaagatggtaatttgctgctaatagagtcctcaaagggttaaggccaatttgcaatttttttttaaacttagaagcaatgaatgttttcatcagtcaagctaggatctgcagtatgtaatatagcacttgttaaccctctgagtgcatagaattttattgagaattcttgtttgggaatttttcaggcctttggatgtatacacacatgtttcttgattttactgcagatcaaggggtgttgttagatgctgaaatgtccagaaaagaaggacatttagaatgatatcttgtttgtccttttctgtgggtttagaacgtggcaggtttataacttcgacacacgcacggttctttcttcttcacaatcctattcagaaacagattttttttttcattagagatatgactgtcagttgcagtgagttctgcatcccaagtggagggaattgggtttgtggcaaagagcttgacccaggaaatagatggtgccccccaaattgtctccacatgaagatgtactgatgacgccccagaaatgctgcttccatatcagctgctgctagcgccagcgcagactctcagggagtcaccacagcttgtcttgtgcttggtgagtgagggtctctctactcagtgtcagacatctacaggaaagaaacaactggtggaaaagagcaataaattgcccggtgctctgcagggctggaatttcaaacagaaagagggaataagatcctgtgatttttctcacctgcttttccacgcactgtggtcatcactgtgcaatctacatctagtatgaaatccacacataggagagctggggcacaaggggactggaggcagttgctttgcaagatggctgaggagaaagcacactgggaacacaatccagaatgttctaacaataagttttcagtgaataaaccactggcaagacaattccatgtgcacctttaggttacctatatagtctcctaggaagatcaggatgaaagacctagatgatacccctgaggataaaacctccatcccctaaaatgattttttttaaataccactgtctttagctgtccaggaggtcagagtgttttttctgtctttgggccaagtcctgtctgagacctgtattttcactcttgttaccaaatctatctccctagtgcagtgtctccaggcctgagtttcttctggaacagattccattttagaatggggattcacaggttctgtgcatcaccacagtgctcagagaggattctcctggggtgtcttagaggcaggtgcccaactcaaatgtattcccaaggtttgctgggctctgggatccacgagacaaccagagagggatatctcatgaaatttgcatctggtggctgaacagtacctatgttctctgttttgaatatactttaatacctgagagtcttaaaatttgtgaacaacgtttctatagtcctttattttcaaatgcacattgatcttcacttgctgcatttttactcttcaaccctgaaactatggtctacattaatatggatttttaaatcacatgtcattacttttgcaacaccatcaccaaaattttttgctcttttacatttaggttcatctctgtggtctgtgttgtcctgacatgtaaaaagcatatcgtttattgaggtttttttcccccccttttagagcatccggaagtgataacacgcaaaatcacaaagtagcataaatcagtaaattagttgagttgtttttgggggggaggtgggggtagggggcacagaacaccagaaagagtgttggtgtgtaggtagattccatattaatgaggaacactgaactagttggaaattactgctttctctagaaatataaagcaaagcactattccaaggctatggagtagctctacagcctggcctcaactctaaaagtgtgaagaatgcaatgggcagagacctacctgcagtggactgtcattttcctttctttctctgaattactgctttttctgtgggcattaactatattgctacagcatctagtgtactgagcctgcggtgcatggctcaggccttttcccatcgacgtctagggggactctggaccgtgtgaagctagggggtgtttctcagcacactgcagaagggcagctcagaagaatgcagggcccattcagcatggggatcccagcacatcactgtagaatttgagtgatctatgctgaataaacagtggaatgtgaccagtcaagtagaaatcttgagtaatcagatggaatgcaatctttctaacattaagctaccaagatcctgaatgtcagagatgtactcagagggttaacagacaagcacaaggcatgctgactacattggtgtatccagattgctttgcttttagccagtgctttctaatttttttctcgacattcttgggatagttcaagtttgaaataattaagtggtggtgttctttaaggaatttctataaccaaattgatcttatttttgatttcacttatcatagaacaaatatgtatcattatggcagtgtatctatgtaattatcaatttaatcatcaccaccggtgtttccatattttttcccaagtatttaatatagctctcttatggtggtggcctggtgatggggaccgtctttcttttactgacacatgaccaatcatatggtattttcaagggaattttaagattcatcttttcagtttgatagtagactagttaaggaagaactctttcattacttgcatcgtgtaaatcatctctgtagacatgtgttcatattaatgaacacattttttctcaacattgtagcagaaatcattttattcgtcatgatcaatgaatatgtgatttgctccagatcgttagaaggaaaagtaagatttcagtcatcaaaaatgtttttaccgtagccctcatctaacttacacgtggtgcatattaaaataagcagagaaaaaaaaatgtgaataaactactgaaaacacttggtgttttgtgttcaatgagaccttcctgcaacctgctccccatgggtggcagttaacaggcccatcagatattgttgaaagaaagcaatatatccatgaatgaaggctaaaattgcaatcctttaccctttgaggcatatttcagttgaaaacaaaaagaaaagaaaatttggcttagagggtcacagagctcccatatgaccaagtctcaagcacattaaatcatggttgtttactggccaagggcgtccactagacaactctatcccttgcgctgaagctcaatcgtgctgagggagagctttcttaatattactgtgttgctcttagcccttctctgggttaggatctgtcagcatttctatgataaactcctattctcaaaggtttttaatttgaccataaaaatgtgccccaggctgaagtttgctatacagggctgtaccaaagagtgaaggtttacttccttctctttccaacttcttccccattctccaaggaaaagaacaacaaaaaaatctggtatggtccctccttaatagtgatttcagaattttggaaagcaccaagatccaagatggtagttttaatgtagttactcattcgcacacattttttaaatttaatgggtcacctggcatatattgtagataacatatcttttctataatttgtaagtcaataatttttttaactgctacatgatatttttttttgcccaaagattttaaaagacttgaagttggtcagttcaaaactcagatttttctacacattgtctgccatgtccattaggagtttggggaaaatactctcacacagacccttactttgcatgcagtttagagggtaagatacgtgcttcttttggggataaagatttccttacttaattgtcaaatttcatggagccattctagtctgttggggaaaatagtgattaaaagcacttccaaaattaacattttttgacaattcagatatgaaaagaagcaggggaaaataatacactttactcttttcttgcttaaaggcaaacaaatcaatgaaacttgaggacacactaaacatttgataactgcaaatgtgctttaaaaattggttcaatggtgcttacacatgaaacggtaacaaatggggttcctaggacgtcagaaggaatctttagtttgtatgtaattacacactagaggaggaggtgcttttaagccagtcttttatttttaatcatctcaaatatgcaaccatacatgcagtaacattaagggtcgtaaactggtgggaaacaggaacttcagtggagaggcttaaatgcctctggttagagtgggggtttttgtttgtttgtttattgttgggtttcaacactgagcatcatttctgtgatcaagtttctaactggcatgtgttttgatcatgaggtttaccatatcttgcccatacagacaaatgagagatctagtttcattttgttccctaaagaaagaacactctctaaaattaaatcatacctgtaaatttcttcagcatttgtttctgttcaatgaaattgagacccttaatgttgctttaatgtaaaattgaatattttgtctgtgatatactttaataatttaaagtaagtaatagttctaaagtcttcactgttgctactaagagaaaatagaattttaaaggtgatgataaagatgctataatgtcagttcactccagtccaatcaaatgtagtaagaaaaagtccttgaatagttctctagggacaatttctcacttgccattgacattaatctttggtgtattctcagaaaaaataaaaagaaattgaaactggtccaaggttatagtcatatcctcgataacttttgaaaaaaaattttattaggaaattaatactagcctttttcattctggctgaaagaaaattattaaaggattagttgagtgtgaaattcaacagtattttgctcatacatactaaaaaggtgcgtagggacttggcgcatttaaacaagtttctgaaaggtttcaatttgactcaagaaaaaaattcaatatttcttttgaaaatactgaatttatcacttgctgcatggatcagatggcataggttaatctttgattttcagaatcctaatgaaataactttcaaacaatttgtgtccttaattaaaggtggaatgagatccaatttttccccctaatccttcagtttaagctgatacatgtaggttaatgtggaatgaaatcatctgtgatatattatgttcatttatcaactgagcttttttgatgttgcctgtttttatgtaaaacatgttcttaaagttaataaaataatagtacttggtgtatgaactactacataataccttagctgaagggtacgctcctcagttcatttgccatattggagtaaaatttcaccttagttcaattcacaattgacacattcagttcacgaaggaatagcccagctgtgttcttagggggaattctctctatgcaaggctttaaaaattagtcatgcggtcagagtgtagctttcccacatgtcctccatagcacagtgtgtatttcatgagcataattcaaaaacagctatttcaaaaatgtcccttgtcatatattacgttcctgcctgggccactgacttggataaatacaaataaaccaaataccattca

SEQ ID NO: 5195 - DNA, 5342 bp, Homo sapiens
acttcattatgattcagtgcaaagtactgacagcactggggcttccggaagggagtggtgtcgggatgggggttgctgttggcaagaggcttaattgacacctttgatgtagcctaagacagaacctgcacctcccactgctgcttgggagacgtcagctttacgcagaaaaggcatctgctgatgaatcctgcatctcattcagcctgctctgggagcagccttagccatccttaaactcatccaaccgattcccatttccgcgggtgcttggcttagtgctgagacgggattccgccgttggtattcaggtccaacactaagactgtgtccatgttagaactcatagaagttaatggaacccctggtagtcagctctctactccgcgctcaggcaagtcgccaagcccatcacccaccagcccaggaagcctgcggaagcagagggacctgtaccgccccctctcttcggatgacttggattcagtaggagactcagtgtaaaagaaacaatggagcaatgtatatggtttgtgattgggtgaaggtttcacatttctgaagcaaaagtcttacagcaaaatacacaaaagagttttgcataccttgaaatgataaaagaccaaatcatccaaaagtaaatatgtatgcattttgttttcgtgatgttcaaccttgaaattgagagatttttaaaaatatctcccacatggatttgattggggagagtttgaacacaaaatgctgagatttttgtacagggcctggctctagatgaatttcatacacggacccaatattgagtacaagaacacactaaccatgtggcaatatagagccagaatttctgcagatggagttttcttcttaattataagtagacatagagatataatttttctgtactttctgtaaagcatattaaaacggcactagcaggcatattttttctaaaggttatattgtttttaaaatttgaattgcttggtttttagaggtacttttattacaaaataataaaaatacttgggtagattttttttctccctagacagtagaaaaagctacttactgttttgtgggttagtacatccgagagaaaaagaaaaattatgacaacgacacatctcataaagactctgaagttaggctttaggaacttgccttgtttttgttgtcaagtaaattttattttttaaagttattttattagaaacagtataaatttagcttaagctatatgccaatatgaagaacttggccaatggcattgctatagattgtataattttttcttacaatcatatacataattttttaaatgtgtaaaaactaaagctgggaattttttttttttccatacagacctaaaaaaaattgtgtctggactttttccaagaaatccatttgaaaagcaaaattcacttaaatggtgctgtataaatcaggcccagagtatccaaatctccactctgaaaaattctcaatcttgctggtgttttggaaattttcatatgcaaaactccttttgtgttaaaccaattaagtctatgattataacccattgttaaacattaacctactaattctgctcttctagtcctctattttaaaaattatagtcgtctttgcttaaacataaaataatgattttaaagtctgaatgttaaaaattaatttaatgtgtatggtctattgtatttaagccatatcctagtggtcatttacttttactagttcaaacactaacagtttaagacttgtgaagcatggttttgatattctccaggcttgacatatctcagtaggtgataaattaaaaatgtttgatgccatttggaggcttttacatgattttttttttcaaattttacttgaaaacaatttttaaatgttttattcaagatggagagaaattcagttgtcacacgctgttttaaatgttattgatttatctccctgataaattgttcaactagcaaattttaccatctggtttatagttacgtatgttaccatctcactttacaagtgaataaaatattccaaccaaaagaagaggaagaagaaaaaacgtccaggcaatctaacagcatttgaaaacttagccctataataattagtgcctcattatgctgtctgttggagagaaagacacttctctggcaggttattcaagagctgcaaactgaaacattccatcttgaaagaacagttcataataatacctgttccagacttcaggttttaaaactgtttccaatagaaatgaccagagactcctgctgagatcaaaaggctgctttattttagctgaaacagtaaacatctgtgaggttgcctatgctggtgtctgttttagttatgtctttgtaaaatgcattacttaatacagttgggtccataaaagattagtatgtatttgactaaactgccaaaaatacaaagaaagcagtggaacagttactttaaaactggtggggtcagatggtccagaacaaaaataaattccaataattttaacttccctgcactgtcaatcttatggacaactactgctagaaaggtccaataaatgctatttgttctaagtggtagatattgccaattgatatagagcccatggctttgtttagacagggcaaaaagaaactggacttgtactaattgccgatagatatcatggccaactttccattcaagcagttccaagggaagtgctttccacagcatttaatctcttgaacatatgacttctattaaaggactgttcaggggctatatatatcatttactttttgaaagtaaagtccctcagagattgaaacagcacaccatttatagtctttgagatctctttttatgcaaaacataattctattaaactaaagcagaaataaaaatttcttagcaacaaacacagaagttttcagttcattggtggaacagaattggtgatttataggcacttatgattgagttacttatagaattctttataaaaaaaattcggcaatgaatttttaaattgttctactgagcggggaatgcttcagcaaaagccacgcagttttgtcctaatgataatccttaaatgcgctctgaagacatcgtgctgtagttcaaagttcgatactttttcacttgcactcacttttttcttagatgtagacattgtagaaaaagatattaggaatatttccctgctttcagcattttagaagtgcaaaagttaaaaatatataaagtatgaagttcagtgtgaactcaaaagactatagtgctgaaagccacatggtgtgtttttgtcttgtttaatcaactaggcagggggaaaaatctagacagtttctgtactgccatagaattttaagaagtgtcaggttctctcatctgtatacatccctgtgcgcatatattggctcatctaaatattaagaacccaaaaaacattttctaaaaccatttgaaccagcgctgatgtactatatatatatataccctacataaccagccggggaatttccaacacatgccctgaagatctatacatgattgggctctttttctttctttctttctttctttctttctttcttttttttgcttaaaaacaatgaagtgtgcaagtcagatttcttaatgaaagtgaatgaatatatagaataatattcctgaaaattccacatattttaattcttggactgctaaatttttcatatgtggccatatatctatacaggtgtttgggtgtttatgtaaatttgccaggcttggtgtgtatgtgggtatgcttctgtaagtatctgtgtatgtgtataaaccatcaacagtaaagtatagtatttgtgatacagccttataagttactggctcttgtggaattatacataaaatcttcatgtaataaagtgttactctgtgacatattagttggggcatgtttaaattaaaaagcagtttgctcaactggtatggcaaatggttcaaaatattcagatatactgatttataaaaaaattgaaattcagctaaatccaatattgtgttaactattaaatataagtaacattaatgtttatattgatatatctttgttttcaattattaacaagatcgaatactatgatttttttctattgtgtgtgtatggatggcttgtagtggttgccaatcactatactctaaaaaaatgaaacattgatacagttgcagattgtcaagtataatgttggaacataaatagaagaaaatccagagtatatttgatatgaagtaagtttaataacaaagccagataacctgtaaggcgattctgtatgttctttcaaaactctaaactgttgacaaattttgaatatacttgctgtatgtgtgtatatatctacataaatatatacacacttgaaaatgttaatcgaatgaatttactatatatgcatacatttgctcatttatgcatatttgcattaaccttgctagcatctctatttgtgcatgttagtgacaactgtctttgattgaaatattgcacagaggcatagtgtgaaaaatagagatacactgaattcaatataccaattgcctgatatagcgtgttgtactgtcagttgaaaaatatttgtaattttgtgcctgttatgcatgtggaaaaaagaggaaatcagaggccctcactataatttttaagggtgcatgacatatgatgtctttaaaatgtggttcattttagtagattatggataaattccaagatagtataaatgatgcatgtaatacctgagtgtttgtattatatatggccacaaaatgtttttgaagccagggtagtagatatctaaaagttataggcaaagaagtatgaaagttaactttctgtgatgtgtttttgaggagttgatactcatcagtaagcaaggaattgagtttattttttctaagaactctttactttgaaatatattatgaatgttgtaaatttggataacgtttttataaagaggttacatactttctgctcacagtttcagttgattggatgtgtattctctttaaaaaaaaacattttgtgttaaaacatttgacacagcaatatattttttaaatccatcaactaagtccatcagcagagctttatagagctaagggttgacaaaatgtttcattgaactacccaattttgaaagttcagttactttgtgctgtggtttcattgtaaaatgttgtaccttgtgtttcacactggaccatgttattcctcttgaagttaactttgtgacacttaccaccttagaataactatataataaacaggaaaaactgccaaaaaaaaaaaaaaaaaa

SEQ ID NO: 5196 - DNA, 4425 bp, Homo sapiens; identical to SEQ ID NO: 639

SEQ ID NO: 5197 - DNA, 2649 bp, Homo sapiens; identical to SEQ ID NO: 1967

SEQ ID NO: 5198 - DNA, 5542 bp, Homo sapiens; identical to SEQ ID NO: 673

SEQ ID NO: 5199 - DNA, 1032 bp, Homo sapiens
ggagttcctggggccagagacatctccaagggaaggtcaagggcctggaggatgtgcggacctgacgacagatgccccgcacgctggccgggaccgggaagggcggtcaagtgtggaaagggtctggcggctgccaggcctggcagagtggagcggggcggggcgcagcggggcggggcgggcctggagctgcacccgcttctgggtggacgcacttggcgagcggcgcgggatgcagacggctgcgaggcgctgggcacagttgctgtcccctttgacgatgatgacaagattgttgggggctacacctgtgaggagaattctctcccctaccaggtgtccctgaattctggctcccacttctgcggtggctccctcatcagcgaacagtgggtggtatcagcagctcactgctacaagacccgcatccaggtgagactgggagagcacaacatcaaagtcctggaggggaatgagcagttcatcaatgcggccaagatcatccgccaccctaaatacaacagggacactctggacaatgacatcatgctgatcaaactctcctcacctgccgtcatcaatgcccgcgtgtccaccatctctctgcccaccgcccctccagctgctggcactgagtgcctcatctccggctggggcaacactctgagctttggtgctgactacccagacgagctgaagtgcctggatgctccggtgctgacccaggctgagtgtaaagcctcctaccctggaaagattaccaacagcatgttctgtgtgggcttccttgagggaggcaaggattcctgccagcgtgactctggtggccctgtggtctgcaacggacagctccaaggagttgtctcctggggccatggctgtgcctggaagaacaggcctggagtctacaccaaggtctacaactatgtggactggattaaggacaccatcgctgccaacagctaaagcccccggtccctctgcagtctctataccaataaagtggccctgctctcaaaaaaaaaaaaaaaa

SEQ ID NO: 5200 - DNA, 803 bp, Homo sapiens
ggttccgactcgcatgggacctgcgggggaggttgctgtcccctttgacgatgatgacaagattgttgggggctacacctgtgaggagaattctctcccctaccaggtgtccctgaattctggctcccacttctgcggtggctccctcatcagcgaacagtgggtggtatcagcagctcactgctacaagacccgcatccaggtgagactgggagagcacaacatcaaagtcctggaggggaatgagcagttcatcaatgcggccaagatcatccgccaccctaaatacaacagggacactctggacaatgacatcatgctgatcaaactctcctcacctgccgtcatcaatgcccgcgtgtccaccatctctctgcccaccgcccctccagctgctggcactgagtgcctcatctccggctggggcaacactctgagctttggtgctgactacccagacgagctgaagtgcctggatgctccggtgctgacccaggctgagtgtaaagcctcctaccctggaaagattaccaacagcatgttctgtgtgggcttccttgagggaggcaaggattcctgccagcgtgactctggtggccctgtggtctgcaacggacagctccaaggagttgtctcctggggccatggctgtgcctggaagaacaggcctggagtctacaccaaggtctacaactatgtggactggattaaggacaccatcgctgccaacagctaaagcccccggtccctctgcagtctctataccaataaagtggccctgctctcaaaaaaaaaaaaaaaaa

SEQ ID NO: 5201 - DNA, 575 bp, Homo sapiens
ccaccattgagaacgccaggattgtcctgcagatcaacaatgctcaactggctgcagatgacttctgaaccaagtttggtttgagtgtttgggtgctggatgaggtgaccctggccaggactgatctggaggcacagatcaaaggcctgaaggaagagctggcctacctgaagaagaagcatgaggaggaaatcaatgccctgaggggccaagtgggagaccaggtccatgtgagggtggattcagctcggacctgccaagatcctgagtgacaggcaaagccaatatgagatcatggccaagcagaactggaaggatgctgaagcctggttcaccagctggactgaggaactgaaccaggaggtcactggccacatagagcagctccagataagcaggtctgaggtcactgacctgcagtgcaccctccagggtcttgagattgagctgcactcgcagctcagcgtgaaagctcccttagaaggcacactggcagaaacagaggcatgctttggagcccagctggtgcagatccaggcactgatcagcagtattgaagcccagctgggcgatgt

SEQ ID NO: 5202 - DNA, 4105 bp, Homo sapiens; identical to SEQ ID NO: 1645

SEQ ID NO: 5203 - DNA, 4462 bp, Homo sapiens
ctcttgacccccccgccagagaaggaggaccctcccgcgccctttcggagcgtcggtggcccggctccggctctgcgctccatcctcccagccagcaggtgcccccagacccccggctcctcctccgccgccgtcacagcctcgtcctccgcctctggctcctccgcttcctgttgccgcgatccgggccgggagctgcgggcgcccgggcgcccgaggcttcccggtgcgctccgccaggtcagtcatcgctagagggttattattgacatttactcatcataaaatgtgatgtcagcctaccagctcggagtgcagttcctggtttccagtttacaacattgaccagttgctaacatgttatctctgaggaacttggaatgataaatacagccatacttaaatagaagattcttggccgtgtagataaggaaaataagataaggcaatatttttgaactattctataatagaaatgaggatatatacacaaaatgacccagtgctgttttcttagggtgcatcctttgtttttctggttttggtcttttcatcacaggatggcattagctctgtgtctgcaggtgctgtgcagcctgtgtggctggctctcgctctatatttctttctgccacctgaataagcaccgaagctatgagtggagctgccgcctggtcaccttcacccatggagtcctctctataggcctctccgcttatattggcttcattgatggcccatggccttttacccacccaggctcacccaatacacctctccaagttcatgtcctgtgtctcaccttgggctacttcatcttcgacttgggctggtgcgtctactttcagtctgagggtgccttgatgctggctcatcacacattgagtatcttgggcattatcatggcccttgtgcttggggagtctggcacagaggtcaatgcagtcctctttggaagtgagcttaccaaccccttgctacagatgcgctggtttctccgggaaacagggcactatcacagtttcactggagatgtagtggacttcctctttgtggctctgttcacaggagtgaggattggtgtgggagcttgcctccttttctgtgaaatggtctcccccacgcctaagtggtttgtgaaggctgggggagtagcgatgtatgctgtgtcttggtgtttcatgtttagcatctggcgctttgcatggaggaagagcatcaagaagtaccatgcttggagaagcaggcggagtgaggaacggcagctgaaacacaacggacatctcaaaatacactagccaaggcttgctccagattatggattgggttaagtcagccatgggaaccaggttggaaatatgactgttacataattacacttataacaaacttaggtttcaataaagggctaaatgtattgatcaatttggtcagtcttcaagccgagcatataccagtattaaaacactaacttctacagtagcacagttgtagaaagtgagaatactccatggtagttgggaataagtgagaactgtgaagtgagtacaactggcatttgttttcatttgtggtgaccctgggtcctcctgtccctgggaggtttgatgttcaggcagtttagaaaggaactcgaaaaagattagtgctatttcttgttcctttgagaagtaactctttcaataaacacttatttctgctttccatatagcaatttatctaagtttaccccatttactataaagtgaggggcttacaggaagagacacgcctttgacattctgaacattagatcggggaattgggtcgcttaaacagaggggcataggagggtgagagtgaaactggcagtgagggggagggctacttactgaacctcctataccaactgtgccagaggtgcccaagaccactgccaggttctgtaattctctgggaagactcagtggactcagcatatagtcttacttatagttttgatttattatagtgaaaagatacaaagaaaaatcggtaaaaggaaaaggcacctgagacaaagtctagggtaaagcaagcacaagtttccagagtcctctcccaatggaatcacacaggatgcacttaattcccctagcagtgatttgttacgacatgtgaatgagttgtctactggacaaggtcactacagactcagtgcccaaagtttttactgaggacaggtcatctaggcaggctttccctggcagatagcaaaattcaagactctcaaaaggaaagcaggtgttcagcataagccatattgtttgcacaagcagttcagacacagtaagccagtcttatcagttaattgtgggagcccctccaaaatctaagttcccaaatgccggccagtggccaaccctgtaatcaggcctctccaaggatagcagtttaggcctgctatgttaactcttttctgcacaaaacctatagagttagggctttggatctgagatgaatgaagtgtgggtagatttactgagtcctgttatatgggttctgccctaccaggaaaactatgccagttctcagggcttttgtgcattaatctcctaggcatttgaggctatgactaaattccatagggatttatcatgtggattccactgtgcttgagatggcagtttagatttcagctctgctgtacatattgcaaactagagccaaagactttaaagtgtgtactggcctcagggggatgaggttaatttttttttttcattttagatactttcccttttagtactcctcctacttttcttatttttactaaaaaggtaccactctatgaacaaactaataaaacaaggccagtcttggaaggaaaaaaataataattcttagtgtgacagtctccaagagaagcaagaatataagcttagaacaaggggttaagaatccagaattcctgggttcttttaactaattttgctactcacttgccactttggagagctactcactcactttggataggttacttgtttcttctttgcctgagtttaaacctattgtgaatgaatgaaataccctgtagtatatttcataaatacattatgtggcattttattaatggaggtctttaatgtagggcttttatggaaatatgaagtatttatgtatttattgattatttatttttaccatgttattgaagtcaatggtgtttgattagctcagtgggtgagcaagcatatggtgctactggagtcaaggctggtcagtaggaagcatcagtccattccatggccactggtaatctaacgtaatgaatggtgtcttttgttgttgttgttgttgttgttgttgtttgagacagagtcttgctctgtcgcccaggctggagtgcagtggtgtgatctcaactcactgcaacctccgccttctgtgttcaagtgattctcctgcctcagcctcccgagtagctgggactacaggcgtgtgccaccatgcctggctactttttgtatttttagtagagacggggtttcaccatgttggccaggctggtcttgaactcctgacttcatgacccacccgcctcggcctcccaaagtgctgggattacaggtgtgagccaccgtgcccagccatgagcggtcttgaaaatgaaaaatggtcttggccacagaaaccaggtatgagggagtggttggaatggtataaagtcatcactgttagggaaacagtaactttaaatgcatgttaacagtgggtctttaaaaatgaatgtcatttggttaaagagttttgctgggcattgagataatctgacagcatctccacttcctgttttttttcttaatctccactttttttttttctatgatgagcgcccctaaaatgctggtaagcttctttccaacaaaattgcggtcaaagtaggatgctggggaatgctgattttagcaaaagcttgtagaaaagagtggcctggcacatgagcttaaaaaaaagaaaaaaagctggctcttgaattttggcacagtgcaacctgttccataccagacaaatgaacaggcttaatctggtaccaattctttttctctcttactcctcagaagtgaagggactgcagatcttgttgttttggggacactttcatggaactgtatgtaggtttttttgaatggtgagaaatctgaataattggtaaggggaagggaatccctcatttcagcttttcttgatgttgttactaataactatgaaaaaacttctgagagaacaatgtgaactgaagatgactcagcagttaagacaatgctaagttctgaaaccacaggtaaatgaagggctaattaatgtgtggtatacttggacaaaatgaagtactcatttgcactggattactgtgtaatgataacgaacactgttcaagaacgatttatatttccataagatttgtactaaattttataaaagtaaaacaactttttat

SEQ ID NO: 5204 - DNA, 4143 bp, Homo sapiens
ctcttgacccccccgccagagaaggaggaccctcccgcgccctttcggagcgtcggtggcccggctccggctctgcgctccatcctcccagccagcaggtgcccccagacccccggctcctcctccgccgccgtcacagcctcgtcctccgcctctggctcctccgcttcctgttgccgcgatccgggccgggagctgcgggcgcccgggcgcccgaggcttcccggtgcgctccgccaggatggcattagctctgtgtctgcaggtgctgtgcagcctgtgtggctggctctcgctctatatttctttctgccacctgaataagcaccgaagctatgagtggagctgccgcctggtcaccttcacccatggagtcctctctataggcctctccgcttatattggcttcattgatggcccatggccttttacccacccaggctcacccaatacacctctccaagttcatgtcctgtgtctcaccttgggctacttcatcttcgacttgggctggtgcgtctactttcagtctgagggtgccttgatgctggctcatcacacattgagtatcttgggcattatcatggcccttgtgcttggggagtctggcacagaggtcaatgcagtcctctttggaagtgagcttaccaaccccttgctacagatgcgctggtttctccgggaaacagggcactatcacagtttcactggagatgtagtggacttcctctttgtggctctgttcacaggagtgaggattggtgtgggagcttgcctccttttctgtgaaatggtctcccccacgcctaagtggtttgtgaaggctgggggagtagcgatgtatgctgtgtcttggtgtttcatgtttagcatctggcgctttgcatggaggaagagcatcaagaagtaccatgcttggagaagcaggcggagtgaggaacggcagctgaaacacaacggacatctcaaaatacactagccaaggcttgctccagattatggattgggttaagtcagccatgggaaccaggttggaaatatgactgttacataattacacttataacaaacttaggtttcaataaagggctaaatgtattgatcaatttggtcagtcttcaagccgagcatataccagtattaaaacactaacttctacagtagcacagttgtagaaagtgagaatactccatggtagttgggaataagtgagaactgtgaagtgagtacaactggcatttgttttcatttgtggtgaccctgggtcctcctgtccctgggaggtttgatgttcaggcagtttagaaaggaactcgaaaaagattagtgctatttcttgttcctttgagaagtaactctttcaataaacacttatttctgctttccatatagcaatttatctaagtttaccccatttactataaagtgaggggcttacaggaagagacacgcctttgacattctgaacattagatcggggaattgggtcgcttaaacagaggggcataggagggtgagagtgaaactggcagtgagggggagggctacttactgaacctcctataccaactgtgccagaggtgcccaagaccactgccaggttctgtaattctctgggaagactcagtggactcagcatatagtcttacttatagttttgatttattatagtgaaaagatacaaagaaaaatcggtaaaaggaaaaggcacctgagacaaagtctagggtaaagcaagcacaagtttccagagtcctctcccaatggaatcacacaggatgcacttaattcccctagcagtgatttgttacgacatgtgaatgagttgtctactggacaaggtcactacagactcagtgcccaaagtttttactgaggacaggtcatctaggcaggctttccctggcagatagcaaaattcaagactctcaaaaggaaagcaggtgttcagcataagccatattgtttgcacaagcagttcagacacagtaagccagtcttatcagttaattgtgggagcccctccaaaatctaagttcccaaatgccggccagtggccaaccctgtaatcaggcctctccaaggatagcagtttaggcctgctatgttaactcttttctgcacaaaacctatagagttagggctttggatctgagatgaatgaagtgtgggtagatttactgagtcctgttatatgggttctgccctaccaggaaaactatgccagttctcagggcttttgtgcattaatctcctaggcatttgaggctatgactaaattccatagggatttatcatgtggattccactgtgcttgagatggcagtttagatttcagctctgctgtacatattgcaaactagagccaaagactttaaagtgtgtactggcctcagggggatgaggttaatttttttttttcattttagatactttcccttttagtactcctcctacttttcttatttttactaaaaaggtaccactctatgaacaaactaataaaacaaggccagtcttggaaggaaaaaaataataattcttagtgtgacagtctccaagagaagcaagaatataagcttagaacaaggggttaagaatccagaattcctgggttcttttaactaattttgctactcacttgccactttggagagctactcactcactttggataggttacttgtttcttctttgcctgagtttaaacctattgtgaatgaatgaaataccctgtagtatatttcataaatacattatgtggcattttattaatggaggtctttaatgtagggcttttatggaaatatgaagtatttatgtatttattgattatttatttttaccatgttattgaagtcaatggtgtttgattagctcagtgggtgagcaagcatatggtgctactggagtcaaggctggtcagtaggaagcatcagtccattccatggccactggtaatctaacgtaatgaatggtgtcttttgttgttgttgttgttgttgttgttgtttgagacagagtcttgctctgtcgcccaggctggagtgcagtggtgtgatctcaactcactgcaacctccgccttctgtgttcaagtgattctcctgcctcagcctcccgagtagctgggactacaggcgtgtgccaccatgcctggctactttttgtatttttagtagagacggggtttcaccatgttggccaggctggtcttgaactcctgacttcatgacccacccgcctcggcctcccaaagtgctgggattacaggtgtgagccaccgtgcccagccatgagcggtcttgaaaatgaaaaatggtcttggccacagaaaccaggtatgagggagtggttggaatggtataaagtcatcactgttagggaaacagtaactttaaatgcatgttaacagtgggtctttaaaaatgaatgtcatttggttaaagagttttgctgggcattgagataatctgacagcatctccacttcctgttttttttcttaatctccactttttttttttctatgatgagcgcccctaaaatgctggtaagcttctttccaacaaaattgcggtcaaagtaggatgctggggaatgctgattttagcaaaagcttgtagaaaagagtggcctggcacatgagcttaaaaaaaagaaaaaaagctggctcttgaattttggcacagtgcaacctgttccataccagacaaatgaacaggcttaatctggtaccaattctttttctctcttactcctcagaagtgaagggactgcagatcttgttgttttggggacactttcatggaactgtatgtaggtttttttgaatggtgagaaatctgaataattggtaaggggaagggaatccctcatttcagcttttcttgatgttgttactaataactatgaaaaaacttctgagagaacaatgtgaactgaagatgactcagcagttaagacaatgctaagttctgaaaccacaggtaaatgaagggctaattaatgtgtggtatacttggacaaaatgaagtactcatttgcactggattactgtgtaatgataacgaacactgttcaagaacgatttatatttccataagatttgtactaaattttataaaagtaaaacaactttttat

SEQ ID NO: 5205 - DNA, 4132 bp, Homo sapiens
ctcttgacccccccgccagagaaggaggaccctcccgcgccctttcggagcgtcggtggcccggctccggctctgcgctccatcctcccagccagcaggtgcccccagacccccggctcctcctccgccgccgtcacagcctcgtcctccgcctctggctcctccgcttcctgttgccgcgatccgggccgggagctgcgggcgcccgggcgcccgaggcttcccggtgcgctccgccagctctgtgtctgcaggtgctgtgcagcctgtgtggctggctctcgctctatatttctttctgccacctgaataagcaccgaagctatgagtggagctgccgcctggtcaccttcacccatggagtcctctctataggcctctccgcttatattggcttcattgatggcccatggccttttacccacccaggctcacccaatacacctctccaagttcatgtcctgtgtctcaccttgggctacttcatcttcgacttgggctggtgcgtctactttcagtctgagggtgccttgatgctggctcatcacacattgagtatcttgggcattatcatggcccttgtgcttggggagtctggcacagaggtcaatgcagtcctctttggaagtgagcttaccaaccccttgctacagatgcgctggtttctccgggaaacagggcactatcacagtttcactggagatgtagtggacttcctctttgtggctctgttcacaggagtgaggattggtgtgggagcttgcctccttttctgtgaaatggtctcccccacgcctaagtggtttgtgaaggctgggggagtagcgatgtatgctgtgtcttggtgtttcatgtttagcatctggcgctttgcatggaggaagagcatcaagaagtaccatgcttggagaagcaggcggagtgaggaacggcagctgaaacacaacggacatctcaaaatacactagccaaggcttgctccagattatggattgggttaagtcagccatgggaaccaggttggaaatatgactgttacataattacacttataacaaacttaggtttcaataaagggctaaatgtattgatcaatttggtcagtcttcaagccgagcatataccagtattaaaacactaacttctacagtagcacagttgtagaaagtgagaatactccatggtagttgggaataagtgagaactgtgaagtgagtacaactggcatttgttttcatttgtggtgaccctgggtcctcctgtccctgggaggtttgatgttcaggcagtttagaaaggaactcgaaaaagattagtgctatttcttgttcctttgagaagtaactctttcaataaacacttatttctgctttccatatagcaatttatctaagtttaccccatttactataaagtgaggggcttacaggaagagacacgcctttgacattctgaacattagatcggggaattgggtcgcttaaacagaggggcataggagggtgagagtgaaactggcagtgagggggagggctacttactgaacctcctataccaactgtgccagaggtgcccaagaccactgccaggttctgtaattctctgggaagactcagtggactcagcatatagtcttacttatagttttgatttattatagtgaaaagatacaaagaaaaatcggtaaaaggaaaaggcacctgagacaaagtctagggtaaagcaagcacaagtttccagagtcctctcccaatggaatcacacaggatgcacttaattcccctagcagtgatttgttacgacatgtgaatgagttgtctactggacaaggtcactacagactcagtgcccaaagtttttactgaggacaggtcatctaggcaggctttccctggcagatagcaaaattcaagactctcaaaaggaaagcaggtgttcagcataagccatattgtttgcacaagcagttcagacacagtaagccagtcttatcagttaattgtgggagcccctccaaaatctaagttcccaaatgccggccagtggccaaccctgtaatcaggcctctccaaggatagcagtttaggcctgctatgttaactcttttctgcacaaaacctatagagttagggctttggatctgagatgaatgaagtgtgggtagatttactgagtcctgttatatgggttctgccctaccaggaaaactatgccagttctcagggcttttgtgcattaatctcctaggcatttgaggctatgactaaattccatagggatttatcatgtggattccactgtgcttgagatggcagtttagatttcagctctgctgtacatattgcaaactagagccaaagactttaaagtgtgtactggcctcagggggatgaggttaatttttttttttcattttagatactttcccttttagtactcctcctacttttcttatttttactaaaaaggtaccactctatgaacaaactaataaaacaaggccagtcttggaaggaaaaaaataataattcttagtgtgacagtctccaagagaagcaagaatataagcttagaacaaggggttaagaatccagaattcctgggttcttttaactaattttgctactcacttgccactttggagagctactcactcactttggataggttacttgtttcttctttgcctgagtttaaacctattgtgaatgaatgaaataccctgtagtatatttcataaatacattatgtggcattttattaatggaggtctttaatgtagggcttttatggaaatatgaagtatttatgtatttattgattatttatttttaccatgttattgaagtcaatggtgtttgattagctcagtgggtgagcaagcatatggtgctactggagtcaaggctggtcagtaggaagcatcagtccattccatggccactggtaatctaacgtaatgaatggtgtcttttgttgttgttgttgttgttgttgttgtttgagacagagtcttgctctgtcgcccaggctggagtgcagtggtgtgatctcaactcactgcaacctccgccttctgtgttcaagtgattctcctgcctcagcctcccgagtagctgggactacaggcgtgtgccaccatgcctggctactttttgtatttttagtagagacggggtttcaccatgttggccaggctggtcttgaactcctgacttcatgacccacccgcctcggcctcccaaagtgctgggattacaggtgtgagccaccgtgcccagccatgagcggtcttgaaaatgaaaaatggtcttggccacagaaaccaggtatgagggagtggttggaatggtataaagtcatcactgttagggaaacagtaactttaaatgcatgttaacagtgggtctttaaaaatgaatgtcatttggttaaagagttttgctgggcattgagataatctgacagcatctccacttcctgttttttttcttaatctccactttttttttttctatgatgagcgcccctaaaatgctggtaagcttctttccaacaaaattgcggtcaaagtaggatgctggggaatgctgattttagcaaaagcttgtagaaaagagtggcctggcacatgagcttaaaaaaaagaaaaaaagctggctcttgaattttggcacagtgcaacctgttccataccagacaaatgaacaggcttaatctggtaccaattctttttctctcttactcctcagaagtgaagggactgcagatcttgttgttttggggacactttcatggaactgtatgtaggtttttttgaatggtgagaaatctgaataattggtaaggggaagggaatccctcatttcagcttttcttgatgttgttactaataactatgaaaaaacttctgagagaacaatgtgaactgaagatgactcagcagttaagacaatgctaagttctgaaaccacaggtaaatgaagggctaattaatgtgtggtatacttggacaaaatgaagtactcatttgcactggattactgtgtaatgataacgaacactgttcaagaacgatttatatttccataagatttgtactaaattttataaaagtaaaacaactttttat

SEQ ID NO: 5206 - DNA, 4118 bp, Homo sapiens
ctcttgacccccccgccagagaaggaggaccctcccgcgccctttcggagcgtcggtggcccggctccggctctgcgctccatcctcccagccagcaggtgcccccagacccccggctcctcctccgccgccgtcacagcctcgtcctccgcctctggctcctccgcttcctgttgccgcgatccgggccgggagctgcgggcgcccgggcgcccgaggcttcccggtgcgctccgccaggtgctgtgcagcctgtgtggctggctctcgctctatatttctttctgccacctgaataagcaccgaagctatgagtggagctgccgcctggtcaccttcacccatggagtcctctctataggcctctccgcttatattggcttcattgatggcccatggccttttacccacccaggctcacccaatacacctctccaagttcatgtcctgtgtctcaccttgggctacttcatcttcgacttgggctggtgcgtctactttcagtctgagggtgccttgatgctggctcatcacacattgagtatcttgggcattatcatggcccttgtgcttggggagtctggcacagaggtcaatgcagtcctctttggaagtgagcttaccaaccccttgctacagatgcgctggtttctccgggaaacagggcactatcacagtttcactggagatgtagtggacttcctctttgtggctctgttcacaggagtgaggattggtgtgggagcttgcctccttttctgtgaaatggtctcccccacgcctaagtggtttgtgaaggctgggggagtagcgatgtatgctgtgtcttggtgtttcatgtttagcatctggcgctttgcatggaggaagagcatcaagaagtaccatgcttggagaagcaggcggagtgaggaacggcagctgaaacacaacggacatctcaaaatacactagccaaggcttgctccagattatggattgggttaagtcagccatgggaaccaggttggaaatatgactgttacataattacacttataacaaacttaggtttcaataaagggctaaatgtattgatcaatttggtcagtcttcaagccgagcatataccagtattaaaacactaacttctacagtagcacagttgtagaaagtgagaatactccatggtagttgggaataagtgagaactgtgaagtgagtacaactggcatttgttttcatttgtggtgaccctgggtcctcctgtccctgggaggtttgatgttcaggcagtttagaaaggaactcgaaaaagattagtgctatttcttgttcctttgagaagtaactctttcaataaacacttatttctgctttccatatagcaatttatctaagtttaccccatttactataaagtgaggggcttacaggaagagacacgcctttgacattctgaacattagatcggggaattgggtcgcttaaacagaggggcataggagggtgagagtgaaactggcagtgagggggagggctacttactgaacctcctataccaactgtgccagaggtgcccaagaccactgccaggttctgtaattctctgggaagactcagtggactcagcatatagtcttacttatagttttgatttattatagtgaaaagatacaaagaaaaatcggtaaaaggaaaaggcacctgagacaaagtctagggtaaagcaagcacaagtttccagagtcctctcccaatggaatcacacaggatgcacttaattcccctagcagtgatttgttacgacatgtgaatgagttgtctactggacaaggtcactacagactcagtgcccaaagtttttactgaggacaggtcatctaggcaggctttccctggcagatagcaaaattcaagactctcaaaaggaaagcaggtgttcagcataagccatattgtttgcacaagcagttcagacacagtaagccagtcttatcagttaattgtgggagcccctccaaaatctaagttcccaaatgccggccagtggccaaccctgtaatcaggcctctccaaggatagcagtttaggcctgctatgttaactcttttctgcacaaaacctatagagttagggctttggatctgagatgaatgaagtgtgggtagatttactgagtcctgttatatgggttctgccctaccaggaaaactatgccagttctcagggcttttgtgcattaatctcctaggcatttgaggctatgactaaattccatagggatttatcatgtggattccactgtgcttgagatggcagtttagatttcagctctgctgtacatattgcaaactagagccaaagactttaaagtgtgtactggcctcagggggatgaggttaatttttttttttcattttagatactttcccttttagtactcctcctacttttcttatttttactaaaaaggtaccactctatgaacaaactaataaaacaaggccagtcttggaaggaaaaaaataataattcttagtgtgacagtctccaagagaagcaagaatataagcttagaacaaggggttaagaatccagaattcctgggttcttttaactaattttgctactcacttgccactttggagagctactcactcactttggataggttacttgtttcttctttgcctgagtttaaacctattgtgaatgaatgaaataccctgtagtatatttcataaatacattatgtggcattttattaatggaggtctttaatgtagggcttttatggaaatatgaagtatttatgtatttattgattatttatttttaccatgttattgaagtcaatggtgtttgattagctcagtgggtgagcaagcatatggtgctactggagtcaaggctggtcagtaggaagcatcagtccattccatggccactggtaatctaacgtaatgaatggtgtcttttgttgttgttgttgttgttgttgttgtttgagacagagtcttgctctgtcgcccaggctggagtgcagtggtgtgatctcaactcactgcaacctccgccttctgtgttcaagtgattctcctgcctcagcctcccgagtagctgggactacaggcgtgtgccaccatgcctggctactttttgtatttttagtagagacggggtttcaccatgttggccaggctggtcttgaactcctgacttcatgacccacccgcctcggcctcccaaagtgctgggattacaggtgtgagccaccgtgcccagccatgagcggtcttgaaaatgaaaaatggtcttggccacagaaaccaggtatgagggagtggttggaatggtataaagtcatcactgttagggaaacagtaactttaaatgcatgttaacagtgggtctttaaaaatgaatgtcatttggttaaagagttttgctgggcattgagataatctgacagcatctccacttcctgttttttttcttaatctccactttttttttttctatgatgagcgcccctaaaatgctggtaagcttctttccaacaaaattgcggtcaaagtaggatgctggggaatgctgattttagcaaaagcttgtagaaaagagtggcctggcacatgagcttaaaaaaaagaaaaaaagctggctcttgaattttggcacagtgcaacctgttccataccagacaaatgaacaggcttaatctggtaccaattctttttctctcttactcctcagaagtgaagggactgcagatcttgttgttttggggacactttcatggaactgtatgtaggtttttttgaatggtgagaaatctgaataattggtaaggggaagggaatccctcatttcagcttttcttgatgttgttactaataactatgaaaaaacttctgagagaacaatgtgaactgaagatgactcagcagttaagacaatgctaagttctgaaaccacaggtaaatgaagggctaattaatgtgtggtatacttggacaaaatgaagtactcatttgcactggattactgtgtaatgataacgaacactgttcaagaacgatttatatttccataagatttgtactaaattttataaaagtaaaacaactttttat

SEQ ID NO: 5207 - DNA, 3786 bp, Homo sapiens
ctcttgacccccccgccagagaaggaggaccctcccgcgccctttcggagcgtcggtggcccggctccggctctgcgctccatcctcccagccagcaggtgcccccagacccccggctcctcctccgccgccgtcacagcctcgtcctccgcctctggctcctccgcttcctgttgccgcgatccgggccgggagctgcgggcgcccgggcgcccgaggcttcccggtgcgctccgccaggatggcattagctctgtgtctgcaggtgctgtgcagcctgtgtggctggctctcgctctatatttctttctgccacctgaataagcaccgaagctatgagtggagctgccgcctggtcaccttcacccatggagtcctctctataggcctctccgcttatattggcttcattgatggcccatggccttttacccacccaggctcacccaatacacctctccaagttcatgtcctgtgtctcaccttgggctacttcatcttcgacttgggctgcatctggcgctttgcatggaggaagagcatcaagaagtaccatgcttggagaagcaggcggagtgaggaacggcagctgaaacacaacggacatctcaaaatacactagccaaggcttgctccagattatggattgggttaagtcagccatgggaaccaggttggaaatatgactgttacataattacacttataacaaacttaggtttcaataaagggctaaatgtattgatcaatttggtcagtcttcaagccgagcatataccagtattaaaacactaacttctacagtagcacagttgtagaaagtgagaatactccatggtagttgggaataagtgagaactgtgaagtgagtacaactggcatttgttttcatttgtggtgaccctgggtcctcctgtccctgggaggtttgatgttcaggcagtttagaaaggaactcgaaaaagattagtgctatttcttgttcctttgagaagtaactctttcaataaacacttatttctgctttccatatagcaatttatctaagtttaccccatttactataaagtgaggggcttacaggaagagacacgcctttgacattctgaacattagatcggggaattgggtcgcttaaacagaggggcataggagggtgagagtgaaactggcagtgagggggagggctacttactgaacctcctataccaactgtgccagaggtgcccaagaccactgccaggttctgtaattctctgggaagactcagtggactcagcatatagtcttacttatagttttgatttattatagtgaaaagatacaaagaaaaatcggtaaaaggaaaaggcacctgagacaaagtctagggtaaagcaagcacaagtttccagagtcctctcccaatggaatcacacaggatgcacttaattcccctagcagtgatttgttacgacatgtgaatgagttgtctactggacaaggtcactacagactcagtgcccaaagtttttactgaggacaggtcatctaggcaggctttccctggcagatagcaaaattcaagactctcaaaaggaaagcaggtgttcagcataagccatattgtttgcacaagcagttcagacacagtaagccagtcttatcagttaattgtgggagcccctccaaaatctaagttcccaaatgccggccagtggccaaccctgtaatcaggcctctccaaggatagcagtttaggcctgctatgttaactcttttctgcacaaaacctatagagttagggctttggatctgagatgaatgaagtgtgggtagatttactgagtcctgttatatgggttctgccctaccaggaaaactatgccagttctcagggcttttgtgcattaatctcctaggcatttgaggctatgactaaattccatagggatttatcatgtggattccactgtgcttgagatggcagtttagatttcagctctgctgtacatattgcaaactagagccaaagactttaaagtgtgtactggcctcagggggatgaggttaatttttttttttcattttagatactttcccttttagtactcctcctacttttcttatttttactaaaaaggtaccactctatgaacaaactaataaaacaaggccagtcttggaaggaaaaaaataataattcttagtgtgacagtctccaagagaagcaagaatataagcttagaacaaggggttaagaatccagaattcctgggttcttttaactaattttgctactcacttgccactttggagagctactcactcactttggataggttacttgtttcttctttgcctgagtttaaacctattgtgaatgaatgaaataccctgtagtatatttcataaatacattatgtggcattttattaatggaggtctttaatgtagggcttttatggaaatatgaagtatttatgtatttattgattatttatttttaccatgttattgaagtcaatggtgtttgattagctcagtgggtgagcaagcatatggtgctactggagtcaaggctggtcagtaggaagcatcagtccattccatggccactggtaatctaacgtaatgaatggtgtcttttgttgttgttgttgttgttgttgttgtttgagacagagtcttgctctgtcgcccaggctggagtgcagtggtgtgatctcaactcactgcaacctccgccttctgtgttcaagtgattctcctgcctcagcctcccgagtagctgggactacaggcgtgtgccaccatgcctggctactttttgtatttttagtagagacggggtttcaccatgttggccaggctggtcttgaactcctgacttcatgacccacccgcctcggcctcccaaagtgctgggattacaggtgtgagccaccgtgcccagccatgagcggtcttgaaaatgaaaaatggtcttggccacagaaaccaggtatgagggagtggttggaatggtataaagtcatcactgttagggaaacagtaactttaaatgcatgttaacagtgggtctttaaaaatgaatgtcatttggttaaagagttttgctgggcattgagataatctgacagcatctccacttcctgttttttttcttaatctccactttttttttttctatgatgagcgcccctaaaatgctggtaagcttctttccaacaaaattgcggtcaaagtaggatgctggggaatgctgattttagcaaaagcttgtagaaaagagtggcctggcacatgagcttaaaaaaaagaaaaaaagctggctcttgaattttggcacagtgcaacctgttccataccagacaaatgaacaggcttaatctggtaccaattctttttctctcttactcctcagaagtgaagggactgcagatcttgttgttttggggacactttcatggaactgtatgtaggtttttttgaatggtgagaaatctgaataattggtaaggggaagggaatccctcatttcagcttttcttgatgttgttactaataactatgaaaaaacttctgagagaacaatgtgaactgaagatgactcagcagttaagacaatgctaagttctgaaaccacaggtaaatgaagggctaattaatgtgtggtatacttggacaaaatgaagtactcatttgcactggattactgtgtaatgataacgaacactgttcaagaacgatttatatttccataagatttgtactaaattttataaaagtaaaacaactttttat

SEQ ID NO: 5208 - DNA, 3943 bp, Homo sapiens
ctcttgacccccccgccagagaaggaggaccctcccgcgccctttcggagcgtcggtggcccggctccggctctgcgctccatcctcccagccagcaggtgcccccagacccccggctcctcctccgccgccgtcacagcctcgtcctccgcctctggctcctccgcttcctgttgccgcgatccgggccgggagctgcgggcgcccgggcgcccgaggcttcccggtgcgctccgccaggctcacccaatacacctctccaagttcatgtcctgtgtctcaccttgggctacttcatcttcgacttgggctggtgcgtctactttcagtctgagggtgccttgatgctggctcatcacacattgagtatcttgggcattatcatggcccttgtgcttggggagtctggcacagaggtcaatgcagtcctctttggaagtgagcttaccaaccccttgctacagatgcgctggtttctccgggaaacagggcactatcacagtttcactggagatgtagtggacttcctctttgtggctctgttcacaggagtgaggattggtgtgggagcttgcctccttttctgtgaaatggtctcccccacgcctaagtggtttgtgaaggctgggggagtagcgatgtatgctgtgtcttggtgtttcatgtttagcatctggcgctttgcatggaggaagagcatcaagaagtaccatgcttggagaagcaggcggagtgaggaacggcagctgaaacacaacggacatctcaaaatacactagccaaggcttgctccagattatggattgggttaagtcagccatgggaaccaggttggaaatatgactgttacataattacacttataacaaacttaggtttcaataaagggctaaatgtattgatcaatttggtcagtcttcaagccgagcatataccagtattaaaacactaacttctacagtagcacagttgtagaaagtgagaatactccatggtagttgggaataagtgagaactgtgaagtgagtacaactggcatttgttttcatttgtggtgaccctgggtcctcctgtccctgggaggtttgatgttcaggcagtttagaaaggaactcgaaaaagattagtgctatttcttgttcctttgagaagtaactctttcaataaacacttatttctgctttccatatagcaatttatctaagtttaccccatttactataaagtgaggggcttacaggaagagacacgcctttgacattctgaacattagatcggggaattgggtcgcttaaacagaggggcataggagggtgagagtgaaactggcagtgagggggagggctacttactgaacctcctataccaactgtgccagaggtgcccaagaccactgccaggttctgtaattctctgggaagactcagtggactcagcatatagtcttacttatagttttgatttattatagtgaaaagatacaaagaaaaatcggtaaaaggaaaaggcacctgagacaaagtctagggtaaagcaagcacaagtttccagagtcctctcccaatggaatcacacaggatgcacttaattcccctagcagtgatttgttacgacatgtgaatgagttgtctactggacaaggtcactacagactcagtgcccaaagtttttactgaggacaggtcatctaggcaggctttccctggcagatagcaaaattcaagactctcaaaaggaaagcaggtgttcagcataagccatattgtttgcacaagcagttcagacacagtaagccagtcttatcagttaattgtgggagcccctccaaaatctaagttcccaaatgccggccagtggccaaccctgtaatcaggcctctccaaggatagcagtttaggcctgctatgttaactcttttctgcacaaaacctatagagttagggctttggatctgagatgaatgaagtgtgggtagatttactgagtcctgttatatgggttctgccctaccaggaaaactatgccagttctcagggcttttgtgcattaatctcctaggcatttgaggctatgactaaattccatagggatttatcatgtggattccactgtgcttgagatggcagtttagatttcagctctgctgtacatattgcaaactagagccaaagactttaaagtgtgtactggcctcagggggatgaggttaatttttttttttcattttagatactttcccttttagtactcctcctacttttcttatttttactaaaaaggtaccactctatgaacaaactaataaaacaaggccagtcttggaaggaaaaaaataataattcttagtgtgacagtctccaagagaagcaagaatataagcttagaacaaggggttaagaatccagaattcctgggttcttttaactaattttgctactcacttgccactttggagagctactcactcactttggataggttacttgtttcttctttgcctgagtttaaacctattgtgaatgaatgaaataccctgtagtatatttcataaatacattatgtggcattttattaatggaggtctttaatgtagggcttttatggaaatatgaagtatttatgtatttattgattatttatttttaccatgttattgaagtcaatggtgtttgattagctcagtgggtgagcaagcatatggtgctactggagtcaaggctggtcagtaggaagcatcagtccattccatggccactggtaatctaacgtaatgaatggtgtcttttgttgttgttgttgttgttgttgttgtttgagacagagtcttgctctgtcgcccaggctggagtgcagtggtgtgatctcaactcactgcaacctccgccttctgtgttcaagtgattctcctgcctcagcctcccgagtagctgggactacaggcgtgtgccaccatgcctggctactttttgtatttttagtagagacggggtttcaccatgttggccaggctggtcttgaactcctgacttcatgacccacccgcctcggcctcccaaagtgctgggattacaggtgtgagccaccgtgcccagccatgagcggtcttgaaaatgaaaaatggtcttggccacagaaaccaggtatgagggagtggttggaatggtataaagtcatcactgttagggaaacagtaactttaaatgcatgttaacagtgggtctttaaaaatgaatgtcatttggttaaagagttttgctgggcattgagataatctgacagcatctccacttcctgttttttttcttaatctccactttttttttttctatgatgagcgcccctaaaatgctggtaagcttctttccaacaaaattgcggtcaaagtaggatgctggggaatgctgattttagcaaaagcttgtagaaaagagtggcctggcacatgagcttaaaaaaaagaaaaaaagctggctcttgaattttggcacagtgcaacctgttccataccagacaaatgaacaggcttaatctggtaccaattctttttctctcttactcctcagaagtgaagggactgcagatcttgttgttttggggacactttcatggaactgtatgtaggtttttttgaatggtgagaaatctgaataattggtaaggggaagggaatccctcatttcagcttttcttgatgttgttactaataactatgaaaaaacttctgagagaacaatgtgaactgaagatgactcagcagttaagacaatgctaagttctgaaaccacaggtaaatgaagggctaattaatgtgtggtatacttggacaaaatgaagtactcatttgcactggattactgtgtaatgataacgaacactgttcaagaacgatttatatttccataagatttgtactaaattttataaaagtaaaacaactttttat

SEQ ID NO: 5209 - DNA, 7420 bp, Homo sapiens; identical to SEQ ID NO: 1518

SEQ ID NO: 5210 - DNA, 7545 bp, Homo sapiens
atcacatttgtctgccacagcagcaacaacagaaaagcggagggagggagggaggcgggaggaggggagcagagctccgcaagtcttgggctctgcgtggaggttgcgtttggctggcgtccccgaccccgggctttttgcacggcagctctctctgcgcagcgccgggcggccgtagtcgctccgcggcgcgactccgcggtctcgtggcgagcgcgcgtgggcgagtggccgcggacactctggcctcgcgagggaagccgcgccgcgtcctcgccccgtcgccccgcgggccggccgagacgacgggaagttttatttgcagctcggagcctgtggcggatggtgggactctccggccctgtgcagtaaaagattgatctctgggctggtgaacataatctctgtcccagtcagaaaaggagagaggaaattagcagagcgattggtggagaatgatatctgtcaaaagaaacacttggagagcactgagtttagtaataggtgactgccggaaaaaagggaactttgaatattgtcaagatcgtactgagaagcactccacaatgccagactcacctgtggatgtgaagacgcaatctaggctgactcctccaacaatgccacctcccccaactactcaaggagctccaagaaccagttcatttacaccgacaacgttaactaatggcacgagccattctcctacagccttgaatggcgccccctcaccacccaatggcttcagcaatgggccttcctcttcttcctcctcctctctggctaatcaacagctgcccccagcctgtggtgccaggcaactcagcaagctgaaaaggttccttactaccctgcagcagtttggcaatgacatttcacccgagataggagaaagagttcgcaccctcgttctgggactagtgaactccactttgacaattgaagaatttcattccaaactgcaagaagctactaacttcccactgagaccttttgtcatcccatttttgaaggccaacttgcccctgctgcagcgtgagctcctccactgcgcaagactggccaaacagaaccctgcccagtacctcgcccagcatgaacagctgcttctggatgccagcaccacctcacctgttgactcctcagagctgcttctcgatgtgaacgaaaacgggaagaggcgaactccagacagaaccaaagaaaatggctttgacagagagcctttgcactcagaacatccaagcaagcgaccatgcactattagcccaggccagcggtacagtccaaataacggcttatcctaccagcccaatggcctgcctcaccctaccccacctccacctcagcattaccgtttggatgatatggccattgcccaccactacagggactcctatcgacaccccagccacagggacctcagggacagaaacagacctatggggttgcatggcacacgtcaagaagaaatgattgatcacagactaacagacagagaatgggcagaagagtggaaacatcttgaccatctgttaaactgcataatggacatggtagaaaaaacaaggcgatctctcaccgtactaaggcggtgtcaagaagcagaccgggaagaattgaattactggatccggcggtacagtgacgccgaggacttaaaaaaaggtggcggcagtagcagcagccactctaggcagcagagtcccgtcaacccagacccagttgcactagacgcgcatcgggaattccttcacaggcctgcgtctggatacgtgccagaggagatctggaagaaagctgaggaggccgtcaatgaggtgaagcgccaggcgatgacggagctgcagaaggccgtgtctgaggcggagcggaaagcccacgacatgatcacaacagagagggccaagatggagcgcacggtcgccgaggccaaacggcaggcggcggaggacgcactggcagttatcaatcagcaggaggattcaagcgagagttgctggaattgtggccgtaaagcgagtgaaacctgcagtggctgtaacacagcccgatactgtggctcattttgccagcacaaagactgggagaagcaccatcacatctgtggacagaccctgcaggcccagcagcagggagacacacctgcagtcagctcctctgtcacgcccaacagcggggctgggagcccgatggacacaccaccagcagccactccgaggtcaaccaccccgggaaccccttccaccatagagacaacccctcgctagacgtgaactcagaactgtcggaggaaagacaacacaaccaacgcgaaaccaattcctcatcctcagatgctcaaagttgttttttttgtttgtttgtttattagatgaattatcctatttcagtacttcagcaagagagaacctaactgtatcttgaggtggtagtaaaacacagagggccagtaacgggtcgtaatgacttattgtggataacaaagatatcttttctttagagaactgaaaagagagcagagaatataacatgaaatgatagatttgacctcctccctgttattttcaagtagctgggattttaaactagatgacctcattaaccgatgctttaccaaacagcaaaccaagagattgctaattgctgttgaaagcaaaaatgctaatattaaaagtcacaatgttctttatatacaataatggaaaaaaaaaaaagaggaaaaccctcaagggcatgagcattggatacagcagtagacattttaacaagaagatgaatggcgtccgtgggttgctaactgaactttgaagacccgctacaaaacgcgcagatgtgcagcagattggaaggagacacagatgttcggtttttttcctgtttctgaaaagaaataataatatccaggtcaacagaatgaaaaatgaaagatgatttgcaatgggatgtatgaatacagcagcaagaaaaaaaaatgccataatacaaaaggctccatatatatatatatatatatatatatacacacacacacacgcacatatacacacacacacacacacacacacacacacacacacacacacacacacacacacaagtaagagactcagcctgcagttaattagcattctggcagttttgacatcagccagctgccctaaataacccttcaacgtttcttcacttttgcaaggttccacagagtaagacattgggtctattccagctcattcattttatattgaaaaaaataattttaaaaatggtggcttcagctccagcccctttccaaaatttttcaaccccaccctgtttggatttttaattaaaaactagtagttctcttggtgttaaaacacttctgtcctgtgaggtttcccaatggtgtttttcttgtaaatgtgttggacaaatgtgaagatgcattgtagtttaaccatatgcccacatttagtctctttattcctagttggtgagaaacctgtatctttctatgctgcttttatatctgtatgtattagtgatatttctctagtagttaaaaaaaaaaaaaggaaaaaaagactctttttggttgtcctcaagaaaagaaaagaagaaaagctatctttcggagctgctatttcactctcttataggatttttttttttcctgaaaaccagcatgcttcacggaatgctaacatattggtgtttttgtaagagggatgtacataaatgtattttgcactgtcacaatgactccctaggcatgctttttgtttttttttttttttttttgagcaaattctttttaaatatgctagagccatttcatcaagtttagctgtagcatagagtagtcgtggaatttttcttttttttttttttaaatcattattagggacttttttaaaaaaataaaataacaagatatcctactttaaaaaaaaaggacagtgcatgcatattgctgtaaggtcgtttaagtatttctaattttacaaaagtaaaaatcattagagctccaaatgctgaggtgtagattgacagctttaacactgctgaatgccaggttatacagtattcttacaaaaagggaagtcagccaaagactgatctgatggaccaaaatcggaattttgaaaagcaccagtactactttccaaatgatcagcaggttaaacatgttcagcaaggtatagtatgaatccattaacccttcgttgtccagggtccagaccagaactacttgttagttttgaaaacagtagcccaggatgtggttgtgtgctttaggaaagtcagcagtgctgcaggctgtgtagacaaccaaagtttacaaggctgggaagacacttctccaaatacatatacaccaggcatttctttaaaatcaaaaacaatccattagctttggggcggggggtggggggagggttaaatgtaggccttggaaacagttttaagtggcttttaagtatctgcatagaggcaatcctaaggtttgctttaagtctcttaaatctaacatttttaaaagcatttcttccctgtattttcatatacaagttggttttaattttgtttgggtggtgttattttttttaaatgactttttagtttagaaagttctgatgagcaaataaatacatctatctacatgttggaagtccatctgccagcacacctgcttaaagtgaaatgaaagcacataaccaggctctgaatgggttatattttatcatggtgctcccagaatcctttgacctcactctgctttctagtctgcttgtgacactggacagtcctttcttacagagctattatatgttctaggctacgaagggttaaataatcccaaaaatgaggtatgtcatacccacacgtctttatctctagaagctgtgatgtatgtgaaacagcactgttattcttaacactagtgtgtaaaataaggattagtacagtacgtctcattactttttaattcagggcaccctgagtgaaaacaaatacaaaaaaaaatccctaactctgagctctatctctgattcctcttcctccttcccctcttcctcctcttcctctcctcctgttttgctacattctcctcagtggcaaaaagtttcactctacctctgacagcatgtatattgcaccagtagctaacaaaaactggtctagtcaaaccaaatgggcacaaaagaaccaggataccaaaagttaagctcatacagctgcaaaccatatcacttcttggtaacaatgcagacctcataaacctaaagaagagaaagaaaagaaaacttttgttactttccttttttgcttgtcacttatatacaggctatgtgagaatataatttgtaggtataacacattaagaaaaagttatcttcattggatagaattgaatggtggtcgctgataggaatagggcgtcctctagctcttatctctgtctcttactcttttctctttctctttttctctgtcatgagactgtgtgtgacagggccacctgtcttttttttttcttaaattttttttttttttatgtgtaggtgcatgtcttggggatttaaaaatttcaaggctggtttacttatgcaaagcatgcctacgtctggaatacttagggaaagaaagcgactccatgttgtccgaattcctcaagggacagaaaaaaaattggagactgttgaaatgcagatttgaagtaatttttttaaaatattattttgggttctgcgacattgtgaaaaattaaagttgttgtgcaatacttaattcagacatgtaccacaagttaatggtagactaacactggggggtggggtctaggcatcatgcttttgtcagcatactcttgagcttttaagtctactatgtctgaactgtggtttcttgtttatccttttttccttagttggactgtaatgtatggtctgtcaacctgtgaatctttaaagtatgattcaggtattgttgtattctttactgtgtaataaaaaagttgaaaaaaatctggatcctctgtctccctcgtccccggtgtgccatggttgcccaccagtgaccccagcctgaggagtccatcctccatggtgctgaatcaaatctgtagagtttattcagctacaaagcgtggctctgtaacaggagttggcttatccatgcgtgttgagtagggaatgatgtcagaactttgcaaaagtcgagctcattcataaggggatgtttctcaggcaggaggagtaggaagagtgggaggagaattactaccttccataggaaaggagagcttggcttgcctagattagctgctgcatagatagcagaggcccttttggctgtgttttgataaaattagaaatgagtacctaaatctggatcactctgctcagagaggttcgtgccaacctcatgaggctctgactcttgtcaggttgcttggctgccttgtgcatacccgaatggcagatcagctgacatgacatggaactgctctatctgccttgtcccctctcctctaattaaaagtcgctaccattgtcactcttggttatgtagttaatatccactgtggctatctccaacttgctgggacatccagttatctcctctgacacatattttttcattctctagttacaaagtttgttagagtttgaaaaacaaacccttctcccctaccctgtgaatgctgttagtttttatgtgtagttttcaaaacacagattatcttatatactgtgttgtagcagaaattcctgtttcctctgaatgttctgactttatagaccaaaataatcgttgcaaaaaatcaaggatggcacagcaggtgcatgagcccgtgtctggagaaaggttatgaaggtgaatgctggttacatgggagggtgacttggagccctctagtttccttcttgtgccagctgggttcctgtttcaaggccaggcttctctaacttgtcttcctgggaaatgtagcttttccaagaatttggtagtgcacaccaggaaaaactaggtatcagaacagatttttttttaaatagtggaaacaccctcactcccacactttggacagttagggttggatatttaatttcatagttactctttttttccacagaagaaaggccagcctgacccaagttgcctatttttaatgtgttactgcatcttattttctcttcaaagtgaaaaaggccagaaactagcagatagaaatggaacccgttgacttagttcccttataagaagttcttgcaaacacctctgtgacgttttcattcaagtggatatgttggacaaataggaaacagttttagtttacgcgaacagtatgagacttccaggtggtggacgccatttttttagaagtgttgatgatgtatttgataacattataaaagtatgtgtctcccgtgaaagaacattgagctatttccctggaatggatggggaagaaatgagcaaaggagtgctgttctgtatgggtgtctatacccttattccaaggtgaataaataaagttgtgtttgcctaatcatg

SEQ ID NO: 5211 - DNA, 7237 bp, Homo sapiens
tctctctccctctctccctttccaaatgattcagaagtcgataagaccaggagaagtgaagatgtaacatgttatctgtcgctcctcttagctggcggagagaatttacatttaaagattagcagagtgagaaagagaaatctgccttttgttgtgtggggtgaggaggaggcatctacccctggccttgacgctatctcccatcacctctgctatccagacaggactcaccgagatcgtactgagaagcactccacaatgccagactcacctgtggatgtgaagacgcaatctaggctgactcctccaacaatgccacctcccccaactactcaaggagctccaagaaccagttcatttacaccgacaacgttaactaatggcacgagccattctcctacagccttgaatggcgccccctcaccacccaatggcttcagcaatgggccttcctcttcttcctcctcctctctggctaatcaacagctgcccccagcctgtggtgccaggcaactcagcaagctgaaaaggttccttactaccctgcagcagtttggcaatgacatttcacccgagataggagaaagagttcgcaccctcgttctgggactagtgaactccactttgacaattgaagaatttcattccaaactgcaagaagctactaacttcccactgagaccttttgtcatcccatttttgaaggccaacttgcccctgctgcagcgtgagctcctccactgcgcaagactggccaaacagaaccctgcccagtacctcgcccagcatgaacagctgcttctggatgccagcaccacctcacctgttgactcctcagagctgcttctcgatgtgaacgaaaacgggaagaggcgaactccagacagaaccaaagaaaatggctttgacagagagcctttgcactcagaacatccaagcaagcgaccatgcactattagcccaggccagcggtacagtccaaataacggcttatcctaccagcccaatggcctgcctcaccctaccccacctccacctcagcattaccgtttggatgatatggccattgcccaccactacagggactcctatcgacaccccagccacagggacctcagggacagaaacagacctatggggttgcatggcacacgtcaagaagaaatgattgatcacagactaacagacagagaatgggcagaagagtggaaacatcttgaccatctgttaaactgcataatggacatggtagaaaaaacaaggcgatctctcaccgtactaaggcggtgtcaagaagcagaccgggaagaattgaattactggatccggcggtacagtgacgccgaggacttaaaaaaaggtggcggcagtagcagcagccactctaggcagcagagtcccgtcaacccagacccagttgcactagacgcgcatcgggaattccttcacaggcctgcgtctggatacgtgccagaggagatctggaagaaagctgaggaggccgtcaatgaggtgaagcgccaggcgatgacggagctgcagaaggccgtgtctgaggcggagcggaaagcccacgacatgatcacaacagagagggccaagatggagcgcacggtcgccgaggccaaacggcaggcggcggaggacgcactggcagttatcaatcagcaggaggattcaagcgagagttgctggaattgtggccgtaaagcgagtgaaacctgcagtggctgtaacacagcccgatactgtggctcattttgccagcacaaagactgggagaagcaccatcacatctgtggacagaccctgcaggcccagcagcagggagacacacctgcagtcagctcctctgtcacgcccaacagcggggctgggagcccgatggacacaccaccagcagccactccgaggtcaaccaccccgggaaccccttccaccatagagacaacccctcgctagacgtgaactcagaactgtcggaggaaagacaacacaaccaacgcgaaaccaattcctcatcctcagatgctcaaagttgttttttttgtttgtttgtttattagatgaattatcctatttcagtacttcagcaagagagaacctaactgtatcttgaggtggtagtaaaacacagagggccagtaacgggtcgtaatgacttattgtggataacaaagatatcttttctttagagaactgaaaagagagcagagaatataacatgaaatgatagatttgacctcctccctgttattttcaagtagctgggattttaaactagatgacctcattaaccgatgctttaccaaacagcaaaccaagagattgctaattgctgttgaaagcaaaaatgctaatattaaaagtcacaatgttctttatatacaataatggaaaaaaaaaaaagaggaaaaccctcaagggcatgagcattggatacagcagtagacattttaacaagaagatgaatggcgtccgtgggttgctaactgaactttgaagacccgctacaaaacgcgcagatgtgcagcagattggaaggagacacagatgttcggtttttttcctgtttctgaaaagaaataataatatccaggtcaacagaatgaaaaatgaaagatgatttgcaatgggatgtatgaatacagcagcaagaaaaaaaaatgccataatacaaaaggctccatatatatatatatatatatatatatacacacacacacacgcacatatacacacacacacacacacacacacacacacacacacacacacacacacacacacaagtaagagactcagcctgcagttaattagcattctggcagttttgacatcagccagctgccctaaataacccttcaacgtttcttcacttttgcaaggttccacagagtaagacattgggtctattccagctcattcattttatattgaaaaaaataattttaaaaatggtggcttcagctccagcccctttccaaaatttttcaaccccaccctgtttggatttttaattaaaaactagtagttctcttggtgttaaaacacttctgtcctgtgaggtttcccaatggtgtttttcttgtaaatgtgttggacaaatgtgaagatgcattgtagtttaaccatatgcccacatttagtctctttattcctagttggtgagaaacctgtatctttctatgctgcttttatatctgtatgtattagtgatatttctctagtagttaaaaaaaaaaaaaggaaaaaaagactctttttggttgtcctcaagaaaagaaaagaagaaaagctatctttcggagctgctatttcactctcttataggatttttttttttcctgaaaaccagcatgcttcacggaatgctaacatattggtgtttttgtaagagggatgtacataaatgtattttgcactgtcacaatgactccctaggcatgctttttgtttttttttttttttttttgagcaaattctttttaaatatgctagagccatttcatcaagtttagctgtagcatagagtagtcgtggaatttttcttttttttttttttaaatcattattagggacttttttaaaaaaataaaataacaagatatcctactttaaaaaaaaaggacagtgcatgcatattgctgtaaggtcgtttaagtatttctaattttacaaaagtaaaaatcattagagctccaaatgctgaggtgtagattgacagctttaacactgctgaatgccaggttatacagtattcttacaaaaagggaagtcagccaaagactgatctgatggaccaaaatcggaattttgaaaagcaccagtactactttccaaatgatcagcaggttaaacatgttcagcaaggtatagtatgaatccattaacccttcgttgtccagggtccagaccagaactacttgttagttttgaaaacagtagcccaggatgtggttgtgtgctttaggaaagtcagcagtgctgcaggctgtgtagacaaccaaagtttacaaggctgggaagacacttctccaaatacatatacaccaggcatttctttaaaatcaaaaacaatccattagctttggggcggggggtggggggagggttaaatgtaggccttggaaacagttttaagtggcttttaagtatctgcatagaggcaatcctaaggtttgctttaagtctcttaaatctaacatttttaaaagcatttcttccctgtattttcatatacaagttggttttaattttgtttgggtggtgttattttttttaaatgactttttagtttagaaagttctgatgagcaaataaatacatctatctacatgttggaagtccatctgccagcacacctgcttaaagtgaaatgaaagcacataaccaggctctgaatgggttatattttatcatggtgctcccagaatcctttgacctcactctgctttctagtctgcttgtgacactggacagtcctttcttacagagctattatatgttctaggctacgaagggttaaataatcccaaaaatgaggtatgtcatacccacacgtctttatctctagaagctgtgatgtatgtgaaacagcactgttattcttaacactagtgtgtaaaataaggattagtacagtacgtctcattactttttaattcagggcaccctgagtgaaaacaaatacaaaaaaaaatccctaactctgagctctatctctgattcctcttcctccttcccctcttcctcctcttcctctcctcctgttttgctacattctcctcagtggcaaaaagtttcactctacctctgacagcatgtatattgcaccagtagctaacaaaaactggtctagtcaaaccaaatgggcacaaaagaaccaggataccaaaagttaagctcatacagctgcaaaccatatcacttcttggtaacaatgcagacctcataaacctaaagaagagaaagaaaagaaaacttttgttactttccttttttgcttgtcacttatatacaggctatgtgagaatataatttgtaggtataacacattaagaaaaagttatcttcattggatagaattgaatggtggtcgctgataggaatagggcgtcctctagctcttatctctgtctcttactcttttctctttctctttttctctgtcatgagactgtgtgtgacagggccacctgtcttttttttttcttaaattttttttttttttatgtgtaggtgcatgtcttggggatttaaaaatttcaaggctggtttacttatgcaaagcatgcctacgtctggaatacttagggaaagaaagcgactccatgttgtccgaattcctcaagggacagaaaaaaaattggagactgttgaaatgcagatttgaagtaatttttttaaaatattattttgggttctgcgacattgtgaaaaattaaagttgttgtgcaatacttaattcagacatgtaccacaagttaatggtagactaacactggggggtggggtctaggcatcatgcttttgtcagcatactcttgagcttttaagtctactatgtctgaactgtggtttcttgtttatccttttttccttagttggactgtaatgtatggtctgtcaacctgtgaatctttaaagtatgattcaggtattgttgtattctttactgtgtaataaaaaagttgaaaaaaatctggatcctctgtctccctcgtccccggtgtgccatggttgcccaccagtgaccccagcctgaggagtccatcctccatggtgctgaatcaaatctgtagagtttattcagctacaaagcgtggctctgtaacaggagttggcttatccatgcgtgttgagtagggaatgatgtcagaactttgcaaaagtcgagctcattcataaggggatgtttctcaggcaggaggagtaggaagagtgggaggagaattactaccttccataggaaaggagagcttggcttgcctagattagctgctgcatagatagcagaggcccttttggctgtgttttgataaaattagaaatgagtacctaaatctggatcactctgctcagagaggttcgtgccaacctcatgaggctctgactcttgtcaggttgcttggctgccttgtgcatacccgaatggcagatcagctgacatgacatggaactgctctatctgccttgtcccctctcctctaattaaaagtcgctaccattgtcactcttggttatgtagttaatatccactgtggctatctccaacttgctgggacatccagttatctcctctgacacatattttttcattctctagttacaaagtttgttagagtttgaaaaacaaacccttctcccctaccctgtgaatgctgttagtttttatgtgtagttttcaaaacacagattatcttatatactgtgttgtagcagaaattcctgtttcctctgaatgttctgactttatagaccaaaataatcgttgcaaaaaatcaaggatggcacagcaggtgcatgagcccgtgtctggagaaaggttatgaaggtgaatgctggttacatgggagggtgacttggagccctctagtttccttcttgtgccagctgggttcctgtttcaaggccaggcttctctaacttgtcttcctgggaaatgtagcttttccaagaatttggtagtgcacaccaggaaaaactaggtatcagaacagatttttttttaaatagtggaaacaccctcactcccacactttggacagttagggttggatatttaatttcatagttactctttttttccacagaagaaaggccagcctgacccaagttgcctatttttaatgtgttactgcatcttattttctcttcaaagtgaaaaaggccagaaactagcagatagaaatggaacccgttgacttagttcccttataagaagttcttgcaaacacctctgtgacgttttcattcaagtggatatgttggacaaataggaaacagttttagtttacgcgaacagtatgagacttccaggtggtggacgccatttttttagaagtgttgatgatgtatttgataacattataaaagtatgtgtctcccgtgaaagaacattgagctatttccctggaatggatggggaagaaatgagcaaaggagtgctgttctgtatgggtgtctatacccttattccaaggtgaataaataaagttgtgtttgcctaatcatg

SEQ ID NO: 5212 - DNA, 7769 bp, Homo sapiens
ccctcctgcctgtccctttctgtcttctctctctctctcccacttttcctccctctcccgctccgtctcacacgcaccctctgtttattttcctgcctccatctgggccctgctgatattgtaatcaccctgatgcacgttggcttctctcctctccctcctgcgctcacacactcactcacacacaatgtgccatcctgacaaggcttttacttctgataagctccaatgtgtgtttaatgaatacaaagccgcggtctgggtgccgcctcggccgcggccgctctcccgcgctcctttgccagaagctggcggagagaatttacatttaaagattagcagagtgagaaagagaaatctgccttttgttgtgtggggtgaggaggaggcatctacccctggccttgacgctatctcccatcacctctgctatccagacaggactcaccgagtatcaaatgataagaactgagcacactggatgaaataatacttgcactgggagcactaagaaaagattgatctctgggctggtgaacataatctctgtcccagtcagaaaaggagagaggaaattagcagagcgattggtggagaatgatatctgtcaaaagaaacacttggagagcactgagtttagtaataggtgactgccggaaaaaagggaactttgaatattgtcaagaacaggaggcatgagcccggaacgcgcttgcttttaggagacagccactttctgtgtggtacgctggattcaaggatgcctgatcgtactgagaagcactccacaatgccagactcacctgtggatgtgaagacgcaatctaggctgactcctccaacaatgccacctcccccaactactcaaggagctccaagaaccagttcatttacaccgacaacgttaactaatggcacgagccattctcctacagccttgaatggcgccccctcaccacccaatggcttcagcaatgggccttcctcttcttcctcctcctctctggctaatcaacagctgcccccagcctgtggtgccaggcaactcagcaagctgaaaaggttccttactaccctgcagcagtttggcaatgacatttcacccgagataggagaaagagttcgcaccctcgttctgggactagtgaactccactttgacaattgaagaatttcattccaaactgcaagaagctactaacttcccactgagaccttttgtcatcccatttttgaaggccaacttgcccctgctgcagcgtgagctcctccactgcgcaagactggccaaacagaaccctgcccagtacctcgcccagcatgaacagctgcttctggatgccagcaccacctcacctgttgactcctcagagctgcttctcgatgtgaacgaaaacgggaagaggcgaactccagacagaaccaaagaaaatggctttgacagagagcctttgcactcagaacatccaagcaagcgaccatgcactattagcccaggccagcggtacagtccaaataacggcttatcctaccagcccaatggcctgcctcaccctaccccacctccacctcagcattaccgtttggatgatatggccattgcccaccactacagggactcctatcgacaccccagccacagggacctcagggacagaaacagacctatggggttgcatggcacacgtcaagaagaaatgattgatcacagactaacagacagagaatgggcagaagagtggaaacatcttgaccatctgttaaactgcataatggacatggtagaaaaaacaaggcgatctctcaccgtactaaggcggtgtcaagaagcagaccgggaagaattgaattactggatccggcggtacagtgacgccgaggacttaaaaaaaggtggcggcagtagcagcagccactctaggcagcagagtcccgtcaacccagacccagttgcactagacgcgcatcgggaattccttcacaggcctgcgtctggatacgtgccagaggagatctggaagaaagctgaggaggccgtcaatgaggtgaagcgccaggcgatgacggagctgcagaaggccgtgtctgaggcggagcggaaagcccacgacatgatcacaacagagagggccaagatggagcgcacggtcgccgaggccaaacggcaggcggcggaggacgcactggcagttatcaatcagcaggaggattcaagcgagagttgctggaattgtggccgtaaagcgagtgaaacctgcagtggctgtaacacagcccgatactgtggctcattttgccagcacaaagactgggagaagcaccatcacatctgtggacagaccctgcaggcccagcagcagggagacacacctgcagtcagctcctctgtcacgcccaacagcggggctgggagcccgatggacacaccaccagcagccactccgaggtcaaccaccccgggaaccccttccaccatagagacaacccctcgctagacgtgaactcagaactgtcggaggaaagacaacacaaccaacgcgaaaccaattcctcatcctcagatgctcaaagttgttttttttgtttgtttgtttattagatgaattatcctatttcagtacttcagcaagagagaacctaactgtatcttgaggtggtagtaaaacacagagggccagtaacgggtcgtaatgacttattgtggataacaaagatatcttttctttagagaactgaaaagagagcagagaatataacatgaaatgatagatttgacctcctccctgttattttcaagtagctgggattttaaactagatgacctcattaaccgatgctttaccaaacagcaaaccaagagattgctaattgctgttgaaagcaaaaatgctaatattaaaagtcacaatgttctttatatacaataatggaaaaaaaaaaaagaggaaaaccctcaagggcatgagcattggatacagcagtagacattttaacaagaagatgaatggcgtccgtgggttgctaactgaactttgaagacccgctacaaaacgcgcagatgtgcagcagattggaaggagacacagatgttcggtttttttcctgtttctgaaaagaaataataatatccaggtcaacagaatgaaaaatgaaagatgatttgcaatgggatgtatgaatacagcagcaagaaaaaaaaatgccataatacaaaaggctccatatatatatatatatatatatatatacacacacacacacgcacatatacacacacacacacacacacacacacacacacacacacacacacacacacacacaagtaagagactcagcctgcagttaattagcattctggcagttttgacatcagccagctgccctaaataacccttcaacgtttcttcacttttgcaaggttccacagagtaagacattgggtctattccagctcattcattttatattgaaaaaaataattttaaaaatggtggcttcagctccagcccctttccaaaatttttcaaccccaccctgtttggatttttaattaaaaactagtagttctcttggtgttaaaacacttctgtcctgtgaggtttcccaatggtgtttttcttgtaaatgtgttggacaaatgtgaagatgcattgtagtttaaccatatgcccacatttagtctctttattcctagttggtgagaaacctgtatctttctatgctgcttttatatctgtatgtattagtgatatttctctagtagttaaaaaaaaaaaaaggaaaaaaagactctttttggttgtcctcaagaaaagaaaagaagaaaagctatctttcggagctgctatttcactctcttataggatttttttttttcctgaaaaccagcatgcttcacggaatgctaacatattggtgtttttgtaagagggatgtacataaatgtattttgcactgtcacaatgactccctaggcatgctttttgtttttttttttttttttttgagcaaattctttttaaatatgctagagccatttcatcaagtttagctgtagcatagagtagtcgtggaatttttcttttttttttttttaaatcattattagggacttttttaaaaaaataaaataacaagatatcctactttaaaaaaaaaggacagtgcatgcatattgctgtaaggtcgtttaagtatttctaattttacaaaagtaaaaatcattagagctccaaatgctgaggtgtagattgacagctttaacactgctgaatgccaggttatacagtattcttacaaaaagggaagtcagccaaagactgatctgatggaccaaaatcggaattttgaaaagcaccagtactactttccaaatgatcagcaggttaaacatgttcagcaaggtatagtatgaatccattaacccttcgttgtccagggtccagaccagaactacttgttagttttgaaaacagtagcccaggatgtggttgtgtgctttaggaaagtcagcagtgctgcaggctgtgtagacaaccaaagtttacaaggctgggaagacacttctccaaatacatatacaccaggcatttctttaaaatcaaaaacaatccattagctttggggcggggggtggggggagggttaaatgtaggccttggaaacagttttaagtggcttttaagtatctgcatagaggcaatcctaaggtttgctttaagtctcttaaatctaacatttttaaaagcatttcttccctgtattttcatatacaagttggttttaattttgtttgggtggtgttattttttttaaatgactttttagtttagaaagttctgatgagcaaataaatacatctatctacatgttggaagtccatctgccagcacacctgcttaaagtgaaatgaaagcacataaccaggctctgaatgggttatattttatcatggtgctcccagaatcctttgacctcactctgctttctagtctgcttgtgacactggacagtcctttcttacagagctattatatgttctaggctacgaagggttaaataatcccaaaaatgaggtatgtcatacccacacgtctttatctctagaagctgtgatgtatgtgaaacagcactgttattcttaacactagtgtgtaaaataaggattagtacagtacgtctcattactttttaattcagggcaccctgagtgaaaacaaatacaaaaaaaaatccctaactctgagctctatctctgattcctcttcctccttcccctcttcctcctcttcctctcctcctgttttgctacattctcctcagtggcaaaaagtttcactctacctctgacagcatgtatattgcaccagtagctaacaaaaactggtctagtcaaaccaaatgggcacaaaagaaccaggataccaaaagttaagctcatacagctgcaaaccatatcacttcttggtaacaatgcagacctcataaacctaaagaagagaaagaaaagaaaacttttgttactttccttttttgcttgtcacttatatacaggctatgtgagaatataatttgtaggtataacacattaagaaaaagttatcttcattggatagaattgaatggtggtcgctgataggaatagggcgtcctctagctcttatctctgtctcttactcttttctctttctctttttctctgtcatgagactgtgtgtgacagggccacctgtcttttttttttcttaaattttttttttttttatgtgtaggtgcatgtcttggggatttaaaaatttcaaggctggtttacttatgcaaagcatgcctacgtctggaatacttagggaaagaaagcgactccatgttgtccgaattcctcaagggacagaaaaaaaattggagactgttgaaatgcagatttgaagtaatttttttaaaatattattttgggttctgcgacattgtgaaaaattaaagttgttgtgcaatacttaattcagacatgtaccacaagttaatggtagactaacactggggggtggggtctaggcatcatgcttttgtcagcatactcttgagcttttaagtctactatgtctgaactgtggtttcttgtttatccttttttccttagttggactgtaatgtatggtctgtcaacctgtgaatctttaaagtatgattcaggtattgttgtattctttactgtgtaataaaaaagttgaaaaaaatctggatcctctgtctccctcgtccccggtgtgccatggttgcccaccagtgaccccagcctgaggagtccatcctccatggtgctgaatcaaatctgtagagtttattcagctacaaagcgtggctctgtaacaggagttggcttatccatgcgtgttgagtagggaatgatgtcagaactttgcaaaagtcgagctcattcataaggggatgtttctcaggcaggaggagtaggaagagtgggaggagaattactaccttccataggaaaggagagcttggcttgcctagattagctgctgcatagatagcagaggcccttttggctgtgttttgataaaattagaaatgagtacctaaatctggatcactctgctcagagaggttcgtgccaacctcatgaggctctgactcttgtcaggttgcttggctgccttgtgcatacccgaatggcagatcagctgacatgacatggaactgctctatctgccttgtcccctctcctctaattaaaagtcgctaccattgtcactcttggttatgtagttaatatccactgtggctatctccaacttgctgggacatccagttatctcctctgacacatattttttcattctctagttacaaagtttgttagagtttgaaaaacaaacccttctcccctaccctgtgaatgctgttagtttttatgtgtagttttcaaaacacagattatcttatatactgtgttgtagcagaaattcctgtttcctctgaatgttctgactttatagaccaaaataatcgttgcaaaaaatcaaggatggcacagcaggtgcatgagcccgtgtctggagaaaggttatgaaggtgaatgctggttacatgggagggtgacttggagccctctagtttccttcttgtgccagctgggttcctgtttcaaggccaggcttctctaacttgtcttcctgggaaatgtagcttttccaagaatttggtagtgcacaccaggaaaaactaggtatcagaacagatttttttttaaatagtggaaacaccctcactcccacactttggacagttagggttggatatttaatttcatagttactctttttttccacagaagaaaggccagcctgacccaagttgcctatttttaatgtgttactgcatcttattttctcttcaaagtgaaaaaggccagaaactagcagatagaaatggaacccgttgacttagttcccttataagaagttcttgcaaacacctctgtgacgttttcattcaagtggatatgttggacaaataggaaacagttttagtttacgcgaacagtatgagacttccaggtggtggacgccatttttttagaagtgttgatgatgtatttgataacattataaaagtatgtgtctcccgtgaaagaacattgagctatttccctggaatggatggggaagaaatgagcaaaggagtgctgttctgtatgggtgtctatacccttattccaaggtgaataaataaagttgtgtttgcctaatcatg

SEQ ID NO: 5213 - DNA, 7319 bp, Homo sapiens
tgctaacattggcttcagcttccagtgcagttgtgctgctgcatataacactaccaaggtagcatctgcctaagccagaaataacaataggatataatataacctagttacaaatgaggtcctgccatctgtgctataccttcttaagtggggtttggatgataaaatcctgatttaaacgtcagtagataagtgtattttattgatagaagatgttgaatttcttctgttcacttgcttttaaaaaagataaaccccacttgaaaaactgaggtgcttaaggagtaaaataatatgttcctggtggcatcctccagatcgtactgagaagcactccacaatgccagactcacctgtggatgtgaagacgcaatctaggctgactcctccaacaatgccacctcccccaactactcaaggagctccaagaaccagttcatttacaccgacaacgttaactaatggcacgagccattctcctacagccttgaatggcgccccctcaccacccaatggcttcagcaatgggccttcctcttcttcctcctcctctctggctaatcaacagctgcccccagcctgtggtgccaggcaactcagcaagctgaaaaggttccttactaccctgcagcagtttggcaatgacatttcacccgagataggagaaagagttcgcaccctcgttctgggactagtgaactccactttgacaattgaagaatttcattccaaactgcaagaagctactaacttcccactgagaccttttgtcatcccatttttgaaggccaacttgcccctgctgcagcgtgagctcctccactgcgcaagactggccaaacagaaccctgcccagtacctcgcccagcatgaacagctgcttctggatgccagcaccacctcacctgttgactcctcagagctgcttctcgatgtgaacgaaaacgggaagaggcgaactccagacagaaccaaagaaaatggctttgacagagagcctttgcactcagaacatccaagcaagcgaccatgcactattagcccaggccagcggtacagtccaaataacggcttatcctaccagcccaatggcctgcctcaccctaccccacctccacctcagcattaccgtttggatgatatggccattgcccaccactacagggactcctatcgacaccccagccacagggacctcagggacagaaacagacctatggggttgcatggcacacgtcaagaagaaatgattgatcacagactaacagacagagaatgggcagaagagtggaaacatcttgaccatctgttaaactgcataatggacatggtagaaaaaacaaggcgatctctcaccgtactaaggcggtgtcaagaagcagaccgggaagaattgaattactggatccggcggtacagtgacgccgaggacttaaaaaaaggtggcggcagtagcagcagccactctaggcagcagagtcccgtcaacccagacccagttgcactagacgcgcatcgggaattccttcacaggcctgcgtctggatacgtgccagaggagatctggaagaaagctgaggaggccgtcaatgaggtgaagcgccaggcgatgacggagctgcagaaggccgtgtctgaggcggagcggaaagcccacgacatgatcacaacagagagggccaagatggagcgcacggtcgccgaggccaaacggcaggcggcggaggacgcactggcagttatcaatcagcaggaggattcaagcgagagttgctggaattgtggccgtaaagcgagtgaaacctgcagtggctgtaacacagcccgatactgtggctcattttgccagcacaaagactgggagaagcaccatcacatctgtggacagaccctgcaggcccagcagcagggagacacacctgcagtcagctcctctgtcacgcccaacagcggggctgggagcccgatggacacaccaccagcagccactccgaggtcaaccaccccgggaaccccttccaccatagagacaacccctcgctagacgtgaactcagaactgtcggaggaaagacaacacaaccaacgcgaaaccaattcctcatcctcagatgctcaaagttgttttttttgtttgtttgtttattagatgaattatcctatttcagtacttcagcaagagagaacctaactgtatcttgaggtggtagtaaaacacagagggccagtaacgggtcgtaatgacttattgtggataacaaagatatcttttctttagagaactgaaaagagagcagagaatataacatgaaatgatagatttgacctcctccctgttattttcaagtagctgggattttaaactagatgacctcattaaccgatgctttaccaaacagcaaaccaagagattgctaattgctgttgaaagcaaaaatgctaatattaaaagtcacaatgttctttatatacaataatggaaaaaaaaaaaagaggaaaaccctcaagggcatgagcattggatacagcagtagacattttaacaagaagatgaatggcgtccgtgggttgctaactgaactttgaagacccgctacaaaacgcgcagatgtgcagcagattggaaggagacacagatgttcggtttttttcctgtttctgaaaagaaataataatatccaggtcaacagaatgaaaaatgaaagatgatttgcaatgggatgtatgaatacagcagcaagaaaaaaaaatgccataatacaaaaggctccatatatatatatatatatatatatatacacacacacacacgcacatatacacacacacacacacacacacacacacacacacacacacacacacacacacacaagtaagagactcagcctgcagttaattagcattctggcagttttgacatcagccagctgccctaaataacccttcaacgtttcttcacttttgcaaggttccacagagtaagacattgggtctattccagctcattcattttatattgaaaaaaataattttaaaaatggtggcttcagctccagcccctttccaaaatttttcaaccccaccctgtttggatttttaattaaaaactagtagttctcttggtgttaaaacacttctgtcctgtgaggtttcccaatggtgtttttcttgtaaatgtgttggacaaatgtgaagatgcattgtagtttaaccatatgcccacatttagtctctttattcctagttggtgagaaacctgtatctttctatgctgcttttatatctgtatgtattagtgatatttctctagtagttaaaaaaaaaaaaaggaaaaaaagactctttttggttgtcctcaagaaaagaaaagaagaaaagctatctttcggagctgctatttcactctcttataggatttttttttttcctgaaaaccagcatgcttcacggaatgctaacatattggtgtttttgtaagagggatgtacataaatgtattttgcactgtcacaatgactccctaggcatgctttttgtttttttttttttttttttgagcaaattctttttaaatatgctagagccatttcatcaagtttagctgtagcatagagtagtcgtggaatttttcttttttttttttttaaatcattattagggacttttttaaaaaaataaaataacaagatatcctactttaaaaaaaaaggacagtgcatgcatattgctgtaaggtcgtttaagtatttctaattttacaaaagtaaaaatcattagagctccaaatgctgaggtgtagattgacagctttaacactgctgaatgccaggttatacagtattcttacaaaaagggaagtcagccaaagactgatctgatggaccaaaatcggaattttgaaaagcaccagtactactttccaaatgatcagcaggttaaacatgttcagcaaggtatagtatgaatccattaacccttcgttgtccagggtccagaccagaactacttgttagttttgaaaacagtagcccaggatgtggttgtgtgctttaggaaagtcagcagtgctgcaggctgtgtagacaaccaaagtttacaaggctgggaagacacttctccaaatacatatacaccaggcatttctttaaaatcaaaaacaatccattagctttggggcggggggtggggggagggttaaatgtaggccttggaaacagttttaagtggcttttaagtatctgcatagaggcaatcctaaggtttgctttaagtctcttaaatctaacatttttaaaagcatttcttccctgtattttcatatacaagttggttttaattttgtttgggtggtgttattttttttaaatgactttttagtttagaaagttctgatgagcaaataaatacatctatctacatgttggaagtccatctgccagcacacctgcttaaagtgaaatgaaagcacataaccaggctctgaatgggttatattttatcatggtgctcccagaatcctttgacctcactctgctttctagtctgcttgtgacactggacagtcctttcttacagagctattatatgttctaggctacgaagggttaaataatcccaaaaatgaggtatgtcatacccacacgtctttatctctagaagctgtgatgtatgtgaaacagcactgttattcttaacactagtgtgtaaaataaggattagtacagtacgtctcattactttttaattcagggcaccctgagtgaaaacaaatacaaaaaaaaatccctaactctgagctctatctctgattcctcttcctccttcccctcttcctcctcttcctctcctcctgttttgctacattctcctcagtggcaaaaagtttcactctacctctgacagcatgtatattgcaccagtagctaacaaaaactggtctagtcaaaccaaatgggcacaaaagaaccaggataccaaaagttaagctcatacagctgcaaaccatatcacttcttggtaacaatgcagacctcataaacctaaagaagagaaagaaaagaaaacttttgttactttccttttttgcttgtcacttatatacaggctatgtgagaatataatttgtaggtataacacattaagaaaaagttatcttcattggatagaattgaatggtggtcgctgataggaatagggcgtcctctagctcttatctctgtctcttactcttttctctttctctttttctctgtcatgagactgtgtgtgacagggccacctgtcttttttttttcttaaattttttttttttttatgtgtaggtgcatgtcttggggatttaaaaatttcaaggctggtttacttatgcaaagcatgcctacgtctggaatacttagggaaagaaagcgactccatgttgtccgaattcctcaagggacagaaaaaaaattggagactgttgaaatgcagatttgaagtaatttttttaaaatattattttgggttctgcgacattgtgaaaaattaaagttgttgtgcaatacttaattcagacatgtaccacaagttaatggtagactaacactggggggtggggtctaggcatcatgcttttgtcagcatactcttgagcttttaagtctactatgtctgaactgtggtttcttgtttatccttttttccttagttggactgtaatgtatggtctgtcaacctgtgaatctttaaagtatgattcaggtattgttgtattctttactgtgtaataaaaaagttgaaaaaaatctggatcctctgtctccctcgtccccggtgtgccatggttgcccaccagtgaccccagcctgaggagtccatcctccatggtgctgaatcaaatctgtagagtttattcagctacaaagcgtggctctgtaacaggagttggcttatccatgcgtgttgagtagggaatgatgtcagaactttgcaaaagtcgagctcattcataaggggatgtttctcaggcaggaggagtaggaagagtgggaggagaattactaccttccataggaaaggagagcttggcttgcctagattagctgctgcatagatagcagaggcccttttggctgtgttttgataaaattagaaatgagtacctaaatctggatcactctgctcagagaggttcgtgccaacctcatgaggctctgactcttgtcaggttgcttggctgccttgtgcatacccgaatggcagatcagctgacatgacatggaactgctctatctgccttgtcccctctcctctaattaaaagtcgctaccattgtcactcttggttatgtagttaatatccactgtggctatctccaacttgctgggacatccagttatctcctctgacacatattttttcattctctagttacaaagtttgttagagtttgaaaaacaaacccttctcccctaccctgtgaatgctgttagtttttatgtgtagttttcaaaacacagattatcttatatactgtgttgtagcagaaattcctgtttcctctgaatgttctgactttatagaccaaaataatcgttgcaaaaaatcaaggatggcacagcaggtgcatgagcccgtgtctggagaaaggttatgaaggtgaatgctggttacatgggagggtgacttggagccctctagtttccttcttgtgccagctgggttcctgtttcaaggccaggcttctctaacttgtcttcctgggaaatgtagcttttccaagaatttggtagtgcacaccaggaaaaactaggtatcagaacagatttttttttaaatagtggaaacaccctcactcccacactttggacagttagggttggatatttaatttcatagttactctttttttccacagaagaaaggccagcctgacccaagttgcctatttttaatgtgttactgcatcttattttctcttcaaagtgaaaaaggccagaaactagcagatagaaatggaacccgttgacttagttcccttataagaagttcttgcaaacacctctgtgacgttttcattcaagtggatatgttggacaaataggaaacagttttagtttacgcgaacagtatgagacttccaggtggtggacgccatttttttagaagtgttgatgatgtatttgataacattataaaagtatgtgtctcccgtgaaagaacattgagctatttccctggaatggatggggaagaaatgagcaaaggagtgctgttctgtatgggtgtctatacccttattccaaggtgaataaataaagttgtgtttgcctaatcatg

SEQ ID NO: 5214 - DNA, 7627 bp, Homo sapiens
ccctcctgcctgtccctttctgtcttctctctctctctcccacttttcctccctctcccgctccgtctcacacgcaccctctgtttattttcctgcctccatctgggccctgctgatattgtaatcaccctgatgcacgttggcttctctcctctccctcctgcgctcacacactcactcacacacaatgtgccatcctgacaaggcttttacttctgataagctccaatgtgtgtttaatgaatacaaagccgcggtctgggtgccgcctcggccgcggccgctctcccgcgctcctttgccagaagctggcggagagaatttacatttaaagattagcagagtgagaaagagaaatctgccttttgttgtgtggggtgaggaggaggcatctacccctggccttgacgctatctcccatcacctctgctatccagacaggactcaccgagaaaagattgatctctgggctggtgaacataatctctgtcccagtcagaaaaggagagaggaaattagcagagcgattggtggagaatgatatctgtcaaaagaaacacttggagagcactgagtttagtaataggtgactgccggaaaaaagggaactttgaatattgtcaagatcgtactgagaagcactccacaatgccagactcacctgtggatgtgaagacgcaatctaggctgactcctccaacaatgccacctcccccaactactcaaggagctccaagaaccagttcatttacaccgacaacgttaactaatggcacgagccattctcctacagccttgaatggcgccccctcaccacccaatggcttcagcaatgggccttcctcttcttcctcctcctctctggctaatcaacagctgcccccagcctgtggtgccaggcaactcagcaagctgaaaaggttccttactaccctgcagcagtttggcaatgacatttcacccgagataggagaaagagttcgcaccctcgttctgggactagtgaactccactttgacaattgaagaatttcattccaaactgcaagaagctactaacttcccactgagaccttttgtcatcccatttttgaaggccaacttgcccctgctgcagcgtgagctcctccactgcgcaagactggccaaacagaaccctgcccagtacctcgcccagcatgaacagctgcttctggatgccagcaccacctcacctgttgactcctcagagctgcttctcgatgtgaacgaaaacgggaagaggcgaactccagacagaaccaaagaaaatggctttgacagagagcctttgcactcagaacatccaagcaagcgaccatgcactattagcccaggccagcggtacagtccaaataacggcttatcctaccagcccaatggcctgcctcaccctaccccacctccacctcagcattaccgtttggatgatatggccattgcccaccactacagggactcctatcgacaccccagccacagggacctcagggacagaaacagacctatggggttgcatggcacacgtcaagaagaaatgattgatcacagactaacagacagagaatgggcagaagagtggaaacatcttgaccatctgttaaactgcataatggacatggtagaaaaaacaaggcgatctctcaccgtactaaggcggtgtcaagaagcagaccgggaagaattgaattactggatccggcggtacagtgacgccgaggacttaaaaaaaggtggcggcagtagcagcagccactctaggcagcagagtcccgtcaacccagacccagttgcactagacgcgcatcgggaattccttcacaggcctgcgtctggatacgtgccagaggagatctggaagaaagctgaggaggccgtcaatgaggtgaagcgccaggcgatgacggagctgcagaaggccgtgtctgaggcggagcggaaagcccacgacatgatcacaacagagagggccaagatggagcgcacggtcgccgaggccaaacggcaggcggcggaggacgcactggcagttatcaatcagcaggaggattcaagcgagagttgctggaattgtggccgtaaagcgagtgaaacctgcagtggctgtaacacagcccgatactgtggctcattttgccagcacaaagactgggagaagcaccatcacatctgtggacagaccctgcaggcccagcagcagggagacacacctgcagtcagctcctctgtcacgcccaacagcggggctgggagcccgatggacacaccaccagcagccactccgaggtcaaccaccccgggaaccccttccaccatagagacaacccctcgctagacgtgaactcagaactgtcggaggaaagacaacacaaccaacgcgaaaccaattcctcatcctcagatgctcaaagttgttttttttgtttgtttgtttattagatgaattatcctatttcagtacttcagcaagagagaacctaactgtatcttgaggtggtagtaaaacacagagggccagtaacgggtcgtaatgacttattgtggataacaaagatatcttttctttagagaactgaaaagagagcagagaatataacatgaaatgatagatttgacctcctccctgttattttcaagtagctgggattttaaactagatgacctcattaaccgatgctttaccaaacagcaaaccaagagattgctaattgctgttgaaagcaaaaatgctaatattaaaagtcacaatgttctttatatacaataatggaaaaaaaaaaaagaggaaaaccctcaagggcatgagcattggatacagcagtagacattttaacaagaagatgaatggcgtccgtgggttgctaactgaactttgaagacccgctacaaaacgcgcagatgtgcagcagattggaaggagacacagatgttcggtttttttcctgtttctgaaaagaaataataatatccaggtcaacagaatgaaaaatgaaagatgatttgcaatgggatgtatgaatacagcagcaagaaaaaaaaatgccataatacaaaaggctccatatatatatatatatatatatatatacacacacacacacgcacatatacacacacacacacacacacacacacacacacacacacacacacacacacacacaagtaagagactcagcctgcagttaattagcattctggcagttttgacatcagccagctgccctaaataacccttcaacgtttcttcacttttgcaaggttccacagagtaagacattgggtctattccagctcattcattttatattgaaaaaaataattttaaaaatggtggcttcagctccagcccctttccaaaatttttcaaccccaccctgtttggatttttaattaaaaactagtagttctcttggtgttaaaacacttctgtcctgtgaggtttcccaatggtgtttttcttgtaaatgtgttggacaaatgtgaagatgcattgtagtttaaccatatgcccacatttagtctctttattcctagttggtgagaaacctgtatctttctatgctgcttttatatctgtatgtattagtgatatttctctagtagttaaaaaaaaaaaaaggaaaaaaagactctttttggttgtcctcaagaaaagaaaagaagaaaagctatctttcggagctgctatttcactctcttataggatttttttttttcctgaaaaccagcatgcttcacggaatgctaacatattggtgtttttgtaagagggatgtacataaatgtattttgcactgtcacaatgactccctaggcatgctttttgtttttttttttttttttttgagcaaattctttttaaatatgctagagccatttcatcaagtttagctgtagcatagagtagtcgtggaatttttcttttttttttttttaaatcattattagggacttttttaaaaaaataaaataacaagatatcctactttaaaaaaaaaggacagtgcatgcatattgctgtaaggtcgtttaagtatttctaattttacaaaagtaaaaatcattagagctccaaatgctgaggtgtagattgacagctttaacactgctgaatgccaggttatacagtattcttacaaaaagggaagtcagccaaagactgatctgatggaccaaaatcggaattttgaaaagcaccagtactactttccaaatgatcagcaggttaaacatgttcagcaaggtatagtatgaatccattaacccttcgttgtccagggtccagaccagaactacttgttagttttgaaaacagtagcccaggatgtggttgtgtgctttaggaaagtcagcagtgctgcaggctgtgtagacaaccaaagtttacaaggctgggaagacacttctccaaatacatatacaccaggcatttctttaaaatcaaaaacaatccattagctttggggcggggggtggggggagggttaaatgtaggccttggaaacagttttaagtggcttttaagtatctgcatagaggcaatcctaaggtttgctttaagtctcttaaatctaacatttttaaaagcatttcttccctgtattttcatatacaagttggttttaattttgtttgggtggtgttattttttttaaatgactttttagtttagaaagttctgatgagcaaataaatacatctatctacatgttggaagtccatctgccagcacacctgcttaaagtgaaatgaaagcacataaccaggctctgaatgggttatattttatcatggtgctcccagaatcctttgacctcactctgctttctagtctgcttgtgacactggacagtcctttcttacagagctattatatgttctaggctacgaagggttaaataatcccaaaaatgaggtatgtcatacccacacgtctttatctctagaagctgtgatgtatgtgaaacagcactgttattcttaacactagtgtgtaaaataaggattagtacagtacgtctcattactttttaattcagggcaccctgagtgaaaacaaatacaaaaaaaaatccctaactctgagctctatctctgattcctcttcctccttcccctcttcctcctcttcctctcctcctgttttgctacattctcctcagtggcaaaaagtttcactctacctctgacagcatgtatattgcaccagtagctaacaaaaactggtctagtcaaaccaaatgggcacaaaagaaccaggataccaaaagttaagctcatacagctgcaaaccatatcacttcttggtaacaatgcagacctcataaacctaaagaagagaaagaaaagaaaacttttgttactttccttttttgcttgtcacttatatacaggctatgtgagaatataatttgtaggtataacacattaagaaaaagttatcttcattggatagaattgaatggtggtcgctgataggaatagggcgtcctctagctcttatctctgtctcttactcttttctctttctctttttctctgtcatgagactgtgtgtgacagggccacctgtcttttttttttcttaaattttttttttttttatgtgtaggtgcatgtcttggggatttaaaaatttcaaggctggtttacttatgcaaagcatgcctacgtctggaatacttagggaaagaaagcgactccatgttgtccgaattcctcaagggacagaaaaaaaattggagactgttgaaatgcagatttgaagtaatttttttaaaatattattttgggttctgcgacattgtgaaaaattaaagttgttgtgcaatacttaattcagacatgtaccacaagttaatggtagactaacactggggggtggggtctaggcatcatgcttttgtcagcatactcttgagcttttaagtctactatgtctgaactgtggtttcttgtttatccttttttccttagttggactgtaatgtatggtctgtcaacctgtgaatctttaaagtatgattcaggtattgttgtattctttactgtgtaataaaaaagttgaaaaaaatctggatcctctgtctccctcgtccccggtgtgccatggttgcccaccagtgaccccagcctgaggagtccatcctccatggtgctgaatcaaatctgtagagtttattcagctacaaagcgtggctctgtaacaggagttggcttatccatgcgtgttgagtagggaatgatgtcagaactttgcaaaagtcgagctcattcataaggggatgtttctcaggcaggaggagtaggaagagtgggaggagaattactaccttccataggaaaggagagcttggcttgcctagattagctgctgcatagatagcagaggcccttttggctgtgttttgataaaattagaaatgagtacctaaatctggatcactctgctcagagaggttcgtgccaacctcatgaggctctgactcttgtcaggttgcttggctgccttgtgcatacccgaatggcagatcagctgacatgacatggaactgctctatctgccttgtcccctctcctctaattaaaagtcgctaccattgtcactcttggttatgtagttaatatccactgtggctatctccaacttgctgggacatccagttatctcctctgacacatattttttcattctctagttacaaagtttgttagagtttgaaaaacaaacccttctcccctaccctgtgaatgctgttagtttttatgtgtagttttcaaaacacagattatcttatatactgtgttgtagcagaaattcctgtttcctctgaatgttctgactttatagaccaaaataatcgttgcaaaaaatcaaggatggcacagcaggtgcatgagcccgtgtctggagaaaggttatgaaggtgaatgctggttacatgggagggtgacttggagccctctagtttccttcttgtgccagctgggttcctgtttcaaggccaggcttctctaacttgtcttcctgggaaatgtagcttttccaagaatttggtagtgcacaccaggaaaaactaggtatcagaacagatttttttttaaatagtggaaacaccctcactcccacactttggacagttagggttggatatttaatttcatagttactctttttttccacagaagaaaggccagcctgacccaagttgcctatttttaatgtgttactgcatcttattttctcttcaaagtgaaaaaggccagaaactagcagatagaaatggaacccgttgacttagttcccttataagaagttcttgcaaacacctctgtgacgttttcattcaagtggatatgttggacaaataggaaacagttttagtttacgcgaacagtatgagacttccaggtggtggacgccatttttttagaagtgttgatgatgtatttgataacattataaaagtatgtgtctcccgtgaaagaacattgagctatttccctggaatggatggggaagaaatgagcaaaggagtgctgttctgtatgggtgtctatacccttattccaaggtgaataaataaagttgtgtttgcctaatcatg

SEQ ID NO: 5215 - DNA, 7687 bp, Homo sapiens
ccctcctgcctgtccctttctgtcttctctctctctctcccacttttcctccctctcccgctccgtctcacacgcaccctctgtttattttcctgcctccatctgggccctgctgatattgtaatcaccctgatgcacgttggcttctctcctctccctcctgcgctcacacactcactcacacacaatgtgccatcctgacaaggcttttacttctgataagctccaatgtgtgtttaatgaatacaaagccgcggtctgggtgccgcctcggccgcggccgctctcccgcgctcctttgccagaagctggcggagagaatttacatttaaagattagcagagtgagaaagagaaatctgccttttgttgtgtggggtgaggaggaggcatctacccctggccttgacgctatctcccatcacctctgctatccagacaggactcaccgagtatcaaatgataagaactgagcacactggatgaaataatacttgcactgggagcactaagaaaagattgatctctgggctggtgaacataatctctgtcccagtcagaaaaggagagaggaaattagcagagcgattggtggagaatgatatctgtcaaaagaaacacttggagagcactgagtttagtaataggtgactgccggaaaaaagggaactttgaatattgtcaagatcgtactgagaagcactccacaatgccagactcacctgtggatgtgaagacgcaatctaggctgactcctccaacaatgccacctcccccaactactcaaggagctccaagaaccagttcatttacaccgacaacgttaactaatggcacgagccattctcctacagccttgaatggcgccccctcaccacccaatggcttcagcaatgggccttcctcttcttcctcctcctctctggctaatcaacagctgcccccagcctgtggtgccaggcaactcagcaagctgaaaaggttccttactaccctgcagcagtttggcaatgacatttcacccgagataggagaaagagttcgcaccctcgttctgggactagtgaactccactttgacaattgaagaatttcattccaaactgcaagaagctactaacttcccactgagaccttttgtcatcccatttttgaaggccaacttgcccctgctgcagcgtgagctcctccactgcgcaagactggccaaacagaaccctgcccagtacctcgcccagcatgaacagctgcttctggatgccagcaccacctcacctgttgactcctcagagctgcttctcgatgtgaacgaaaacgggaagaggcgaactccagacagaaccaaagaaaatggctttgacagagagcctttgcactcagaacatccaagcaagcgaccatgcactattagcccaggccagcggtacagtccaaataacggcttatcctaccagcccaatggcctgcctcaccctaccccacctccacctcagcattaccgtttggatgatatggccattgcccaccactacagggactcctatcgacaccccagccacagggacctcagggacagaaacagacctatggggttgcatggcacacgtcaagaagaaatgattgatcacagactaacagacagagaatgggcagaagagtggaaacatcttgaccatctgttaaactgcataatggacatggtagaaaaaacaaggcgatctctcaccgtactaaggcggtgtcaagaagcagaccgggaagaattgaattactggatccggcggtacagtgacgccgaggacttaaaaaaaggtggcggcagtagcagcagccactctaggcagcagagtcccgtcaacccagacccagttgcactagacgcgcatcgggaattccttcacaggcctgcgtctggatacgtgccagaggagatctggaagaaagctgaggaggccgtcaatgaggtgaagcgccaggcgatgacggagctgcagaaggccgtgtctgaggcggagcggaaagcccacgacatgatcacaacagagagggccaagatggagcgcacggtcgccgaggccaaacggcaggcggcggaggacgcactggcagttatcaatcagcaggaggattcaagcgagagttgctggaattgtggccgtaaagcgagtgaaacctgcagtggctgtaacacagcccgatactgtggctcattttgccagcacaaagactgggagaagcaccatcacatctgtggacagaccctgcaggcccagcagcagggagacacacctgcagtcagctcctctgtcacgcccaacagcggggctgggagcccgatggacacaccaccagcagccactccgaggtcaaccaccccgggaaccccttccaccatagagacaacccctcgctagacgtgaactcagaactgtcggaggaaagacaacacaaccaacgcgaaaccaattcctcatcctcagatgctcaaagttgttttttttgtttgtttgtttattagatgaattatcctatttcagtacttcagcaagagagaacctaactgtatcttgaggtggtagtaaaacacagagggccagtaacgggtcgtaatgacttattgtggataacaaagatatcttttctttagagaactgaaaagagagcagagaatataacatgaaatgatagatttgacctcctccctgttattttcaagtagctgggattttaaactagatgacctcattaaccgatgctttaccaaacagcaaaccaagagattgctaattgctgttgaaagcaaaaatgctaatattaaaagtcacaatgttctttatatacaataatggaaaaaaaaaaaagaggaaaaccctcaagggcatgagcattggatacagcagtagacattttaacaagaagatgaatggcgtccgtgggttgctaactgaactttgaagacccgctacaaaacgcgcagatgtgcagcagattggaaggagacacagatgttcggtttttttcctgtttctgaaaagaaataataatatccaggtcaacagaatgaaaaatgaaagatgatttgcaatgggatgtatgaatacagcagcaagaaaaaaaaatgccataatacaaaaggctccatatatatatatatatatatatatatacacacacacacacgcacatatacacacacacacacacacacacacacacacacacacacacacacacacacacacaagtaagagactcagcctgcagttaattagcattctggcagttttgacatcagccagctgccctaaataacccttcaacgtttcttcacttttgcaaggttccacagagtaagacattgggtctattccagctcattcattttatattgaaaaaaataattttaaaaatggtggcttcagctccagcccctttccaaaatttttcaaccccaccctgtttggatttttaattaaaaactagtagttctcttggtgttaaaacacttctgtcctgtgaggtttcccaatggtgtttttcttgtaaatgtgttggacaaatgtgaagatgcattgtagtttaaccatatgcccacatttagtctctttattcctagttggtgagaaacctgtatctttctatgctgcttttatatctgtatgtattagtgatatttctctagtagttaaaaaaaaaaaaaggaaaaaaagactctttttggttgtcctcaagaaaagaaaagaagaaaagctatctttcggagctgctatttcactctcttataggatttttttttttcctgaaaaccagcatgcttcacggaatgctaacatattggtgtttttgtaagagggatgtacataaatgtattttgcactgtcacaatgactccctaggcatgctttttgtttttttttttttttttttgagcaaattctttttaaatatgctagagccatttcatcaagtttagctgtagcatagagtagtcgtggaatttttcttttttttttttttaaatcattattagggacttttttaaaaaaataaaataacaagatatcctactttaaaaaaaaaggacagtgcatgcatattgctgtaaggtcgtttaagtatttctaattttacaaaagtaaaaatcattagagctccaaatgctgaggtgtagattgacagctttaacactgctgaatgccaggttatacagtattcttacaaaaagggaagtcagccaaagactgatctgatggaccaaaatcggaattttgaaaagcaccagtactactttccaaatgatcagcaggttaaacatgttcagcaaggtatagtatgaatccattaacccttcgttgtccagggtccagaccagaactacttgttagttttgaaaacagtagcccaggatgtggttgtgtgctttaggaaagtcagcagtgctgcaggctgtgtagacaaccaaagtttacaaggctgggaagacacttctccaaatacatatacaccaggcatttctttaaaatcaaaaacaatccattagctttggggcggggggtggggggagggttaaatgtaggccttggaaacagttttaagtggcttttaagtatctgcatagaggcaatcctaaggtttgctttaagtctcttaaatctaacatttttaaaagcatttcttccctgtattttcatatacaagttggttttaattttgtttgggtggtgttattttttttaaatgactttttagtttagaaagttctgatgagcaaataaatacatctatctacatgttggaagtccatctgccagcacacctgcttaaagtgaaatgaaagcacataaccaggctctgaatgggttatattttatcatggtgctcccagaatcctttgacctcactctgctttctagtctgcttgtgacactggacagtcctttcttacagagctattatatgttctaggctacgaagggttaaataatcccaaaaatgaggtatgtcatacccacacgtctttatctctagaagctgtgatgtatgtgaaacagcactgttattcttaacactagtgtgtaaaataaggattagtacagtacgtctcattactttttaattcagggcaccctgagtgaaaacaaatacaaaaaaaaatccctaactctgagctctatctctgattcctcttcctccttcccctcttcctcctcttcctctcctcctgttttgctacattctcctcagtggcaaaaagtttcactctacctctgacagcatgtatattgcaccagtagctaacaaaaactggtctagtcaaaccaaatgggcacaaaagaaccaggataccaaaagttaagctcatacagctgcaaaccatatcacttcttggtaacaatgcagacctcataaacctaaagaagagaaagaaaagaaaacttttgttactttccttttttgcttgtcacttatatacaggctatgtgagaatataatttgtaggtataacacattaagaaaaagttatcttcattggatagaattgaatggtggtcgctgataggaatagggcgtcctctagctcttatctctgtctcttactcttttctctttctctttttctctgtcatgagactgtgtgtgacagggccacctgtcttttttttttcttaaattttttttttttttatgtgtaggtgcatgtcttggggatttaaaaatttcaaggctggtttacttatgcaaagcatgcctacgtctggaatacttagggaaagaaagcgactccatgttgtccgaattcctcaagggacagaaaaaaaattggagactgttgaaatgcagatttgaagtaatttttttaaaatattattttgggttctgcgacattgtgaaaaattaaagttgttgtgcaatacttaattcagacatgtaccacaagttaatggtagactaacactggggggtggggtctaggcatcatgcttttgtcagcatactcttgagcttttaagtctactatgtctgaactgtggtttcttgtttatccttttttccttagttggactgtaatgtatggtctgtcaacctgtgaatctttaaagtatgattcaggtattgttgtattctttactgtgtaataaaaaagttgaaaaaaatctggatcctctgtctccctcgtccccggtgtgccatggttgcccaccagtgaccccagcctgaggagtccatcctccatggtgctgaatcaaatctgtagagtttattcagctacaaagcgtggctctgtaacaggagttggcttatccatgcgtgttgagtagggaatgatgtcagaactttgcaaaagtcgagctcattcataaggggatgtttctcaggcaggaggagtaggaagagtgggaggagaattactaccttccataggaaaggagagcttggcttgcctagattagctgctgcatagatagcagaggcccttttggctgtgttttgataaaattagaaatgagtacctaaatctggatcactctgctcagagaggttcgtgccaacctcatgaggctctgactcttgtcaggttgcttggctgccttgtgcatacccgaatggcagatcagctgacatgacatggaactgctctatctgccttgtcccctctcctctaattaaaagtcgctaccattgtcactcttggttatgtagttaatatccactgtggctatctccaacttgctgggacatccagttatctcctctgacacatattttttcattctctagttacaaagtttgttagagtttgaaaaacaaacccttctcccctaccctgtgaatgctgttagtttttatgtgtagttttcaaaacacagattatcttatatactgtgttgtagcagaaattcctgtttcctctgaatgttctgactttatagaccaaaataatcgttgcaaaaaatcaaggatggcacagcaggtgcatgagcccgtgtctggagaaaggttatgaaggtgaatgctggttacatgggagggtgacttggagccctctagtttccttcttgtgccagctgggttcctgtttcaaggccaggcttctctaacttgtcttcctgggaaatgtagcttttccaagaatttggtagtgcacaccaggaaaaactaggtatcagaacagatttttttttaaatagtggaaacaccctcactcccacactttggacagttagggttggatatttaatttcatagttactctttttttccacagaagaaaggccagcctgacccaagttgcctatttttaatgtgttactgcatcttattttctcttcaaagtgaaaaaggccagaaactagcagatagaaatggaacccgttgacttagttcccttataagaagttcttgcaaacacctctgtgacgttttcattcaagtggatatgttggacaaataggaaacagttttagtttacgcgaacagtatgagacttccaggtggtggacgccatttttttagaagtgttgatgatgtatttgataacattataaaagtatgtgtctcccgtgaaagaacattgagctatttccctggaatggatggggaagaaatgagcaaaggagtgctgttctgtatgggtgtctatacccttattccaaggtgaataaataaagttgtgtttgcctaatcatg

SEQ ID NO: 5216 - DNA, 7284 bp, Homo sapiens
tatgcaggcaacatagcccttcatagcaaagcagtctgaaaaattggcacctgcaggatttgcatgtgaaaaaaacggagtcagttgcattttgccggagtctattactaaaagattgatctctgggctggtgaacataatctctgtcccagtcagaaaaggagagaggaaattagcagagcgattggtggagaatgatatctgtcaaaagaaacacttggagagcactgagtttagtaataggtgactgccggaaaaaagggaactttgaatattgtcaagatcgtactgagaagcactccacaatgccagactcacctgtggatgtgaagacgcaatctaggctgactcctccaacaatgccacctcccccaactactcaaggagctccaagaaccagttcatttacaccgacaacgttaactaatggcacgagccattctcctacagccttgaatggcgccccctcaccacccaatggcttcagcaatgggccttcctcttcttcctcctcctctctggctaatcaacagctgcccccagcctgtggtgccaggcaactcagcaagctgaaaaggttccttactaccctgcagcagtttggcaatgacatttcacccgagataggagaaagagttcgcaccctcgttctgggactagtgaactccactttgacaattgaagaatttcattccaaactgcaagaagctactaacttcccactgagaccttttgtcatcccatttttgaaggccaacttgcccctgctgcagcgtgagctcctccactgcgcaagactggccaaacagaaccctgcccagtacctcgcccagcatgaacagctgcttctggatgccagcaccacctcacctgttgactcctcagagctgcttctcgatgtgaacgaaaacgggaagaggcgaactccagacagaaccaaagaaaatggctttgacagagagcctttgcactcagaacatccaagcaagcgaccatgcactattagcccaggccagcggtacagtccaaataacggcttatcctaccagcccaatggcctgcctcaccctaccccacctccacctcagcattaccgtttggatgatatggccattgcccaccactacagggactcctatcgacaccccagccacagggacctcagggacagaaacagacctatggggttgcatggcacacgtcaagaagaaatgattgatcacagactaacagacagagaatgggcagaagagtggaaacatcttgaccatctgttaaactgcataatggacatggtagaaaaaacaaggcgatctctcaccgtactaaggcggtgtcaagaagcagaccgggaagaattgaattactggatccggcggtacagtgacgccgaggacttaaaaaaaggtggcggcagtagcagcagccactctaggcagcagagtcccgtcaacccagacccagttgcactagacgcgcatcgggaattccttcacaggcctgcgtctggatacgtgccagaggagatctggaagaaagctgaggaggccgtcaatgaggtgaagcgccaggcgatgacggagctgcagaaggccgtgtctgaggcggagcggaaagcccacgacatgatcacaacagagagggccaagatggagcgcacggtcgccgaggccaaacggcaggcggcggaggacgcactggcagttatcaatcagcaggaggattcaagcgagagttgctggaattgtggccgtaaagcgagtgaaacctgcagtggctgtaacacagcccgatactgtggctcattttgccagcacaaagactgggagaagcaccatcacatctgtggacagaccctgcaggcccagcagcagggagacacacctgcagtcagctcctctgtcacgcccaacagcggggctgggagcccgatggacacaccaccagcagccactccgaggtcaaccaccccgggaaccccttccaccatagagacaacccctcgctagacgtgaactcagaactgtcggaggaaagacaacacaaccaacgcgaaaccaattcctcatcctcagatgctcaaagttgttttttttgtttgtttgtttattagatgaattatcctatttcagtacttcagcaagagagaacctaactgtatcttgaggtggtagtaaaacacagagggccagtaacgggtcgtaatgacttattgtggataacaaagatatcttttctttagagaactgaaaagagagcagagaatataacatgaaatgatagatttgacctcctccctgttattttcaagtagctgggattttaaactagatgacctcattaaccgatgctttaccaaacagcaaaccaagagattgctaattgctgttgaaagcaaaaatgctaatattaaaagtcacaatgttctttatatacaataatggaaaaaaaaaaaagaggaaaaccctcaagggcatgagcattggatacagcagtagacattttaacaagaagatgaatggcgtccgtgggttgctaactgaactttgaagacccgctacaaaacgcgcagatgtgcagcagattggaaggagacacagatgttcggtttttttcctgtttctgaaaagaaataataatatccaggtcaacagaatgaaaaatgaaagatgatttgcaatgggatgtatgaatacagcagcaagaaaaaaaaatgccataatacaaaaggctccatatatatatatatatatatatatatacacacacacacacgcacatatacacacacacacacacacacacacacacacacacacacacacacacacacacacaagtaagagactcagcctgcagttaattagcattctggcagttttgacatcagccagctgccctaaataacccttcaacgtttcttcacttttgcaaggttccacagagtaagacattgggtctattccagctcattcattttatattgaaaaaaataattttaaaaatggtggcttcagctccagcccctttccaaaatttttcaaccccaccctgtttggatttttaattaaaaactagtagttctcttggtgttaaaacacttctgtcctgtgaggtttcccaatggtgtttttcttgtaaatgtgttggacaaatgtgaagatgcattgtagtttaaccatatgcccacatttagtctctttattcctagttggtgagaaacctgtatctttctatgctgcttttatatctgtatgtattagtgatatttctctagtagttaaaaaaaaaaaaaggaaaaaaagactctttttggttgtcctcaagaaaagaaaagaagaaaagctatctttcggagctgctatttcactctcttataggatttttttttttcctgaaaaccagcatgcttcacggaatgctaacatattggtgtttttgtaagagggatgtacataaatgtattttgcactgtcacaatgactccctaggcatgctttttgtttttttttttttttttttgagcaaattctttttaaatatgctagagccatttcatcaagtttagctgtagcatagagtagtcgtggaatttttcttttttttttttttaaatcattattagggacttttttaaaaaaataaaataacaagatatcctactttaaaaaaaaaggacagtgcatgcatattgctgtaaggtcgtttaagtatttctaattttacaaaagtaaaaatcattagagctccaaatgctgaggtgtagattgacagctttaacactgctgaatgccaggttatacagtattcttacaaaaagggaagtcagccaaagactgatctgatggaccaaaatcggaattttgaaaagcaccagtactactttccaaatgatcagcaggttaaacatgttcagcaaggtatagtatgaatccattaacccttcgttgtccagggtccagaccagaactacttgttagttttgaaaacagtagcccaggatgtggttgtgtgctttaggaaagtcagcagtgctgcaggctgtgtagacaaccaaagtttacaaggctgggaagacacttctccaaatacatatacaccaggcatttctttaaaatcaaaaacaatccattagctttggggcggggggtggggggagggttaaatgtaggccttggaaacagttttaagtggcttttaagtatctgcatagaggcaatcctaaggtttgctttaagtctcttaaatctaacatttttaaaagcatttcttccctgtattttcatatacaagttggttttaattttgtttgggtggtgttattttttttaaatgactttttagtttagaaagttctgatgagcaaataaatacatctatctacatgttggaagtccatctgccagcacacctgcttaaagtgaaatgaaagcacataaccaggctctgaatgggttatattttatcatggtgctcccagaatcctttgacctcactctgctttctagtctgcttgtgacactggacagtcctttcttacagagctattatatgttctaggctacgaagggttaaataatcccaaaaatgaggtatgtcatacccacacgtctttatctctagaagctgtgatgtatgtgaaacagcactgttattcttaacactagtgtgtaaaataaggattagtacagtacgtctcattactttttaattcagggcaccctgagtgaaaacaaatacaaaaaaaaatccctaactctgagctctatctctgattcctcttcctccttcccctcttcctcctcttcctctcctcctgttttgctacattctcctcagtggcaaaaagtttcactctacctctgacagcatgtatattgcaccagtagctaacaaaaactggtctagtcaaaccaaatgggcacaaaagaaccaggataccaaaagttaagctcatacagctgcaaaccatatcacttcttggtaacaatgcagacctcataaacctaaagaagagaaagaaaagaaaacttttgttactttccttttttgcttgtcacttatatacaggctatgtgagaatataatttgtaggtataacacattaagaaaaagttatcttcattggatagaattgaatggtggtcgctgataggaatagggcgtcctctagctcttatctctgtctcttactcttttctctttctctttttctctgtcatgagactgtgtgtgacagggccacctgtcttttttttttcttaaattttttttttttttatgtgtaggtgcatgtcttggggatttaaaaatttcaaggctggtttacttatgcaaagcatgcctacgtctggaatacttagggaaagaaagcgactccatgttgtccgaattcctcaagggacagaaaaaaaattggagactgttgaaatgcagatttgaagtaatttttttaaaatattattttgggttctgcgacattgtgaaaaattaaagttgttgtgcaatacttaattcagacatgtaccacaagttaatggtagactaacactggggggtggggtctaggcatcatgcttttgtcagcatactcttgagcttttaagtctactatgtctgaactgtggtttcttgtttatccttttttccttagttggactgtaatgtatggtctgtcaacctgtgaatctttaaagtatgattcaggtattgttgtattctttactgtgtaataaaaaagttgaaaaaaatctggatcctctgtctccctcgtccccggtgtgccatggttgcccaccagtgaccccagcctgaggagtccatcctccatggtgctgaatcaaatctgtagagtttattcagctacaaagcgtggctctgtaacaggagttggcttatccatgcgtgttgagtagggaatgatgtcagaactttgcaaaagtcgagctcattcataaggggatgtttctcaggcaggaggagtaggaagagtgggaggagaattactaccttccataggaaaggagagcttggcttgcctagattagctgctgcatagatagcagaggcccttttggctgtgttttgataaaattagaaatgagtacctaaatctggatcactctgctcagagaggttcgtgccaacctcatgaggctctgactcttgtcaggttgcttggctgccttgtgcatacccgaatggcagatcagctgacatgacatggaactgctctatctgccttgtcccctctcctctaattaaaagtcgctaccattgtcactcttggttatgtagttaatatccactgtggctatctccaacttgctgggacatccagttatctcctctgacacatattttttcattctctagttacaaagtttgttagagtttgaaaaacaaacccttctcccctaccctgtgaatgctgttagtttttatgtgtagttttcaaaacacagattatcttatatactgtgttgtagcagaaattcctgtttcctctgaatgttctgactttatagaccaaaataatcgttgcaaaaaatcaaggatggcacagcaggtgcatgagcccgtgtctggagaaaggttatgaaggtgaatgctggttacatgggagggtgacttggagccctctagtttccttcttgtgccagctgggttcctgtttcaaggccaggcttctctaacttgtcttcctgggaaatgtagcttttccaagaatttggtagtgcacaccaggaaaaactaggtatcagaacagatttttttttaaatagtggaaacaccctcactcccacactttggacagttagggttggatatttaatttcatagttactctttttttccacagaagaaaggccagcctgacccaagttgcctatttttaatgtgttactgcatcttattttctcttcaaagtgaaaaaggccagaaactagcagatagaaatggaacccgttgacttagttcccttataagaagttcttgcaaacacctctgtgacgttttcattcaagtggatatgttggacaaataggaaacagttttagtttacgcgaacagtatgagacttccaggtggtggacgccatttttttagaagtgttgatgatgtatttgataacattataaaagtatgtgtctcccgtgaaagaacattgagctatttccctggaatggatggggaagaaatgagcaaaggagtgctgttctgtatgggtgtctatacccttattccaaggtgaataaataaagttgtgtttgcctaatcatg

SEQ ID NO: 5217 - DNA, 7410 bp, Homo sapiens
tctctctccctctctccctttccaaatgattcagaagtcgataagaccaggagaagtgaagatgtaacatgttatctgtcgctcctcttagctggcggagagaatttacatttaaagattagcagagtgagaaagagaaatctgccttttgttgtgtggggtgaggaggaggcatctacccctggccttgacgctatctcccatcacctctgctatccagacaggactcaccgagaaaagattgatctctgggctggtgaacataatctctgtcccagtcagaaaaggagagaggaaattagcagagcgattggtggagaatgatatctgtcaaaagaaacacttggagagcactgagtttagtaataggtgactgccggaaaaaagggaactttgaatattgtcaagatcgtactgagaagcactccacaatgccagactcacctgtggatgtgaagacgcaatctaggctgactcctccaacaatgccacctcccccaactactcaaggagctccaagaaccagttcatttacaccgacaacgttaactaatggcacgagccattctcctacagccttgaatggcgccccctcaccacccaatggcttcagcaatgggccttcctcttcttcctcctcctctctggctaatcaacagctgcccccagcctgtggtgccaggcaactcagcaagctgaaaaggttccttactaccctgcagcagtttggcaatgacatttcacccgagataggagaaagagttcgcaccctcgttctgggactagtgaactccactttgacaattgaagaatttcattccaaactgcaagaagctactaacttcccactgagaccttttgtcatcccatttttgaaggccaacttgcccctgctgcagcgtgagctcctccactgcgcaagactggccaaacagaaccctgcccagtacctcgcccagcatgaacagctgcttctggatgccagcaccacctcacctgttgactcctcagagctgcttctcgatgtgaacgaaaacgggaagaggcgaactccagacagaaccaaagaaaatggctttgacagagagcctttgcactcagaacatccaagcaagcgaccatgcactattagcccaggccagcggtacagtccaaataacggcttatcctaccagcccaatggcctgcctcaccctaccccacctccacctcagcattaccgtttggatgatatggccattgcccaccactacagggactcctatcgacaccccagccacagggacctcagggacagaaacagacctatggggttgcatggcacacgtcaagaagaaatgattgatcacagactaacagacagagaatgggcagaagagtggaaacatcttgaccatctgttaaactgcataatggacatggtagaaaaaacaaggcgatctctcaccgtactaaggcggtgtcaagaagcagaccgggaagaattgaattactggatccggcggtacagtgacgccgaggacttaaaaaaaggtggcggcagtagcagcagccactctaggcagcagagtcccgtcaacccagacccagttgcactagacgcgcatcgggaattccttcacaggcctgcgtctggatacgtgccagaggagatctggaagaaagctgaggaggccgtcaatgaggtgaagcgccaggcgatgacggagctgcagaaggccgtgtctgaggcggagcggaaagcccacgacatgatcacaacagagagggccaagatggagcgcacggtcgccgaggccaaacggcaggcggcggaggacgcactggcagttatcaatcagcaggaggattcaagcgagagttgctggaattgtggccgtaaagcgagtgaaacctgcagtggctgtaacacagcccgatactgtggctcattttgccagcacaaagactgggagaagcaccatcacatctgtggacagaccctgcaggcccagcagcagggagacacacctgcagtcagctcctctgtcacgcccaacagcggggctgggagcccgatggacacaccaccagcagccactccgaggtcaaccaccccgggaaccccttccaccatagagacaacccctcgctagacgtgaactcagaactgtcggaggaaagacaacacaaccaacgcgaaaccaattcctcatcctcagatgctcaaagttgttttttttgtttgtttgtttattagatgaattatcctatttcagtacttcagcaagagagaacctaactgtatcttgaggtggtagtaaaacacagagggccagtaacgggtcgtaatgacttattgtggataacaaagatatcttttctttagagaactgaaaagagagcagagaatataacatgaaatgatagatttgacctcctccctgttattttcaagtagctgggattttaaactagatgacctcattaaccgatgctttaccaaacagcaaaccaagagattgctaattgctgttgaaagcaaaaatgctaatattaaaagtcacaatgttctttatatacaataatggaaaaaaaaaaaagaggaaaaccctcaagggcatgagcattggatacagcagtagacattttaacaagaagatgaatggcgtccgtgggttgctaactgaactttgaagacccgctacaaaacgcgcagatgtgcagcagattggaaggagacacagatgttcggtttttttcctgtttctgaaaagaaataataatatccaggtcaacagaatgaaaaatgaaagatgatttgcaatgggatgtatgaatacagcagcaagaaaaaaaaatgccataatacaaaaggctccatatatatatatatatatatatatatacacacacacacacgcacatatacacacacacacacacacacacacacacacacacacacacacacacacacacacaagtaagagactcagcctgcagttaattagcattctggcagttttgacatcagccagctgccctaaataacccttcaacgtttcttcacttttgcaaggttccacagagtaagacattgggtctattccagctcattcattttatattgaaaaaaataattttaaaaatggtggcttcagctccagcccctttccaaaatttttcaaccccaccctgtttggatttttaattaaaaactagtagttctcttggtgttaaaacacttctgtcctgtgaggtttcccaatggtgtttttcttgtaaatgtgttggacaaatgtgaagatgcattgtagtttaaccatatgcccacatttagtctctttattcctagttggtgagaaacctgtatctttctatgctgcttttatatctgtatgtattagtgatatttctctagtagttaaaaaaaaaaaaaggaaaaaaagactctttttggttgtcctcaagaaaagaaaagaagaaaagctatctttcggagctgctatttcactctcttataggatttttttttttcctgaaaaccagcatgcttcacggaatgctaacatattggtgtttttgtaagagggatgtacataaatgtattttgcactgtcacaatgactccctaggcatgctttttgtttttttttttttttttttgagcaaattctttttaaatatgctagagccatttcatcaagtttagctgtagcatagagtagtcgtggaatttttcttttttttttttttaaatcattattagggacttttttaaaaaaataaaataacaagatatcctactttaaaaaaaaaggacagtgcatgcatattgctgtaaggtcgtttaagtatttctaattttacaaaagtaaaaatcattagagctccaaatgctgaggtgtagattgacagctttaacactgctgaatgccaggttatacagtattcttacaaaaagggaagtcagccaaagactgatctgatggaccaaaatcggaattttgaaaagcaccagtactactttccaaatgatcagcaggttaaacatgttcagcaaggtatagtatgaatccattaacccttcgttgtccagggtccagaccagaactacttgttagttttgaaaacagtagcccaggatgtggttgtgtgctttaggaaagtcagcagtgctgcaggctgtgtagacaaccaaagtttacaaggctgggaagacacttctccaaatacatatacaccaggcatttctttaaaatcaaaaacaatccattagctttggggcggggggtggggggagggttaaatgtaggccttggaaacagttttaagtggcttttaagtatctgcatagaggcaatcctaaggtttgctttaagtctcttaaatctaacatttttaaaagcatttcttccctgtattttcatatacaagttggttttaattttgtttgggtggtgttattttttttaaatgactttttagtttagaaagttctgatgagcaaataaatacatctatctacatgttggaagtccatctgccagcacacctgcttaaagtgaaatgaaagcacataaccaggctctgaatgggttatattttatcatggtgctcccagaatcctttgacctcactctgctttctagtctgcttgtgacactggacagtcctttcttacagagctattatatgttctaggctacgaagggttaaataatcccaaaaatgaggtatgtcatacccacacgtctttatctctagaagctgtgatgtatgtgaaacagcactgttattcttaacactagtgtgtaaaataaggattagtacagtacgtctcattactttttaattcagggcaccctgagtgaaaacaaatacaaaaaaaaatccctaactctgagctctatctctgattcctcttcctccttcccctcttcctcctcttcctctcctcctgttttgctacattctcctcagtggcaaaaagtttcactctacctctgacagcatgtatattgcaccagtagctaacaaaaactggtctagtcaaaccaaatgggcacaaaagaaccaggataccaaaagttaagctcatacagctgcaaaccatatcacttcttggtaacaatgcagacctcataaacctaaagaagagaaagaaaagaaaacttttgttactttccttttttgcttgtcacttatatacaggctatgtgagaatataatttgtaggtataacacattaagaaaaagttatcttcattggatagaattgaatggtggtcgctgataggaatagggcgtcctctagctcttatctctgtctcttactcttttctctttctctttttctctgtcatgagactgtgtgtgacagggccacctgtcttttttttttcttaaattttttttttttttatgtgtaggtgcatgtcttggggatttaaaaatttcaaggctggtttacttatgcaaagcatgcctacgtctggaatacttagggaaagaaagcgactccatgttgtccgaattcctcaagggacagaaaaaaaattggagactgttgaaatgcagatttgaagtaatttttttaaaatattattttgggttctgcgacattgtgaaaaattaaagttgttgtgcaatacttaattcagacatgtaccacaagttaatggtagactaacactggggggtggggtctaggcatcatgcttttgtcagcatactcttgagcttttaagtctactatgtctgaactgtggtttcttgtttatccttttttccttagttggactgtaatgtatggtctgtcaacctgtgaatctttaaagtatgattcaggtattgttgtattctttactgtgtaataaaaaagttgaaaaaaatctggatcctctgtctccctcgtccccggtgtgccatggttgcccaccagtgaccccagcctgaggagtccatcctccatggtgctgaatcaaatctgtagagtttattcagctacaaagcgtggctctgtaacaggagttggcttatccatgcgtgttgagtagggaatgatgtcagaactttgcaaaagtcgagctcattcataaggggatgtttctcaggcaggaggagtaggaagagtgggaggagaattactaccttccataggaaaggagagcttggcttgcctagattagctgctgcatagatagcagaggcccttttggctgtgttttgataaaattagaaatgagtacctaaatctggatcactctgctcagagaggttcgtgccaacctcatgaggctctgactcttgtcaggttgcttggctgccttgtgcatacccgaatggcagatcagctgacatgacatggaactgctctatctgccttgtcccctctcctctaattaaaagtcgctaccattgtcactcttggttatgtagttaatatccactgtggctatctccaacttgctgggacatccagttatctcctctgacacatattttttcattctctagttacaaagtttgttagagtttgaaaaacaaacccttctcccctaccctgtgaatgctgttagtttttatgtgtagttttcaaaacacagattatcttatatactgtgttgtagcagaaattcctgtttcctctgaatgttctgactttatagaccaaaataatcgttgcaaaaaatcaaggatggcacagcaggtgcatgagcccgtgtctggagaaaggttatgaaggtgaatgctggttacatgggagggtgacttggagccctctagtttccttcttgtgccagctgggttcctgtttcaaggccaggcttctctaacttgtcttcctgggaaatgtagcttttccaagaatttggtagtgcacaccaggaaaaactaggtatcagaacagatttttttttaaatagtggaaacaccctcactcccacactttggacagttagggttggatatttaatttcatagttactctttttttccacagaagaaaggccagcctgacccaagttgcctatttttaatgtgttactgcatcttattttctcttcaaagtgaaaaaggccagaaactagcagatagaaatggaacccgttgacttagttcccttataagaagttcttgcaaacacctctgtgacgttttcattcaagtggatatgttggacaaataggaaacagttttagtttacgcgaacagtatgagacttccaggtggtggacgccatttttttagaagtgttgatgatgtatttgataacattataaaagtatgtgtctcccgtgaaagaacattgagctatttccctggaatggatggggaagaaatgagcaaaggagtgctgttctgtatgggtgtctatacccttattccaaggtgaataaataaagttgtgtttgcctaatcatg

SEQ ID NO: 5218 - DNA, 7470 bp, Homo sapiens
tctctctccctctctccctttccaaatgattcagaagtcgataagaccaggagaagtgaagatgtaacatgttatctgtcgctcctcttagctggcggagagaatttacatttaaagattagcagagtgagaaagagaaatctgccttttgttgtgtggggtgaggaggaggcatctacccctggccttgacgctatctcccatcacctctgctatccagacaggactcaccgagtatcaaatgataagaactgagcacactggatgaaataatacttgcactgggagcactaagaaaagattgatctctgggctggtgaacataatctctgtcccagtcagaaaaggagagaggaaattagcagagcgattggtggagaatgatatctgtcaaaagaaacacttggagagcactgagtttagtaataggtgactgccggaaaaaagggaactttgaatattgtcaagatcgtactgagaagcactccacaatgccagactcacctgtggatgtgaagacgcaatctaggctgactcctccaacaatgccacctcccccaactactcaaggagctccaagaaccagttcatttacaccgacaacgttaactaatggcacgagccattctcctacagccttgaatggcgccccctcaccacccaatggcttcagcaatgggccttcctcttcttcctcctcctctctggctaatcaacagctgcccccagcctgtggtgccaggcaactcagcaagctgaaaaggttccttactaccctgcagcagtttggcaatgacatttcacccgagataggagaaagagttcgcaccctcgttctgggactagtgaactccactttgacaattgaagaatttcattccaaactgcaagaagctactaacttcccactgagaccttttgtcatcccatttttgaaggccaacttgcccctgctgcagcgtgagctcctccactgcgcaagactggccaaacagaaccctgcccagtacctcgcccagcatgaacagctgcttctggatgccagcaccacctcacctgttgactcctcagagctgcttctcgatgtgaacgaaaacgggaagaggcgaactccagacagaaccaaagaaaatggctttgacagagagcctttgcactcagaacatccaagcaagcgaccatgcactattagcccaggccagcggtacagtccaaataacggcttatcctaccagcccaatggcctgcctcaccctaccccacctccacctcagcattaccgtttggatgatatggccattgcccaccactacagggactcctatcgacaccccagccacagggacctcagggacagaaacagacctatggggttgcatggcacacgtcaagaagaaatgattgatcacagactaacagacagagaatgggcagaagagtggaaacatcttgaccatctgttaaactgcataatggacatggtagaaaaaacaaggcgatctctcaccgtactaaggcggtgtcaagaagcagaccgggaagaattgaattactggatccggcggtacagtgacgccgaggacttaaaaaaaggtggcggcagtagcagcagccactctaggcagcagagtcccgtcaacccagacccagttgcactagacgcgcatcgggaattccttcacaggcctgcgtctggatacgtgccagaggagatctggaagaaagctgaggaggccgtcaatgaggtgaagcgccaggcgatgacggagctgcagaaggccgtgtctgaggcggagcggaaagcccacgacatgatcacaacagagagggccaagatggagcgcacggtcgccgaggccaaacggcaggcggcggaggacgcactggcagttatcaatcagcaggaggattcaagcgagagttgctggaattgtggccgtaaagcgagtgaaacctgcagtggctgtaacacagcccgatactgtggctcattttgccagcacaaagactgggagaagcaccatcacatctgtggacagaccctgcaggcccagcagcagggagacacacctgcagtcagctcctctgtcacgcccaacagcggggctgggagcccgatggacacaccaccagcagccactccgaggtcaaccaccccgggaaccccttccaccatagagacaacccctcgctagacgtgaactcagaactgtcggaggaaagacaacacaaccaacgcgaaaccaattcctcatcctcagatgctcaaagttgttttttttgtttgtttgtttattagatgaattatcctatttcagtacttcagcaagagagaacctaactgtatcttgaggtggtagtaaaacacagagggccagtaacgggtcgtaatgacttattgtggataacaaagatatcttttctttagagaactgaaaagagagcagagaatataacatgaaatgatagatttgacctcctccctgttattttcaagtagctgggattttaaactagatgacctcattaaccgatgctttaccaaacagcaaaccaagagattgctaattgctgttgaaagcaaaaatgctaatattaaaagtcacaatgttctttatatacaataatggaaaaaaaaaaaagaggaaaaccctcaagggcatgagcattggatacagcagtagacattttaacaagaagatgaatggcgtccgtgggttgctaactgaactttgaagacccgctacaaaacgcgcagatgtgcagcagattggaaggagacacagatgttcggtttttttcctgtttctgaaaagaaataataatatccaggtcaacagaatgaaaaatgaaagatgatttgcaatgggatgtatgaatacagcagcaagaaaaaaaaatgccataatacaaaaggctccatatatatatatatatatatatatatacacacacacacacgcacatatacacacacacacacacacacacacacacacacacacacacacacacacacacacaagtaagagactcagcctgcagttaattagcattctggcagttttgacatcagccagctgccctaaataacccttcaacgtttcttcacttttgcaaggttccacagagtaagacattgggtctattccagctcattcattttatattgaaaaaaataattttaaaaatggtggcttcagctccagcccctttccaaaatttttcaaccccaccctgtttggatttttaattaaaaactagtagttctcttggtgttaaaacacttctgtcctgtgaggtttcccaatggtgtttttcttgtaaatgtgttggacaaatgtgaagatgcattgtagtttaaccatatgcccacatttagtctctttattcctagttggtgagaaacctgtatctttctatgctgcttttatatctgtatgtattagtgatatttctctagtagttaaaaaaaaaaaaaggaaaaaaagactctttttggttgtcctcaagaaaagaaaagaagaaaagctatctttcggagctgctatttcactctcttataggatttttttttttcctgaaaaccagcatgcttcacggaatgctaacatattggtgtttttgtaagagggatgtacataaatgtattttgcactgtcacaatgactccctaggcatgctttttgtttttttttttttttttttgagcaaattctttttaaatatgctagagccatttcatcaagtttagctgtagcatagagtagtcgtggaatttttcttttttttttttttaaatcattattagggacttttttaaaaaaataaaataacaagatatcctactttaaaaaaaaaggacagtgcatgcatattgctgtaaggtcgtttaagtatttctaattttacaaaagtaaaaatcattagagctccaaatgctgaggtgtagattgacagctttaacactgctgaatgccaggttatacagtattcttacaaaaagggaagtcagccaaagactgatctgatggaccaaaatcggaattttgaaaagcaccagtactactttccaaatgatcagcaggttaaacatgttcagcaaggtatagtatgaatccattaacccttcgttgtccagggtccagaccagaactacttgttagttttgaaaacagtagcccaggatgtggttgtgtgctttaggaaagtcagcagtgctgcaggctgtgtagacaaccaaagtttacaaggctgggaagacacttctccaaatacatatacaccaggcatttctttaaaatcaaaaacaatccattagctttggggcggggggtggggggagggttaaatgtaggccttggaaacagttttaagtggcttttaagtatctgcatagaggcaatcctaaggtttgctttaagtctcttaaatctaacatttttaaaagcatttcttccctgtattttcatatacaagttggttttaattttgtttgggtggtgttattttttttaaatgactttttagtttagaaagttctgatgagcaaataaatacatctatctacatgttggaagtccatctgccagcacacctgcttaaagtgaaatgaaagcacataaccaggctctgaatgggttatattttatcatggtgctcccagaatcctttgacctcactctgctttctagtctgcttgtgacactggacagtcctttcttacagagctattatatgttctaggctacgaagggttaaataatcccaaaaatgaggtatgtcatacccacacgtctttatctctagaagctgtgatgtatgtgaaacagcactgttattcttaacactagtgtgtaaaataaggattagtacagtacgtctcattactttttaattcagggcaccctgagtgaaaacaaatacaaaaaaaaatccctaactctgagctctatctctgattcctcttcctccttcccctcttcctcctcttcctctcctcctgttttgctacattctcctcagtggcaaaaagtttcactctacctctgacagcatgtatattgcaccagtagctaacaaaaactggtctagtcaaaccaaatgggcacaaaagaaccaggataccaaaagttaagctcatacagctgcaaaccatatcacttcttggtaacaatgcagacctcataaacctaaagaagagaaagaaaagaaaacttttgttactttccttttttgcttgtcacttatatacaggctatgtgagaatataatttgtaggtataacacattaagaaaaagttatcttcattggatagaattgaatggtggtcgctgataggaatagggcgtcctctagctcttatctctgtctcttactcttttctctttctctttttctctgtcatgagactgtgtgtgacagggccacctgtcttttttttttcttaaattttttttttttttatgtgtaggtgcatgtcttggggatttaaaaatttcaaggctggtttacttatgcaaagcatgcctacgtctggaatacttagggaaagaaagcgactccatgttgtccgaattcctcaagggacagaaaaaaaattggagactgttgaaatgcagatttgaagtaatttttttaaaatattattttgggttctgcgacattgtgaaaaattaaagttgttgtgcaatacttaattcagacatgtaccacaagttaatggtagactaacactggggggtggggtctaggcatcatgcttttgtcagcatactcttgagcttttaagtctactatgtctgaactgtggtttcttgtttatccttttttccttagttggactgtaatgtatggtctgtcaacctgtgaatctttaaagtatgattcaggtattgttgtattctttactgtgtaataaaaaagttgaaaaaaatctggatcctctgtctccctcgtccccggtgtgccatggttgcccaccagtgaccccagcctgaggagtccatcctccatggtgctgaatcaaatctgtagagtttattcagctacaaagcgtggctctgtaacaggagttggcttatccatgcgtgttgagtagggaatgatgtcagaactttgcaaaagtcgagctcattcataaggggatgtttctcaggcaggaggagtaggaagagtgggaggagaattactaccttccataggaaaggagagcttggcttgcctagattagctgctgcatagatagcagaggcccttttggctgtgttttgataaaattagaaatgagtacctaaatctggatcactctgctcagagaggttcgtgccaacctcatgaggctctgactcttgtcaggttgcttggctgccttgtgcatacccgaatggcagatcagctgacatgacatggaactgctctatctgccttgtcccctctcctctaattaaaagtcgctaccattgtcactcttggttatgtagttaatatccactgtggctatctccaacttgctgggacatccagttatctcctctgacacatattttttcattctctagttacaaagtttgttagagtttgaaaaacaaacccttctcccctaccctgtgaatgctgttagtttttatgtgtagttttcaaaacacagattatcttatatactgtgttgtagcagaaattcctgtttcctctgaatgttctgactttatagaccaaaataatcgttgcaaaaaatcaaggatggcacagcaggtgcatgagcccgtgtctggagaaaggttatgaaggtgaatgctggttacatgggagggtgacttggagccctctagtttccttcttgtgccagctgggttcctgtttcaaggccaggcttctctaacttgtcttcctgggaaatgtagcttttccaagaatttggtagtgcacaccaggaaaaactaggtatcagaacagatttttttttaaatagtggaaacaccctcactcccacactttggacagttagggttggatatttaatttcatagttactctttttttccacagaagaaaggccagcctgacccaagttgcctatttttaatgtgttactgcatcttattttctcttcaaagtgaaaaaggccagaaactagcagatagaaatggaacccgttgacttagttcccttataagaagttcttgcaaacacctctgtgacgttttcattcaagtggatatgttggacaaataggaaacagttttagtttacgcgaacagtatgagacttccaggtggtggacgccatttttttagaagtgttgatgatgtatttgataacattataaaagtatgtgtctcccgtgaaagaacattgagctatttccctggaatggatggggaagaaatgagcaaaggagtgctgttctgtatgggtgtctatacccttattccaaggtgaataaataaagttgtgtttgcctaatcatg

SEQ ID NO: 5219 - DNA, 7483 bp, Homo sapiens
ccctcctgcctgtccctttctgtcttctctctctctctcccacttttcctccctctcccgctccgtctcacacgcaccctctgtttattttcctgcctccatctgggccctgctgatattgtaatcaccctgatgcacgttggcttctctcctctccctcctgcgctcacacactcactcacacacaatgtgccatcctgacaaggcttttacttctgataagctccaatgtgtgtttaatgaatacaaagccgcggtctgggtgccgcctcggccgcggccgctctcccgcgctcctttgccagaagaaaagattgatctctgggctggtgaacataatctctgtcccagtcagaaaaggagagaggaaattagcagagcgattggtggagaatgatatctgtcaaaagaaacacttggagagcactgagtttagtaataggtgactgccggaaaaaagggaactttgaatattgtcaagatcgtactgagaagcactccacaatgccagactcacctgtggatgtgaagacgcaatctaggctgactcctccaacaatgccacctcccccaactactcaaggagctccaagaaccagttcatttacaccgacaacgttaactaatggcacgagccattctcctacagccttgaatggcgccccctcaccacccaatggcttcagcaatgggccttcctcttcttcctcctcctctctggctaatcaacagctgcccccagcctgtggtgccaggcaactcagcaagctgaaaaggttccttactaccctgcagcagtttggcaatgacatttcacccgagataggagaaagagttcgcaccctcgttctgggactagtgaactccactttgacaattgaagaatttcattccaaactgcaagaagctactaacttcccactgagaccttttgtcatcccatttttgaaggccaacttgcccctgctgcagcgtgagctcctccactgcgcaagactggccaaacagaaccctgcccagtacctcgcccagcatgaacagctgcttctggatgccagcaccacctcacctgttgactcctcagagctgcttctcgatgtgaacgaaaacgggaagaggcgaactccagacagaaccaaagaaaatggctttgacagagagcctttgcactcagaacatccaagcaagcgaccatgcactattagcccaggccagcggtacagtccaaataacggcttatcctaccagcccaatggcctgcctcaccctaccccacctccacctcagcattaccgtttggatgatatggccattgcccaccactacagggactcctatcgacaccccagccacagggacctcagggacagaaacagacctatggggttgcatggcacacgtcaagaagaaatgattgatcacagactaacagacagagaatgggcagaagagtggaaacatcttgaccatctgttaaactgcataatggacatggtagaaaaaacaaggcgatctctcaccgtactaaggcggtgtcaagaagcagaccgggaagaattgaattactggatccggcggtacagtgacgccgaggacttaaaaaaaggtggcggcagtagcagcagccactctaggcagcagagtcccgtcaacccagacccagttgcactagacgcgcatcgggaattccttcacaggcctgcgtctggatacgtgccagaggagatctggaagaaagctgaggaggccgtcaatgaggtgaagcgccaggcgatgacggagctgcagaaggccgtgtctgaggcggagcggaaagcccacgacatgatcacaacagagagggccaagatggagcgcacggtcgccgaggccaaacggcaggcggcggaggacgcactggcagttatcaatcagcaggaggattcaagcgagagttgctggaattgtggccgtaaagcgagtgaaacctgcagtggctgtaacacagcccgatactgtggctcattttgccagcacaaagactgggagaagcaccatcacatctgtggacagaccctgcaggcccagcagcagggagacacacctgcagtcagctcctctgtcacgcccaacagcggggctgggagcccgatggacacaccaccagcagccactccgaggtcaaccaccccgggaaccccttccaccatagagacaacccctcgctagacgtgaactcagaactgtcggaggaaagacaacacaaccaacgcgaaaccaattcctcatcctcagatgctcaaagttgttttttttgtttgtttgtttattagatgaattatcctatttcagtacttcagcaagagagaacctaactgtatcttgaggtggtagtaaaacacagagggccagtaacgggtcgtaatgacttattgtggataacaaagatatcttttctttagagaactgaaaagagagcagagaatataacatgaaatgatagatttgacctcctccctgttattttcaagtagctgggattttaaactagatgacctcattaaccgatgctttaccaaacagcaaaccaagagattgctaattgctgttgaaagcaaaaatgctaatattaaaagtcacaatgttctttatatacaataatggaaaaaaaaaaaagaggaaaaccctcaagggcatgagcattggatacagcagtagacattttaacaagaagatgaatggcgtccgtgggttgctaactgaactttgaagacccgctacaaaacgcgcagatgtgcagcagattggaaggagacacagatgttcggtttttttcctgtttctgaaaagaaataataatatccaggtcaacagaatgaaaaatgaaagatgatttgcaatgggatgtatgaatacagcagcaagaaaaaaaaatgccataatacaaaaggctccatatatatatatatatatatatatatacacacacacacacgcacatatacacacacacacacacacacacacacacacacacacacacacacacacacacacaagtaagagactcagcctgcagttaattagcattctggcagttttgacatcagccagctgccctaaataacccttcaacgtttcttcacttttgcaaggttccacagagtaagacattgggtctattccagctcattcattttatattgaaaaaaataattttaaaaatggtggcttcagctccagcccctttccaaaatttttcaaccccaccctgtttggatttttaattaaaaactagtagttctcttggtgttaaaacacttctgtcctgtgaggtttcccaatggtgtttttcttgtaaatgtgttggacaaatgtgaagatgcattgtagtttaaccatatgcccacatttagtctctttattcctagttggtgagaaacctgtatctttctatgctgcttttatatctgtatgtattagtgatatttctctagtagttaaaaaaaaaaaaaggaaaaaaagactctttttggttgtcctcaagaaaagaaaagaagaaaagctatctttcggagctgctatttcactctcttataggatttttttttttcctgaaaaccagcatgcttcacggaatgctaacatattggtgtttttgtaagagggatgtacataaatgtattttgcactgtcacaatgactccctaggcatgctttttgtttttttttttttttttttgagcaaattctttttaaatatgctagagccatttcatcaagtttagctgtagcatagagtagtcgtggaatttttcttttttttttttttaaatcattattagggacttttttaaaaaaataaaataacaagatatcctactttaaaaaaaaaggacagtgcatgcatattgctgtaaggtcgtttaagtatttctaattttacaaaagtaaaaatcattagagctccaaatgctgaggtgtagattgacagctttaacactgctgaatgccaggttatacagtattcttacaaaaagggaagtcagccaaagactgatctgatggaccaaaatcggaattttgaaaagcaccagtactactttccaaatgatcagcaggttaaacatgttcagcaaggtatagtatgaatccattaacccttcgttgtccagggtccagaccagaactacttgttagttttgaaaacagtagcccaggatgtggttgtgtgctttaggaaagtcagcagtgctgcaggctgtgtagacaaccaaagtttacaaggctgggaagacacttctccaaatacatatacaccaggcatttctttaaaatcaaaaacaatccattagctttggggcggggggtggggggagggttaaatgtaggccttggaaacagttttaagtggcttttaagtatctgcatagaggcaatcctaaggtttgctttaagtctcttaaatctaacatttttaaaagcatttcttccctgtattttcatatacaagttggttttaattttgtttgggtggtgttattttttttaaatgactttttagtttagaaagttctgatgagcaaataaatacatctatctacatgttggaagtccatctgccagcacacctgcttaaagtgaaatgaaagcacataaccaggctctgaatgggttatattttatcatggtgctcccagaatcctttgacctcactctgctttctagtctgcttgtgacactggacagtcctttcttacagagctattatatgttctaggctacgaagggttaaataatcccaaaaatgaggtatgtcatacccacacgtctttatctctagaagctgtgatgtatgtgaaacagcactgttattcttaacactagtgtgtaaaataaggattagtacagtacgtctcattactttttaattcagggcaccctgagtgaaaacaaatacaaaaaaaaatccctaactctgagctctatctctgattcctcttcctccttcccctcttcctcctcttcctctcctcctgttttgctacattctcctcagtggcaaaaagtttcactctacctctgacagcatgtatattgcaccagtagctaacaaaaactggtctagtcaaaccaaatgggcacaaaagaaccaggataccaaaagttaagctcatacagctgcaaaccatatcacttcttggtaacaatgcagacctcataaacctaaagaagagaaagaaaagaaaacttttgttactttccttttttgcttgtcacttatatacaggctatgtgagaatataatttgtaggtataacacattaagaaaaagttatcttcattggatagaattgaatggtggtcgctgataggaatagggcgtcctctagctcttatctctgtctcttactcttttctctttctctttttctctgtcatgagactgtgtgtgacagggccacctgtcttttttttttcttaaattttttttttttttatgtgtaggtgcatgtcttggggatttaaaaatttcaaggctggtttacttatgcaaagcatgcctacgtctggaatacttagggaaagaaagcgactccatgttgtccgaattcctcaagggacagaaaaaaaattggagactgttgaaatgcagatttgaagtaatttttttaaaatattattttgggttctgcgacattgtgaaaaattaaagttgttgtgcaatacttaattcagacatgtaccacaagttaatggtagactaacactggggggtggggtctaggcatcatgcttttgtcagcatactcttgagcttttaagtctactatgtctgaactgtggtttcttgtttatccttttttccttagttggactgtaatgtatggtctgtcaacctgtgaatctttaaagtatgattcaggtattgttgtattctttactgtgtaataaaaaagttgaaaaaaatctggatcctctgtctccctcgtccccggtgtgccatggttgcccaccagtgaccccagcctgaggagtccatcctccatggtgctgaatcaaatctgtagagtttattcagctacaaagcgtggctctgtaacaggagttggcttatccatgcgtgttgagtagggaatgatgtcagaactttgcaaaagtcgagctcattcataaggggatgtttctcaggcaggaggagtaggaagagtgggaggagaattactaccttccataggaaaggagagcttggcttgcctagattagctgctgcatagatagcagaggcccttttggctgtgttttgataaaattagaaatgagtacctaaatctggatcactctgctcagagaggttcgtgccaacctcatgaggctctgactcttgtcaggttgcttggctgccttgtgcatacccgaatggcagatcagctgacatgacatggaactgctctatctgccttgtcccctctcctctaattaaaagtcgctaccattgtcactcttggttatgtagttaatatccactgtggctatctccaacttgctgggacatccagttatctcctctgacacatattttttcattctctagttacaaagtttgttagagtttgaaaaacaaacccttctcccctaccctgtgaatgctgttagtttttatgtgtagttttcaaaacacagattatcttatatactgtgttgtagcagaaattcctgtttcctctgaatgttctgactttatagaccaaaataatcgttgcaaaaaatcaaggatggcacagcaggtgcatgagcccgtgtctggagaaaggttatgaaggtgaatgctggttacatgggagggtgacttggagccctctagtttccttcttgtgccagctgggttcctgtttcaaggccaggcttctctaacttgtcttcctgggaaatgtagcttttccaagaatttggtagtgcacaccaggaaaaactaggtatcagaacagatttttttttaaatagtggaaacaccctcactcccacactttggacagttagggttggatatttaatttcatagttactctttttttccacagaagaaaggccagcctgacccaagttgcctatttttaatgtgttactgcatcttattttctcttcaaagtgaaaaaggccagaaactagcagatagaaatggaacccgttgacttagttcccttataagaagttcttgcaaacacctctgtgacgttttcattcaagtggatatgttggacaaataggaaacagttttagtttacgcgaacagtatgagacttccaggtggtggacgccatttttttagaagtgttgatgatgtatttgataacattataaaagtatgtgtctcccgtgaaagaacattgagctatttccctggaatggatggggaagaaatgagcaaaggagtgctgttctgtatgggtgtctatacccttattccaaggtgaataaataaagttgtgtttgcctaatcatg

SEQ ID NO: 5220 - DNA, 7401 bp, Homo sapiens
tctctctccctctctccctttccaaatgattcagaagtcgataagaccaggagaagtgaagatgtaacatgttatctgtcgctcctcttagctggcggagagaatttacatttaaagattagcagagtgagaaagagaaatctgccttttgttgtgtggggtgaggaggaggcatctacccctggccttgacgctatctcccatcacctctgctatccagacaggactcaccgaggcgcacgcgcccagcaccctgcctccggcgatgccgccccagcccctctgatggccctcctctctgctgccactcattccagaacaggaggcatgagcccggaacgcgcttgcttttaggagacagccactttctgtgtggtacgctggattcaaggatgcctgatcgtactgagaagcactccacaatgccagactcacctgtggatgtgaagacgcaatctaggctgactcctccaacaatgccacctcccccaactactcaaggagctccaagaaccagttcatttacaccgacaacgttaactaatggcacgagccattctcctacagccttgaatggcgccccctcaccacccaatggcttcagcaatgggccttcctcttcttcctcctcctctctggctaatcaacagctgcccccagcctgtggtgccaggcaactcagcaagctgaaaaggttccttactaccctgcagcagtttggcaatgacatttcacccgagataggagaaagagttcgcaccctcgttctgggactagtgaactccactttgacaattgaagaatttcattccaaactgcaagaagctactaacttcccactgagaccttttgtcatcccatttttgaaggccaacttgcccctgctgcagcgtgagctcctccactgcgcaagactggccaaacagaaccctgcccagtacctcgcccagcatgaacagctgcttctggatgccagcaccacctcacctgttgactcctcagagctgcttctcgatgtgaacgaaaacgggaagaggcgaactccagacagaaccaaagaaaatggctttgacagagagcctttgcactcagaacatccaagcaagcgaccatgcactattagcccaggccagcggtacagtccaaataacggcttatcctaccagcccaatggcctgcctcaccctaccccacctccacctcagcattaccgtttggatgatatggccattgcccaccactacagggactcctatcgacaccccagccacagggacctcagggacagaaacagacctatggggttgcatggcacacgtcaagaagaaatgattgatcacagactaacagacagagaatgggcagaagagtggaaacatcttgaccatctgttaaactgcataatggacatggtagaaaaaacaaggcgatctctcaccgtactaaggcggtgtcaagaagcagaccgggaagaattgaattactggatccggcggtacagtgacgccgaggacttaaaaaaaggtggcggcagtagcagcagccactctaggcagcagagtcccgtcaacccagacccagttgcactagacgcgcatcgggaattccttcacaggcctgcgtctggatacgtgccagaggagatctggaagaaagctgaggaggccgtcaatgaggtgaagcgccaggcgatgacggagctgcagaaggccgtgtctgaggcggagcggaaagcccacgacatgatcacaacagagagggccaagatggagcgcacggtcgccgaggccaaacggcaggcggcggaggacgcactggcagttatcaatcagcaggaggattcaagcgagagttgctggaattgtggccgtaaagcgagtgaaacctgcagtggctgtaacacagcccgatactgtggctcattttgccagcacaaagactgggagaagcaccatcacatctgtggacagaccctgcaggcccagcagcagggagacacacctgcagtcagctcctctgtcacgcccaacagcggggctgggagcccgatggacacaccaccagcagccactccgaggtcaaccaccccgggaaccccttccaccatagagacaacccctcgctagacgtgaactcagaactgtcggaggaaagacaacacaaccaacgcgaaaccaattcctcatcctcagatgctcaaagttgttttttttgtttgtttgtttattagatgaattatcctatttcagtacttcagcaagagagaacctaactgtatcttgaggtggtagtaaaacacagagggccagtaacgggtcgtaatgacttattgtggataacaaagatatcttttctttagagaactgaaaagagagcagagaatataacatgaaatgatagatttgacctcctccctgttattttcaagtagctgggattttaaactagatgacctcattaaccgatgctttaccaaacagcaaaccaagagattgctaattgctgttgaaagcaaaaatgctaatattaaaagtcacaatgttctttatatacaataatggaaaaaaaaaaaagaggaaaaccctcaagggcatgagcattggatacagcagtagacattttaacaagaagatgaatggcgtccgtgggttgctaactgaactttgaagacccgctacaaaacgcgcagatgtgcagcagattggaaggagacacagatgttcggtttttttcctgtttctgaaaagaaataataatatccaggtcaacagaatgaaaaatgaaagatgatttgcaatgggatgtatgaatacagcagcaagaaaaaaaaatgccataatacaaaaggctccatatatatatatatatatatatatatacacacacacacacgcacatatacacacacacacacacacacacacacacacacacacacacacacacacacacacaagtaagagactcagcctgcagttaattagcattctggcagttttgacatcagccagctgccctaaataacccttcaacgtttcttcacttttgcaaggttccacagagtaagacattgggtctattccagctcattcattttatattgaaaaaaataattttaaaaatggtggcttcagctccagcccctttccaaaatttttcaaccccaccctgtttggatttttaattaaaaactagtagttctcttggtgttaaaacacttctgtcctgtgaggtttcccaatggtgtttttcttgtaaatgtgttggacaaatgtgaagatgcattgtagtttaaccatatgcccacatttagtctctttattcctagttggtgagaaacctgtatctttctatgctgcttttatatctgtatgtattagtgatatttctctagtagttaaaaaaaaaaaaaggaaaaaaagactctttttggttgtcctcaagaaaagaaaagaagaaaagctatctttcggagctgctatttcactctcttataggatttttttttttcctgaaaaccagcatgcttcacggaatgctaacatattggtgtttttgtaagagggatgtacataaatgtattttgcactgtcacaatgactccctaggcatgctttttgtttttttttttttttttttgagcaaattctttttaaatatgctagagccatttcatcaagtttagctgtagcatagagtagtcgtggaatttttcttttttttttttttaaatcattattagggacttttttaaaaaaataaaataacaagatatcctactttaaaaaaaaaggacagtgcatgcatattgctgtaaggtcgtttaagtatttctaattttacaaaagtaaaaatcattagagctccaaatgctgaggtgtagattgacagctttaacactgctgaatgccaggttatacagtattcttacaaaaagggaagtcagccaaagactgatctgatggaccaaaatcggaattttgaaaagcaccagtactactttccaaatgatcagcaggttaaacatgttcagcaaggtatagtatgaatccattaacccttcgttgtccagggtccagaccagaactacttgttagttttgaaaacagtagcccaggatgtggttgtgtgctttaggaaagtcagcagtgctgcaggctgtgtagacaaccaaagtttacaaggctgggaagacacttctccaaatacatatacaccaggcatttctttaaaatcaaaaacaatccattagctttggggcggggggtggggggagggttaaatgtaggccttggaaacagttttaagtggcttttaagtatctgcatagaggcaatcctaaggtttgctttaagtctcttaaatctaacatttttaaaagcatttcttccctgtattttcatatacaagttggttttaattttgtttgggtggtgttattttttttaaatgactttttagtttagaaagttctgatgagcaaataaatacatctatctacatgttggaagtccatctgccagcacacctgcttaaagtgaaatgaaagcacataaccaggctctgaatgggttatattttatcatggtgctcccagaatcctttgacctcactctgctttctagtctgcttgtgacactggacagtcctttcttacagagctattatatgttctaggctacgaagggttaaataatcccaaaaatgaggtatgtcatacccacacgtctttatctctagaagctgtgatgtatgtgaaacagcactgttattcttaacactagtgtgtaaaataaggattagtacagtacgtctcattactttttaattcagggcaccctgagtgaaaacaaatacaaaaaaaaatccctaactctgagctctatctctgattcctcttcctccttcccctcttcctcctcttcctctcctcctgttttgctacattctcctcagtggcaaaaagtttcactctacctctgacagcatgtatattgcaccagtagctaacaaaaactggtctagtcaaaccaaatgggcacaaaagaaccaggataccaaaagttaagctcatacagctgcaaaccatatcacttcttggtaacaatgcagacctcataaacctaaagaagagaaagaaaagaaaacttttgttactttccttttttgcttgtcacttatatacaggctatgtgagaatataatttgtaggtataacacattaagaaaaagttatcttcattggatagaattgaatggtggtcgctgataggaatagggcgtcctctagctcttatctctgtctcttactcttttctctttctctttttctctgtcatgagactgtgtgtgacagggccacctgtcttttttttttcttaaattttttttttttttatgtgtaggtgcatgtcttggggatttaaaaatttcaaggctggtttacttatgcaaagcatgcctacgtctggaatacttagggaaagaaagcgactccatgttgtccgaattcctcaagggacagaaaaaaaattggagactgttgaaatgcagatttgaagtaatttttttaaaatattattttgggttctgcgacattgtgaaaaattaaagttgttgtgcaatacttaattcagacatgtaccacaagttaatggtagactaacactggggggtggggtctaggcatcatgcttttgtcagcatactcttgagcttttaagtctactatgtctgaactgtggtttcttgtttatccttttttccttagttggactgtaatgtatggtctgtcaacctgtgaatctttaaagtatgattcaggtattgttgtattctttactgtgtaataaaaaagttgaaaaaaatctggatcctctgtctccctcgtccccggtgtgccatggttgcccaccagtgaccccagcctgaggagtccatcctccatggtgctgaatcaaatctgtagagtttattcagctacaaagcgtggctctgtaacaggagttggcttatccatgcgtgttgagtagggaatgatgtcagaactttgcaaaagtcgagctcattcataaggggatgtttctcaggcaggaggagtaggaagagtgggaggagaattactaccttccataggaaaggagagcttggcttgcctagattagctgctgcatagatagcagaggcccttttggctgtgttttgataaaattagaaatgagtacctaaatctggatcactctgctcagagaggttcgtgccaacctcatgaggctctgactcttgtcaggttgcttggctgccttgtgcatacccgaatggcagatcagctgacatgacatggaactgctctatctgccttgtcccctctcctctaattaaaagtcgctaccattgtcactcttggttatgtagttaatatccactgtggctatctccaacttgctgggacatccagttatctcctctgacacatattttttcattctctagttacaaagtttgttagagtttgaaaaacaaacccttctcccctaccctgtgaatgctgttagtttttatgtgtagttttcaaaacacagattatcttatatactgtgttgtagcagaaattcctgtttcctctgaatgttctgactttatagaccaaaataatcgttgcaaaaaatcaaggatggcacagcaggtgcatgagcccgtgtctggagaaaggttatgaaggtgaatgctggttacatgggagggtgacttggagccctctagtttccttcttgtgccagctgggttcctgtttcaaggccaggcttctctaacttgtcttcctgggaaatgtagcttttccaagaatttggtagtgcacaccaggaaaaactaggtatcagaacagatttttttttaaatagtggaaacaccctcactcccacactttggacagttagggttggatatttaatttcatagttactctttttttccacagaagaaaggccagcctgacccaagttgcctatttttaatgtgttactgcatcttattttctcttcaaagtgaaaaaggccagaaactagcagatagaaatggaacccgttgacttagttcccttataagaagttcttgcaaacacctctgtgacgttttcattcaagtggatatgttggacaaataggaaacagttttagtttacgcgaacagtatgagacttccaggtggtggacgccatttttttagaagtgttgatgatgtatttgataacattataaaagtatgtgtctcccgtgaaagaacattgagctatttccctggaatggatggggaagaaatgagcaaaggagtgctgttctgtatgggtgtctatacccttattccaaggtgaataaataaagttgtgtttgcctaatcatg

SEQ ID NO: 5221 - DNA, 7372 bp, Homo sapiens
atcacatttgtctgccacagcagcaacaacagaaaagcggagggagggagggaggcgggaggaggggagcagagctccgcaagtcttgggctctgcgtggaggttgcgtttggctggcgtccccgaccccgggctttttgcacggcagctctctctgcgcagcgccgggcggccgtagtcgctccgcggcgcgactccgcggtctcgtggcgagcgcgcgtgggcgagtggccgcggacactctggcctcgcgagggaagccgcgccgcgtcctcgccccgtcgccccgcgggccggccgagacgacgggaagttttatttgcagctcggagcctgtggcggatggtgggactctccggccctgtgcagtatcgtactgagaagcactccacaatgccagactcacctgtggatgtgaagacgcaatctaggctgactcctccaacaatgccacctcccccaactactcaaggagctccaagaaccagttcatttacaccgacaacgttaactaatggcacgagccattctcctacagccttgaatggcgccccctcaccacccaatggcttcagcaatgggccttcctcttcttcctcctcctctctggctaatcaacagctgcccccagcctgtggtgccaggcaactcagcaagctgaaaaggttccttactaccctgcagcagtttggcaatgacatttcacccgagataggagaaagagttcgcaccctcgttctgggactagtgaactccactttgacaattgaagaatttcattccaaactgcaagaagctactaacttcccactgagaccttttgtcatcccatttttgaaggccaacttgcccctgctgcagcgtgagctcctccactgcgcaagactggccaaacagaaccctgcccagtacctcgcccagcatgaacagctgcttctggatgccagcaccacctcacctgttgactcctcagagctgcttctcgatgtgaacgaaaacgggaagaggcgaactccagacagaaccaaagaaaatggctttgacagagagcctttgcactcagaacatccaagcaagcgaccatgcactattagcccaggccagcggtacagtccaaataacggcttatcctaccagcccaatggcctgcctcaccctaccccacctccacctcagcattaccgtttggatgatatggccattgcccaccactacagggactcctatcgacaccccagccacagggacctcagggacagaaacagacctatggggttgcatggcacacgtcaagaagaaatgattgatcacagactaacagacagagaatgggcagaagagtggaaacatcttgaccatctgttaaactgcataatggacatggtagaaaaaacaaggcgatctctcaccgtactaaggcggtgtcaagaagcagaccgggaagaattgaattactggatccggcggtacagtgacgccgaggacttaaaaaaaggtggcggcagtagcagcagccactctaggcagcagagtcccgtcaacccagacccagttgcactagacgcgcatcgggaattccttcacaggcctgcgtctggatacgtgccagaggagatctggaagaaagctgaggaggccgtcaatgaggtgaagcgccaggcgatgacggagctgcagaaggccgtgtctgaggcggagcggaaagcccacgacatgatcacaacagagagggccaagatggagcgcacggtcgccgaggccaaacggcaggcggcggaggacgcactggcagttatcaatcagcaggaggattcaagcgagagttgctggaattgtggccgtaaagcgagtgaaacctgcagtggctgtaacacagcccgatactgtggctcattttgccagcacaaagactgggagaagcaccatcacatctgtggacagaccctgcaggcccagcagcagggagacacacctgcagtcagctcctctgtcacgcccaacagcggggctgggagcccgatggacacaccaccagcagccactccgaggtcaaccaccccgggaaccccttccaccatagagacaacccctcgctagacgtgaactcagaactgtcggaggaaagacaacacaaccaacgcgaaaccaattcctcatcctcagatgctcaaagttgttttttttgtttgtttgtttattagatgaattatcctatttcagtacttcagcaagagagaacctaactgtatcttgaggtggtagtaaaacacagagggccagtaacgggtcgtaatgacttattgtggataacaaagatatcttttctttagagaactgaaaagagagcagagaatataacatgaaatgatagatttgacctcctccctgttattttcaagtagctgggattttaaactagatgacctcattaaccgatgctttaccaaacagcaaaccaagagattgctaattgctgttgaaagcaaaaatgctaatattaaaagtcacaatgttctttatatacaataatggaaaaaaaaaaaagaggaaaaccctcaagggcatgagcattggatacagcagtagacattttaacaagaagatgaatggcgtccgtgggttgctaactgaactttgaagacccgctacaaaacgcgcagatgtgcagcagattggaaggagacacagatgttcggtttttttcctgtttctgaaaagaaataataatatccaggtcaacagaatgaaaaatgaaagatgatttgcaatgggatgtatgaatacagcagcaagaaaaaaaaatgccataatacaaaaggctccatatatatatatatatatatatatatacacacacacacacgcacatatacacacacacacacacacacacacacacacacacacacacacacacacacacacaagtaagagactcagcctgcagttaattagcattctggcagttttgacatcagccagctgccctaaataacccttcaacgtttcttcacttttgcaaggttccacagagtaagacattgggtctattccagctcattcattttatattgaaaaaaataattttaaaaatggtggcttcagctccagcccctttccaaaatttttcaaccccaccctgtttggatttttaattaaaaactagtagttctcttggtgttaaaacacttctgtcctgtgaggtttcccaatggtgtttttcttgtaaatgtgttggacaaatgtgaagatgcattgtagtttaaccatatgcccacatttagtctctttattcctagttggtgagaaacctgtatctttctatgctgcttttatatctgtatgtattagtgatatttctctagtagttaaaaaaaaaaaaaggaaaaaaagactctttttggttgtcctcaagaaaagaaaagaagaaaagctatctttcggagctgctatttcactctcttataggatttttttttttcctgaaaaccagcatgcttcacggaatgctaacatattggtgtttttgtaagagggatgtacataaatgtattttgcactgtcacaatgactccctaggcatgctttttgtttttttttttttttttttgagcaaattctttttaaatatgctagagccatttcatcaagtttagctgtagcatagagtagtcgtggaatttttcttttttttttttttaaatcattattagggacttttttaaaaaaataaaataacaagatatcctactttaaaaaaaaaggacagtgcatgcatattgctgtaaggtcgtttaagtatttctaattttacaaaagtaaaaatcattagagctccaaatgctgaggtgtagattgacagctttaacactgctgaatgccaggttatacagtattcttacaaaaagggaagtcagccaaagactgatctgatggaccaaaatcggaattttgaaaagcaccagtactactttccaaatgatcagcaggttaaacatgttcagcaaggtatagtatgaatccattaacccttcgttgtccagggtccagaccagaactacttgttagttttgaaaacagtagcccaggatgtggttgtgtgctttaggaaagtcagcagtgctgcaggctgtgtagacaaccaaagtttacaaggctgggaagacacttctccaaatacatatacaccaggcatttctttaaaatcaaaaacaatccattagctttggggcggggggtggggggagggttaaatgtaggccttggaaacagttttaagtggcttttaagtatctgcatagaggcaatcctaaggtttgctttaagtctcttaaatctaacatttttaaaagcatttcttccctgtattttcatatacaagttggttttaattttgtttgggtggtgttattttttttaaatgactttttagtttagaaagttctgatgagcaaataaatacatctatctacatgttggaagtccatctgccagcacacctgcttaaagtgaaatgaaagcacataaccaggctctgaatgggttatattttatcatggtgctcccagaatcctttgacctcactctgctttctagtctgcttgtgacactggacagtcctttcttacagagctattatatgttctaggctacgaagggttaaataatcccaaaaatgaggtatgtcatacccacacgtctttatctctagaagctgtgatgtatgtgaaacagcactgttattcttaacactagtgtgtaaaataaggattagtacagtacgtctcattactttttaattcagggcaccctgagtgaaaacaaatacaaaaaaaaatccctaactctgagctctatctctgattcctcttcctccttcccctcttcctcctcttcctctcctcctgttttgctacattctcctcagtggcaaaaagtttcactctacctctgacagcatgtatattgcaccagtagctaacaaaaactggtctagtcaaaccaaatgggcacaaaagaaccaggataccaaaagttaagctcatacagctgcaaaccatatcacttcttggtaacaatgcagacctcataaacctaaagaagagaaagaaaagaaaacttttgttactttccttttttgcttgtcacttatatacaggctatgtgagaatataatttgtaggtataacacattaagaaaaagttatcttcattggatagaattgaatggtggtcgctgataggaatagggcgtcctctagctcttatctctgtctcttactcttttctctttctctttttctctgtcatgagactgtgtgtgacagggccacctgtcttttttttttcttaaattttttttttttttatgtgtaggtgcatgtcttggggatttaaaaatttcaaggctggtttacttatgcaaagcatgcctacgtctggaatacttagggaaagaaagcgactccatgttgtccgaattcctcaagggacagaaaaaaaattggagactgttgaaatgcagatttgaagtaatttttttaaaatattattttgggttctgcgacattgtgaaaaattaaagttgttgtgcaatacttaattcagacatgtaccacaagttaatggtagactaacactggggggtggggtctaggcatcatgcttttgtcagcatactcttgagcttttaagtctactatgtctgaactgtggtttcttgtttatccttttttccttagttggactgtaatgtatggtctgtcaacctgtgaatctttaaagtatgattcaggtattgttgtattctttactgtgtaataaaaaagttgaaaaaaatctggatcctctgtctccctcgtccccggtgtgccatggttgcccaccagtgaccccagcctgaggagtccatcctccatggtgctgaatcaaatctgtagagtttattcagctacaaagcgtggctctgtaacaggagttggcttatccatgcgtgttgagtagggaatgatgtcagaactttgcaaaagtcgagctcattcataaggggatgtttctcaggcaggaggagtaggaagagtgggaggagaattactaccttccataggaaaggagagcttggcttgcctagattagctgctgcatagatagcagaggcccttttggctgtgttttgataaaattagaaatgagtacctaaatctggatcactctgctcagagaggttcgtgccaacctcatgaggctctgactcttgtcaggttgcttggctgccttgtgcatacccgaatggcagatcagctgacatgacatggaactgctctatctgccttgtcccctctcctctaattaaaagtcgctaccattgtcactcttggttatgtagttaatatccactgtggctatctccaacttgctgggacatccagttatctcctctgacacatattttttcattctctagttacaaagtttgttagagtttgaaaaacaaacccttctcccctaccctgtgaatgctgttagtttttatgtgtagttttcaaaacacagattatcttatatactgtgttgtagcagaaattcctgtttcctctgaatgttctgactttatagaccaaaataatcgttgcaaaaaatcaaggatggcacagcaggtgcatgagcccgtgtctggagaaaggttatgaaggtgaatgctggttacatgggagggtgacttggagccctctagtttccttcttgtgccagctgggttcctgtttcaaggccaggcttctctaacttgtcttcctgggaaatgtagcttttccaagaatttggtagtgcacaccaggaaaaactaggtatcagaacagatttttttttaaatagtggaaacaccctcactcccacactttggacagttagggttggatatttaatttcatagttactctttttttccacagaagaaaggccagcctgacccaagttgcctatttttaatgtgttactgcatcttattttctcttcaaagtgaaaaaggccagaaactagcagatagaaatggaacccgttgacttagttcccttataagaagttcttgcaaacacctctgtgacgttttcattcaagtggatatgttggacaaataggaaacagttttagtttacgcgaacagtatgagacttccaggtggtggacgccatttttttagaagtgttgatgatgtatttgataacattataaaagtatgtgtctcccgtgaaagaacattgagctatttccctggaatggatggggaagaaatgagcaaaggagtgctgttctgtatgggtgtctatacccttattccaaggtgaataaataaagttgtgtttgcctaatcatg

SEQ ID NO: 5222 - DNA, 7310 bp, Homo sapiens
ccctcctgcctgtccctttctgtcttctctctctctctcccacttttcctccctctcccgctccgtctcacacgcaccctctgtttattttcctgcctccatctgggccctgctgatattgtaatcaccctgatgcacgttggcttctctcctctccctcctgcgctcacacactcactcacacacaatgtgccatcctgacaaggcttttacttctgataagctccaatgtgtgtttaatgaatacaaagccgcggtctgggtgccgcctcggccgcggccgctctcccgcgctcctttgccagaagatcgtactgagaagcactccacaatgccagactcacctgtggatgtgaagacgcaatctaggctgactcctccaacaatgccacctcccccaactactcaaggagctccaagaaccagttcatttacaccgacaacgttaactaatggcacgagccattctcctacagccttgaatggcgccccctcaccacccaatggcttcagcaatgggccttcctcttcttcctcctcctctctggctaatcaacagctgcccccagcctgtggtgccaggcaactcagcaagctgaaaaggttccttactaccctgcagcagtttggcaatgacatttcacccgagataggagaaagagttcgcaccctcgttctgggactagtgaactccactttgacaattgaagaatttcattccaaactgcaagaagctactaacttcccactgagaccttttgtcatcccatttttgaaggccaacttgcccctgctgcagcgtgagctcctccactgcgcaagactggccaaacagaaccctgcccagtacctcgcccagcatgaacagctgcttctggatgccagcaccacctcacctgttgactcctcagagctgcttctcgatgtgaacgaaaacgggaagaggcgaactccagacagaaccaaagaaaatggctttgacagagagcctttgcactcagaacatccaagcaagcgaccatgcactattagcccaggccagcggtacagtccaaataacggcttatcctaccagcccaatggcctgcctcaccctaccccacctccacctcagcattaccgtttggatgatatggccattgcccaccactacagggactcctatcgacaccccagccacagggacctcagggacagaaacagacctatggggttgcatggcacacgtcaagaagaaatgattgatcacagactaacagacagagaatgggcagaagagtggaaacatcttgaccatctgttaaactgcataatggacatggtagaaaaaacaaggcgatctctcaccgtactaaggcggtgtcaagaagcagaccgggaagaattgaattactggatccggcggtacagtgacgccgaggacttaaaaaaaggtggcggcagtagcagcagccactctaggcagcagagtcccgtcaacccagacccagttgcactagacgcgcatcgggaattccttcacaggcctgcgtctggatacgtgccagaggagatctggaagaaagctgaggaggccgtcaatgaggtgaagcgccaggcgatgacggagctgcagaaggccgtgtctgaggcggagcggaaagcccacgacatgatcacaacagagagggccaagatggagcgcacggtcgccgaggccaaacggcaggcggcggaggacgcactggcagttatcaatcagcaggaggattcaagcgagagttgctggaattgtggccgtaaagcgagtgaaacctgcagtggctgtaacacagcccgatactgtggctcattttgccagcacaaagactgggagaagcaccatcacatctgtggacagaccctgcaggcccagcagcagggagacacacctgcagtcagctcctctgtcacgcccaacagcggggctgggagcccgatggacacaccaccagcagccactccgaggtcaaccaccccgggaaccccttccaccatagagacaacccctcgctagacgtgaactcagaactgtcggaggaaagacaacacaaccaacgcgaaaccaattcctcatcctcagatgctcaaagttgttttttttgtttgtttgtttattagatgaattatcctatttcagtacttcagcaagagagaacctaactgtatcttgaggtggtagtaaaacacagagggccagtaacgggtcgtaatgacttattgtggataacaaagatatcttttctttagagaactgaaaagagagcagagaatataacatgaaatgatagatttgacctcctccctgttattttcaagtagctgggattttaaactagatgacctcattaaccgatgctttaccaaacagcaaaccaagagattgctaattgctgttgaaagcaaaaatgctaatattaaaagtcacaatgttctttatatacaataatggaaaaaaaaaaaagaggaaaaccctcaagggcatgagcattggatacagcagtagacattttaacaagaagatgaatggcgtccgtgggttgctaactgaactttgaagacccgctacaaaacgcgcagatgtgcagcagattggaaggagacacagatgttcggtttttttcctgtttctgaaaagaaataataatatccaggtcaacagaatgaaaaatgaaagatgatttgcaatgggatgtatgaatacagcagcaagaaaaaaaaatgccataatacaaaaggctccatatatatatatatatatatatatatacacacacacacacgcacatatacacacacacacacacacacacacacacacacacacacacacacacacacacacaagtaagagactcagcctgcagttaattagcattctggcagttttgacatcagccagctgccctaaataacccttcaacgtttcttcacttttgcaaggttccacagagtaagacattgggtctattccagctcattcattttatattgaaaaaaataattttaaaaatggtggcttcagctccagcccctttccaaaatttttcaaccccaccctgtttggatttttaattaaaaactagtagttctcttggtgttaaaacacttctgtcctgtgaggtttcccaatggtgtttttcttgtaaatgtgttggacaaatgtgaagatgcattgtagtttaaccatatgcccacatttagtctctttattcctagttggtgagaaacctgtatctttctatgctgcttttatatctgtatgtattagtgatatttctctagtagttaaaaaaaaaaaaaggaaaaaaagactctttttggttgtcctcaagaaaagaaaagaagaaaagctatctttcggagctgctatttcactctcttataggatttttttttttcctgaaaaccagcatgcttcacggaatgctaacatattggtgtttttgtaagagggatgtacataaatgtattttgcactgtcacaatgactccctaggcatgctttttgtttttttttttttttttttgagcaaattctttttaaatatgctagagccatttcatcaagtttagctgtagcatagagtagtcgtggaatttttcttttttttttttttaaatcattattagggacttttttaaaaaaataaaataacaagatatcctactttaaaaaaaaaggacagtgcatgcatattgctgtaaggtcgtttaagtatttctaattttacaaaagtaaaaatcattagagctccaaatgctgaggtgtagattgacagctttaacactgctgaatgccaggttatacagtattcttacaaaaagggaagtcagccaaagactgatctgatggaccaaaatcggaattttgaaaagcaccagtactactttccaaatgatcagcaggttaaacatgttcagcaaggtatagtatgaatccattaacccttcgttgtccagggtccagaccagaactacttgttagttttgaaaacagtagcccaggatgtggttgtgtgctttaggaaagtcagcagtgctgcaggctgtgtagacaaccaaagtttacaaggctgggaagacacttctccaaatacatatacaccaggcatttctttaaaatcaaaaacaatccattagctttggggcggggggtggggggagggttaaatgtaggccttggaaacagttttaagtggcttttaagtatctgcatagaggcaatcctaaggtttgctttaagtctcttaaatctaacatttttaaaagcatttcttccctgtattttcatatacaagttggttttaattttgtttgggtggtgttattttttttaaatgactttttagtttagaaagttctgatgagcaaataaatacatctatctacatgttggaagtccatctgccagcacacctgcttaaagtgaaatgaaagcacataaccaggctctgaatgggttatattttatcatggtgctcccagaatcctttgacctcactctgctttctagtctgcttgtgacactggacagtcctttcttacagagctattatatgttctaggctacgaagggttaaataatcccaaaaatgaggtatgtcatacccacacgtctttatctctagaagctgtgatgtatgtgaaacagcactgttattcttaacactagtgtgtaaaataaggattagtacagtacgtctcattactttttaattcagggcaccctgagtgaaaacaaatacaaaaaaaaatccctaactctgagctctatctctgattcctcttcctccttcccctcttcctcctcttcctctcctcctgttttgctacattctcctcagtggcaaaaagtttcactctacctctgacagcatgtatattgcaccagtagctaacaaaaactggtctagtcaaaccaaatgggcacaaaagaaccaggataccaaaagttaagctcatacagctgcaaaccatatcacttcttggtaacaatgcagacctcataaacctaaagaagagaaagaaaagaaaacttttgttactttccttttttgcttgtcacttatatacaggctatgtgagaatataatttgtaggtataacacattaagaaaaagttatcttcattggatagaattgaatggtggtcgctgataggaatagggcgtcctctagctcttatctctgtctcttactcttttctctttctctttttctctgtcatgagactgtgtgtgacagggccacctgtcttttttttttcttaaattttttttttttttatgtgtaggtgcatgtcttggggatttaaaaatttcaaggctggtttacttatgcaaagcatgcctacgtctggaatacttagggaaagaaagcgactccatgttgtccgaattcctcaagggacagaaaaaaaattggagactgttgaaatgcagatttgaagtaatttttttaaaatattattttgggttctgcgacattgtgaaaaattaaagttgttgtgcaatacttaattcagacatgtaccacaagttaatggtagactaacactggggggtggggtctaggcatcatgcttttgtcagcatactcttgagcttttaagtctactatgtctgaactgtggtttcttgtttatccttttttccttagttggactgtaatgtatggtctgtcaacctgtgaatctttaaagtatgattcaggtattgttgtattctttactgtgtaataaaaaagttgaaaaaaatctggatcctctgtctccctcgtccccggtgtgccatggttgcccaccagtgaccccagcctgaggagtccatcctccatggtgctgaatcaaatctgtagagtttattcagctacaaagcgtggctctgtaacaggagttggcttatccatgcgtgttgagtagggaatgatgtcagaactttgcaaaagtcgagctcattcataaggggatgtttctcaggcaggaggagtaggaagagtgggaggagaattactaccttccataggaaaggagagcttggcttgcctagattagctgctgcatagatagcagaggcccttttggctgtgttttgataaaattagaaatgagtacctaaatctggatcactctgctcagagaggttcgtgccaacctcatgaggctctgactcttgtcaggttgcttggctgccttgtgcatacccgaatggcagatcagctgacatgacatggaactgctctatctgccttgtcccctctcctctaattaaaagtcgctaccattgtcactcttggttatgtagttaatatccactgtggctatctccaacttgctgggacatccagttatctcctctgacacatattttttcattctctagttacaaagtttgttagagtttgaaaaacaaacccttctcccctaccctgtgaatgctgttagtttttatgtgtagttttcaaaacacagattatcttatatactgtgttgtagcagaaattcctgtttcctctgaatgttctgactttatagaccaaaataatcgttgcaaaaaatcaaggatggcacagcaggtgcatgagcccgtgtctggagaaaggttatgaaggtgaatgctggttacatgggagggtgacttggagccctctagtttccttcttgtgccagctgggttcctgtttcaaggccaggcttctctaacttgtcttcctgggaaatgtagcttttccaagaatttggtagtgcacaccaggaaaaactaggtatcagaacagatttttttttaaatagtggaaacaccctcactcccacactttggacagttagggttggatatttaatttcatagttactctttttttccacagaagaaaggccagcctgacccaagttgcctatttttaatgtgttactgcatcttattttctcttcaaagtgaaaaaggccagaaactagcagatagaaatggaacccgttgacttagttcccttataagaagttcttgcaaacacctctgtgacgttttcattcaagtggatatgttggacaaataggaaacagttttagtttacgcgaacagtatgagacttccaggtggtggacgccatttttttagaagtgttgatgatgtatttgataacattataaaagtatgtgtctcccgtgaaagaacattgagctatttccctggaatggatggggaagaaatgagcaaaggagtgctgttctgtatgggtgtctatacccttattccaaggtgaataaataaagttgtgtttgcctaatcatg

SEQ ID NO: 5223 - DNA, 7454 bp, Homo sapiens
ccctcctgcctgtccctttctgtcttctctctctctctcccacttttcctccctctcccgctccgtctcacacgcaccctctgtttattttcctgcctccatctgggccctgctgatattgtaatcaccctgatgcacgttggcttctctcctctccctcctgcgctcacacactcactcacacacaatgtgccatcctgacaaggcttttacttctgataagctccaatgtgtgtttaatgaatacaaagccgcggtctgggtgccgcctcggccgcggccgctctcccgcgctcctttgccagaagctggcggagagaatttacatttaaagattagcagagtgagaaagagaaatctgccttttgttgtgtggggtgaggaggaggcatctacccctggccttgacgctatctcccatcacctctgctatccagacaggactcaccgagatcgtactgagaagcactccacaatgccagactcacctgtggatgtgaagacgcaatctaggctgactcctccaacaatgccacctcccccaactactcaaggagctccaagaaccagttcatttacaccgacaacgttaactaatggcacgagccattctcctacagccttgaatggcgccccctcaccacccaatggcttcagcaatgggccttcctcttcttcctcctcctctctggctaatcaacagctgcccccagcctgtggtgccaggcaactcagcaagctgaaaaggttccttactaccctgcagcagtttggcaatgacatttcacccgagataggagaaagagttcgcaccctcgttctgggactagtgaactccactttgacaattgaagaatttcattccaaactgcaagaagctactaacttcccactgagaccttttgtcatcccatttttgaaggccaacttgcccctgctgcagcgtgagctcctccactgcgcaagactggccaaacagaaccctgcccagtacctcgcccagcatgaacagctgcttctggatgccagcaccacctcacctgttgactcctcagagctgcttctcgatgtgaacgaaaacgggaagaggcgaactccagacagaaccaaagaaaatggctttgacagagagcctttgcactcagaacatccaagcaagcgaccatgcactattagcccaggccagcggtacagtccaaataacggcttatcctaccagcccaatggcctgcctcaccctaccccacctccacctcagcattaccgtttggatgatatggccattgcccaccactacagggactcctatcgacaccccagccacagggacctcagggacagaaacagacctatggggttgcatggcacacgtcaagaagaaatgattgatcacagactaacagacagagaatgggcagaagagtggaaacatcttgaccatctgttaaactgcataatggacatggtagaaaaaacaaggcgatctctcaccgtactaaggcggtgtcaagaagcagaccgggaagaattgaattactggatccggcggtacagtgacgccgaggacttaaaaaaaggtggcggcagtagcagcagccactctaggcagcagagtcccgtcaacccagacccagttgcactagacgcgcatcgggaattccttcacaggcctgcgtctggatacgtgccagaggagatctggaagaaagctgaggaggccgtcaatgaggtgaagcgccaggcgatgacggagctgcagaaggccgtgtctgaggcggagcggaaagcccacgacatgatcacaacagagagggccaagatggagcgcacggtcgccgaggccaaacggcaggcggcggaggacgcactggcagttatcaatcagcaggaggattcaagcgagagttgctggaattgtggccgtaaagcgagtgaaacctgcagtggctgtaacacagcccgatactgtggctcattttgccagcacaaagactgggagaagcaccatcacatctgtggacagaccctgcaggcccagcagcagggagacacacctgcagtcagctcctctgtcacgcccaacagcggggctgggagcccgatggacacaccaccagcagccactccgaggtcaaccaccccgggaaccccttccaccatagagacaacccctcgctagacgtgaactcagaactgtcggaggaaagacaacacaaccaacgcgaaaccaattcctcatcctcagatgctcaaagttgttttttttgtttgtttgtttattagatgaattatcctatttcagtacttcagcaagagagaacctaactgtatcttgaggtggtagtaaaacacagagggccagtaacgggtcgtaatgacttattgtggataacaaagatatcttttctttagagaactgaaaagagagcagagaatataacatgaaatgatagatttgacctcctccctgttattttcaagtagctgggattttaaactagatgacctcattaaccgatgctttaccaaacagcaaaccaagagattgctaattgctgttgaaagcaaaaatgctaatattaaaagtcacaatgttctttatatacaataatggaaaaaaaaaaaagaggaaaaccctcaagggcatgagcattggatacagcagtagacattttaacaagaagatgaatggcgtccgtgggttgctaactgaactttgaagacccgctacaaaacgcgcagatgtgcagcagattggaaggagacacagatgttcggtttttttcctgtttctgaaaagaaataataatatccaggtcaacagaatgaaaaatgaaagatgatttgcaatgggatgtatgaatacagcagcaagaaaaaaaaatgccataatacaaaaggctccatatatatatatatatatatatatatacacacacacacacgcacatatacacacacacacacacacacacacacacacacacacacacacacacacacacacaagtaagagactcagcctgcagttaattagcattctggcagttttgacatcagccagctgccctaaataacccttcaacgtttcttcacttttgcaaggttccacagagtaagacattgggtctattccagctcattcattttatattgaaaaaaataattttaaaaatggtggcttcagctccagcccctttccaaaatttttcaaccccaccctgtttggatttttaattaaaaactagtagttctcttggtgttaaaacacttctgtcctgtgaggtttcccaatggtgtttttcttgtaaatgtgttggacaaatgtgaagatgcattgtagtttaaccatatgcccacatttagtctctttattcctagttggtgagaaacctgtatctttctatgctgcttttatatctgtatgtattagtgatatttctctagtagttaaaaaaaaaaaaaggaaaaaaagactctttttggttgtcctcaagaaaagaaaagaagaaaagctatctttcggagctgctatttcactctcttataggatttttttttttcctgaaaaccagcatgcttcacggaatgctaacatattggtgtttttgtaagagggatgtacataaatgtattttgcactgtcacaatgactccctaggcatgctttttgtttttttttttttttttttgagcaaattctttttaaatatgctagagccatttcatcaagtttagctgtagcatagagtagtcgtggaatttttcttttttttttttttaaatcattattagggacttttttaaaaaaataaaataacaagatatcctactttaaaaaaaaaggacagtgcatgcatattgctgtaaggtcgtttaagtatttctaattttacaaaagtaaaaatcattagagctccaaatgctgaggtgtagattgacagctttaacactgctgaatgccaggttatacagtattcttacaaaaagggaagtcagccaaagactgatctgatggaccaaaatcggaattttgaaaagcaccagtactactttccaaatgatcagcaggttaaacatgttcagcaaggtatagtatgaatccattaacccttcgttgtccagggtccagaccagaactacttgttagttttgaaaacagtagcccaggatgtggttgtgtgctttaggaaagtcagcagtgctgcaggctgtgtagacaaccaaagtttacaaggctgggaagacacttctccaaatacatatacaccaggcatttctttaaaatcaaaaacaatccattagctttggggcggggggtggggggagggttaaatgtaggccttggaaacagttttaagtggcttttaagtatctgcatagaggcaatcctaaggtttgctttaagtctcttaaatctaacatttttaaaagcatttcttccctgtattttcatatacaagttggttttaattttgtttgggtggtgttattttttttaaatgactttttagtttagaaagttctgatgagcaaataaatacatctatctacatgttggaagtccatctgccagcacacctgcttaaagtgaaatgaaagcacataaccaggctctgaatgggttatattttatcatggtgctcccagaatcctttgacctcactctgctttctagtctgcttgtgacactggacagtcctttcttacagagctattatatgttctaggctacgaagggttaaataatcccaaaaatgaggtatgtcatacccacacgtctttatctctagaagctgtgatgtatgtgaaacagcactgttattcttaacactagtgtgtaaaataaggattagtacagtacgtctcattactttttaattcagggcaccctgagtgaaaacaaatacaaaaaaaaatccctaactctgagctctatctctgattcctcttcctccttcccctcttcctcctcttcctctcctcctgttttgctacattctcctcagtggcaaaaagtttcactctacctctgacagcatgtatattgcaccagtagctaacaaaaactggtctagtcaaaccaaatgggcacaaaagaaccaggataccaaaagttaagctcatacagctgcaaaccatatcacttcttggtaacaatgcagacctcataaacctaaagaagagaaagaaaagaaaacttttgttactttccttttttgcttgtcacttatatacaggctatgtgagaatataatttgtaggtataacacattaagaaaaagttatcttcattggatagaattgaatggtggtcgctgataggaatagggcgtcctctagctcttatctctgtctcttactcttttctctttctctttttctctgtcatgagactgtgtgtgacagggccacctgtcttttttttttcttaaattttttttttttttatgtgtaggtgcatgtcttggggatttaaaaatttcaaggctggtttacttatgcaaagcatgcctacgtctggaatacttagggaaagaaagcgactccatgttgtccgaattcctcaagggacagaaaaaaaattggagactgttgaaatgcagatttgaagtaatttttttaaaatattattttgggttctgcgacattgtgaaaaattaaagttgttgtgcaatacttaattcagacatgtaccacaagttaatggtagactaacactggggggtggggtctaggcatcatgcttttgtcagcatactcttgagcttttaagtctactatgtctgaactgtggtttcttgtttatccttttttccttagttggactgtaatgtatggtctgtcaacctgtgaatctttaaagtatgattcaggtattgttgtattctttactgtgtaataaaaaagttgaaaaaaatctggatcctctgtctccctcgtccccggtgtgccatggttgcccaccagtgaccccagcctgaggagtccatcctccatggtgctgaatcaaatctgtagagtttattcagctacaaagcgtggctctgtaacaggagttggcttatccatgcgtgttgagtagggaatgatgtcagaactttgcaaaagtcgagctcattcataaggggatgtttctcaggcaggaggagtaggaagagtgggaggagaattactaccttccataggaaaggagagcttggcttgcctagattagctgctgcatagatagcagaggcccttttggctgtgttttgataaaattagaaatgagtacctaaatctggatcactctgctcagagaggttcgtgccaacctcatgaggctctgactcttgtcaggttgcttggctgccttgtgcatacccgaatggcagatcagctgacatgacatggaactgctctatctgccttgtcccctctcctctaattaaaagtcgctaccattgtcactcttggttatgtagttaatatccactgtggctatctccaacttgctgggacatccagttatctcctctgacacatattttttcattctctagttacaaagtttgttagagtttgaaaaacaaacccttctcccctaccctgtgaatgctgttagtttttatgtgtagttttcaaaacacagattatcttatatactgtgttgtagcagaaattcctgtttcctctgaatgttctgactttatagaccaaaataatcgttgcaaaaaatcaaggatggcacagcaggtgcatgagcccgtgtctggagaaaggttatgaaggtgaatgctggttacatgggagggtgacttggagccctctagtttccttcttgtgccagctgggttcctgtttcaaggccaggcttctctaacttgtcttcctgggaaatgtagcttttccaagaatttggtagtgcacaccaggaaaaactaggtatcagaacagatttttttttaaatagtggaaacaccctcactcccacactttggacagttagggttggatatttaatttcatagttactctttttttccacagaagaaaggccagcctgacccaagttgcctatttttaatgtgttactgcatcttattttctcttcaaagtgaaaaaggccagaaactagcagatagaaatggaacccgttgacttagttcccttataagaagttcttgcaaacacctctgtgacgttttcattcaagtggatatgttggacaaataggaaacagttttagtttacgcgaacagtatgagacttccaggtggtggacgccatttttttagaagtgttgatgatgtatttgataacattataaaagtatgtgtctcccgtgaaagaacattgagctatttccctggaatggatggggaagaaatgagcaaaggagtgctgttctgtatgggtgtctatacccttattccaaggtgaataaataaagttgtgtttgcctaatcatg

SEQ ID NO: 5224 - DNA, 831 bp, Homo sapiens; identical to SEQ ID NO: 657

SEQ ID NO: 5225 - DNA, 2232 bp, Homo sapiens; identical to SEQ ID NO: 540

SEQ ID NO: 5226 - DNA, 2345 bp, Homo sapiens; identical to SEQ ID NO: 803

SEQ ID NO: 5227 - DNA, 3854 bp, Homo sapiens; identical to SEQ ID NO: 230

SEQ ID NO: 5228 - DNA, 3821 bp, Homo sapiens
gcggcgcggagggaggtgagcggcgcgcgcggagccggcgggcgaggaggaggactgcacagaggccccgcccccgccgccgcgagccggctcttcgccgcctccgaacccgctcactttgcctctcgcctctggacggcggcggggcggccgccggattcgcggccgcagggagcgccggagacggggagctattccgccccggcggctccattcggcgcccgcagccctcagggggtcggccccgcggcttgggagagggcaccgcggcctcggtgtgcgcagccctcgggcgcgagggtcggcggcgcggacacagccgcgttcccagccggtggggctcagcgctggcgccggcgaggactccccggccacccgcaggtaccgccgggcggagggcgcgctactagcagcgccggagatactcgagcccagggacccccgggccagcggagggcaggagcggagccccgagggagcgcgggccccgacggcgcgctcccccgtcagccacgggcaggcaggccccgcgtggcggcttggggtggggggctgcagcggggccctcgggccgaaagtcccccgggcggccagccatgaccttcgggcgcagcggggcggcctcggtggtgctgaacgtgggcggcgcccggtattcgctgtcccgggagctgctgaaggacttcccgctgcgccgcgtgagccggctgcacggctgccgctccgagcgcgacgtgctcgaggtgtgcgacgactacgaccgcgagcgcaacgagtacttcttcgaccggcactcggaggccttcggcttcatcctgctctacgtgcgcggccacggcaagctgcgcttcgcgccgcggatgtgcgagctctccttctacaacgagatgatctactggggcctggagggcgcgcacctcgagtactgctgccagcgccgcctcgacgaccgcatgtccgacacctacaccttctactcggccgacgagccgggcgtgctgggccgcgacgaggcgcgccccggcggggccgaggcggctccctccaggcgctggctggagcgcatgcggcggaccttcgaggagcccacgtcgtcgctggccgcgcagatcctggctagcgtgtcggtggtgttcgtgatcgtgtccatggtggtgctgtgcgccagcacgttgcccgactggcgcaacgcagccgccgacaaccgcagcctggatgaccggagcaggataattgaagctatctgcataggttggttcactgccgagtgcatcgtgaggttcattgtctccaaaaacaagtgtgagtttgtcaagagacccctgaacatcattgatttactggcaatcacgccgtattacatctctgtgttgatgacagtgtttacaggcgagaactctcaactccagagggctggagtcaccttgagggtacttagaatgatgaggattttttgggtgattaagcttgcccgtcacttcattggtcttcagacactcggtttgactctcaaacgttgctaccgagagatggttatgttacttgtcttcatttgtgttgccatggcaatctttagtgcactttctcagcttcttgaacatgggctggacctggaaacatccaacaaggactttaccagcattcctgctgcctgctggtgggtgattatctctatgactacagttggctatggagatatgtatcctatcacagtgcctggaagaattcttggaggagtttgtgttgtcagtggaattgttctattggcattacctatcacttttatctaccatagctttgtgcagtgttatcatgagctcaagtttagatctgctaggtatagtaggagcctctccactgaattcctgaattaatgcattgcaaatcaattcttgcatacacttcatagaaagactttgatgctgcttcatatttatgtgtttcttgctgggtgagcactgcagtggcattgtcatcatcttggtagggtaaaaattatccttcccagccgaagggataaaacagtttacttgttatggagtaaatagaattgagactgcaaaggaagaataatgactcctagagtaaactttaggacccggttttatttagacttgttttcccgtttccttgaatgattacacatttttaaaaaatacattatttgaacattttaaaacagaaaggtactattttccaaatgtttttccatcttatgaattcagaagaagcttggaacttatagtgttttttgtttgagagtaacattttcatttctaaatgttttataatttctcatatcaatgtcagaagtatcctggaaacatatgtcacatgcgggaactgtttaacaaatactttaaaaatttggccaaaatttaaactgtataatggagctagatacaagcaagaatagtatttgaaagacttttccagcatacttctcaattctttgctttatttttgtgccaattattcaccttatcgtgccgcttcatggaagcttgagtatgttctcccttttccattttggatttatctctttactgtaatgactcaaaaggtatttaagaattgacgagagcttgtgttgtttagcatcttactggataatatttgaattcattgctgttcctaggtgataactgtcctaatatttagatgtccaaacaagaatacttccaacataaaaattataataggaataatttgagatgactcaatattacaacctcttcttctcttaacctcctcccccaaacactagaggtttaataagacttatcagatgaaaggatatttatatagccttttagtagcaaagtcatacttacgtgttgtcactggattatcataaaagggagaaattaaatattactgtactcttagttgctgtgtagctaagtcaattttaagccagtaaaagcgatggatacataatgatttgatctgatctttaactattgtgaatcacagctacaccaaaactcttcttgtaagaatactgactaatatgccatgttaatctggctagattattaggactagataatgtaaaagtgatgattgtttagtaactaaattttagcaacagaaattagaattttgctttttcaaccagttaccataaagaagttagtgtatatataaacacaaataattagtgacagattcataaaaaattgaatgttgtacacagtaattttgtcagaggtagagaagacagggattgggaagtggtgggtgatggaggacctggatatatttatcaaataaagggttaccagaagtgttcattaaaggaattttagccatcatctagttcaaacctcaactattacaggtagaaaatcagggcaggagagaatataattgtgaaggagtcagggctaacacctggatctccagaaacctagcccagcaggttaatcttcacacatctctgggttctgagaaaagcctggaaaaatcacacttctttgtcattgtcatgctgaggtaataatagcaaaactgttttctttcccttaatttcctttcctaagcttatgtaatagtttggccattaaatatcttgccctattttccctattactgctagtatgctacttcttacatacccaaaagaaattcagttatttattgtatatttattgtattctaatataattgaaataaatggcatggatttattttttcttaactatttggattaaagctttgtggttcatgcaaacaatgtgcagatgatagcacctccatattactaataaaaatatgataaccatcaaaaaaaaaaaaaaaaaaaaaaaaaaaaaaaa

SEQ ID NO: 5229 - DNA, 3111 bp, Homo sapiens; identical to SEQ ID NO: 685

SEQ ID NO: 5230 - DNA, 13804 bp, Homo sapiens; identical to SEQ ID NO: 2304

SEQ ID NO: 5231 - DNA, 3431 bp, Homo sapiens; identical to SEQ ID NO: 1905

SEQ ID NO: 5232 - DNA, 660 bp, Homo sapiens; identical to SEQ ID NO: 1425

SEQ ID NO: 5233 - DNA, 3801 bp, Homo sapiens; identical to SEQ ID NO: 1564

SEQ ID NO: 5234 - DNA, 1439 bp, Homo sapiens; identical to SEQ ID NO: 753

SEQ ID NO: 5235 - DNA, 5408 bp, Homo sapiens; identical to SEQ ID NO: 1977

SEQ ID NO: 5236 - DNA, 2853 bp, Homo sapiens; identical to SEQ ID NO: 1459

SEQ ID NO: 5237 - DNA, 2814 bp, Homo sapiens
cgggacctgaatacccggctagggacacgagagagaggaatcggggtttctgggtgacggtgatctcggggtgggcaggactccaaaggcccgtcgacccggtggtggactccttgcactgggattggacatatgcaagcgggagatttggggccggcgctcaaaatcggggggcgggggtggactcgggtttggaccccaggatccgatcagcggacccttgattcaacgtgggctccagcgtgacatggctgaagcgcaccaggccgtgggcttccgaccctcgctgacctcggacggggctgaagtggaactcagtgcccctgtgctgcaggagatctacctctctggcctgcgctcctggaaaaggcatctctcacgtttctggaatgactttctcaccggtgtgtttcctgccagccccctcagttggcttttcctcttcagtgccatccagcttgcctggttcctccagctggatccttccttaggactgatggagaagatcaaagagttgctgcctgactggggtggacaacaccacgggctccggggggtcctggcagccgcgctgtttgcctcgtgtttgtggggagccctgatcttcacactgcacgtggccctgaggctgcttctgtcctaccacggctggcttcttgagccccacggagccatgtcctcccccaccaagacctggctggccctggtccgcatcttctctggccgccacccgatgctgttcagttaccagcgctccctgccacgccagcccgtgccctctgtgcaggacaccgtgcgcaagtacctggagtcggtccggcccatcctctccgacgaggacttcgactggaccgcggtcctggcgcaggaattcctgaggctgcaggcgtcgctgctgcagtggtacctgcggctcaagtcctggtgggcgtccaattatgtcagtgactggtgggaggaatttgtgtacctgcgctcccgaaatccgctgatggtgaacagcaactattacatgatggacttcctgtatgtcacacccacgcctctgcaggcagctcgcgctgggaatgccgtccatgccctcctcctgtaccgccaccgcctgaaccgccaggagatacccccgactttgctgatgggaatgcgccccttatgctctgcccagtacgagaagatcttcaacaccacgcggattccaggggtccaaaaagactacatccgccacctccatgacagccaacacgtggctgtcttccaccggggccgattcttccgcatggggacccactcccgaaacagcctgctttccccgagagccctggagcagcagtttcagagaatcctggatgatccctcaccggcctgcccccacgaggaacatctggcagctctgacagctgctcccaggggcacgtgggcccaggtgcggacatccctgaagacccaggcagcggaggccctggaggcggtggaaggggccgctttctttgtgtcactggatgctgagcccgcggggctcaccagggaggacccggcagcgtcgttggatgcctacgcccatgctctgctggccggccggggccatgatcgctggtttgacaaatccttcaccctaatcgtcttctctaacgggaagctgggcctcagcgtggagcactcctgggccgactgccccatctcaggacacatgtgggagttcactctggctacagaatgctttcagctgggctactcaacagacggccactgcaaggggcacccggaccccacactaccccagccccagcggctgcaatgggaccttccagaccagatccactcctccatctctctagccctgaggggagccaagatcttgtctgaaaatgtcgactgccatgtcgttccattctccctatttggcaagagcttcatccgacgctgccacctctcttcagacagcttcatccagatcgccttgcaactggcccacttccgggacaggggtcaattctgcctgacttatgagtcggccatgactcgcttattcctggaaggccggacggagacggtgcggtcttgcacgagggaggcctgcaactttgtcagggccatggaggacaaagagaagacggacccacagtgcctcgccctgttccgcgtggcagtggacaagcaccaggctctgctgaaggcagccatgagcgggcagggagttgaccgccacctgtttgcgctgtacatcgtgtcccgattcctccacctgcagtcgcccttcctgacccaggtccattcggagcagtggcagctgtccaccagccagatccctgttcagcaaatgcatctgtttgacgtccacaattacccggactatgtttcctcaggcggtggattcgggcctgctgatgaccatggttatggtgtttcttatatcttcatgggggatggcatgatcaccttccacatctccagcaaaaaatcaagcacaaaaacggattcccacaggctggggcagcacattgaggacgcactgctggatgtggcctccctgttccaggcgggacagcattttaagcgccggttcagagggtcagggaaggagaactccaggcacaggtgtggatttctctcccgccagactggggcctccaaggcctcaatgacatccaccgacttctgactccttccagcaggcagctggcctctccaaggaataagggtgaaattgccacagctggctgacacaggacaggggcaactggtttggcaaccccacatccaggccaataaagatgtgtgagctgggaaaaaaaaaaaaaaaaaaaaaaaaaaaaa

SEQ ID NO: 5238 - DNA, 1606 bp, Homo sapiens; identical to SEQ ID NO: 2345

SEQ ID NO: 5239 - DNA, 4258 bp, Homo sapiens; identical to SEQ ID NO: 638

SEQ ID NO: 5240 - DNA, 1898 bp, Homo sapiens; identical to SEQ ID NO: 1465

SEQ ID NO: 5241 - DNA, 4099 bp, Homo sapiens; identical to SEQ ID NO: 134

SEQ ID NO: 5242 - DNA, 1256 bp, Homo sapiens; identical to SEQ ID NO: 696

SEQ ID NO: 5243 - DNA, 2301 bp, Homo sapiens; identical to SEQ ID NO: 536

SEQ ID NO: 5244 - DNA, 2867 bp, Homo sapiens; identical to SEQ ID NO: 603

SEQ ID NO: 5245 - DNA, 2195 bp, Homo sapiens; identical to SEQ ID NO: 1463

SEQ ID NO: 5246 - DNA, 4296 bp, Homo sapiens
acattccggtgggggactctggccagcccgagcaacgtggatcctgagagcactcccaggtaggcatttgccccggtgggacgccttgccagagcagtgtgtggcaggcccccgtggaggatcaacacagtggctgaacactgggaaggaactggtacttggagtctggacatctgaaacttggctctgaaactgcggagcggccaccggacgccttctggagcaggtagcagcatgcagccgcctccaagtctgtgcggacgcgccctggttgcgctggttcttgcctgcggcctgtcgcggatctggggagaggagagaggcttcccgcctgacagggccactccgcttttgcaaaccgcagagataatgacgccacccactaagaccttatggcccaagggttccaacgccagtctggcgcggtcgttggcacctgcggaggtgcctaaaggagacaggacggcaggatctccgccacgcaccatctcccctcccccgtgccaaggacccatcgagatcaaggagactttcaaatacatcaacacggttgtgtcctgccttgtgttcgtgctggggatcatcgggaactccacacttctgagaattatctacaagaacaagtgcatgcgaaacggtcccaatatcttgatcgccagcttggctctgggagacctgctgcacatcgtcattgacatccctatcaatgtctacaagctgctggcagaggactggccatttggagctgagatgtgtaagctggtgcctttcatacagaaagcctccgtgggaatcactgtgctgagtctatgtgctctgagtattgacagatatcgagctgttgcttcttggagtagaattaaaggaattggggttccaaaatggacagcagtagaaattgttttgatttgggtggtctctgtggttctggctgtccctgaagccataggttttgatataattacgatggactacaaaggaagttatctgcgaatctgcttgcttcatcccgttcagaagacagctttcatgcagttttacaagacagcaaaagattggtggctattcagtttctatttctgcttgccattggccatcactgcatttttttatacactaatgacctgtgaaatgttgagaaagaaaagtggcatgcagattgctttaaatgatcacctaaagcagagacgggaagtggccaaaaccgtcttttgcctggtccttgtctttgccctctgctggcttccccttcacctcagcaggattctgaagctcactctttataatcagaatgatcccaatagatgtgaacttttgagctttctgttggtattggactatattggtatcaacatggcttcactgaattcctgcattaacccaattgctctgtatttggtgagcaaaagattcaaaaactgctttaagtcatgcttatgctgctggtgccagtcatttgaagaaaaacagtccttggaggaaaagcagtcgtgcttaaagttcaaagctaatgatcacggatatgacaacttccgttccagtaataaatacagctcatcttgaaagaagaactattcactgtatttcattttctttatattggaccgaagtcattaaaacaaaatgaaacatttgccaaaacaaaacaaaaaactatgtatttgcacagcacactattaaaatattaagtgtaattattttaacactcacagctacatatgacattttatgagctgtttacggcatggaaagaaaatcagtgggaattaagaaagcctcgtcgtgaaagcacttaattttttacagttagcacttcaacatagctcttaacaacttccaggatattcacacaacacttaggcttaaaaatgagctcactcagaatttctattctttctaaaaagagatttatttttaaatcaatgggactctgatataaaggaagaataagtcactgtaaaacagaacttttaaatgaagcttaaattactcaatttaaaattttaaaatcctttaaaacaacttttcaattaatattatcacactattatcagattgtaattagatgcaaatgagagagcagtttagttgttgcatttttcggacactggaaacatttaaatgatcaggagggagtaacagaaagagcaaggctgtttttgaaaatcattacactttcactagaagcccaaacctcagcattctgcaatatgtaaccaacatgtcacaaacaagcagcatgtaacagactggcacatgtgccagctgaatttaaaatataatacttttaaaaagaaaattattacatcctttacattcagttaagatcaaacctcacaaagagaaatagaatgtttgaaaggctatcccaaaagacttttttgaatctgtcattcacataccctgtgaagacaatactatctacaattttttcaggattattaaaatcttcttctttcactatcgtagcttaaactctgtttggttttgtcatctgtaaatacttacctacatacactgcatgtagatgattaaatgagggcaggccctgtgctcatagctttacgatggagagatgccagtgacctcataataaagactgtgaactgcctggtgcagtgtccacatgacaaaggggcaggtagcaccctctctcacccatgctgtggttaaaatggtttctagcatatgtataatgctatagttaaaatactatttttcaaaatcatacagattagtacatttaacagctacctgtaaagcttattactaatttttgtattatttttgtaaatagccaatagaaaagtttgcttgacatggtgcttttctttcatctagaggcaaaactgctttttgagaccgtaagaacctcttagctttgtgcgttcctgcctaatttttatatcttctaagcaaagtgccttaggatagcttgggatgagatgtgtgtgaaagtatgtacaagagaaaacggaagagagaggaaatgaggtggggttggaggaaacccatggggacagattcccattcttagcctaacgttcgtcattgcctcgtcacatcaatgcaaaaggtcctgattttgttccagcaaaacacagtgcaatgttctcagagtgactttcgaaataaattgggcccaagagctttaactcggtcttaaaatatgcccaaatttttactttgtttttcttttaataggctgggccacatgttggaaataagctagtaatgttgttttctgtcaatattgaatgtgatggtacagtaaaccaaaacccaacaatgtggccagaaagaaagagcaataataattaattcacacaccatatggattctatttataaatcacccacaaacttgttctttaatttcatcccaatcactttttcagaggcctgttatcatagaagtcattttagactctcaattttaaattaattttgaatcactaatattttcacagtttattaatatatttaatttctatttaaattttagattatttttattaccatgtactgaatttttacatcctgataccctttccttctccatgtcagtatcatgttctctaattatcttgccaaattttgaaactacacacaaaaagcatacttgcattatttataataaaattgcattcagtggctttttaaaaaaatgtttgattcaaaactttaacatactgataagtaagaaacaattataatttctttacatactcaaaaccaagatagaaaaaggtgctatcgttcaacttcaaaacatgtttcctagtattaaggactttaatatagcaacagacaaaattattgttaacatggatgttacagctcaaaagatttataaaagattttaacctattttctcccttattatccactgctaatgtggatgtatgttcaaacaccttttagtattgatagcttacatatggccaaaggaatacagtttatagcaaaacatgggtatgctgtagctaactttataaaagtgtaatataacaatgtaaaaaattatatatctgggaggattttttggttgcctaaagtggctatagttactgattttttattatgtaagcaaaaccaataaaaatttaagtttttttaacaactaccttatttttcactgtacagacactaattcattaaatactaattgattgtttaaaagaaatataaatgtgacaagtggacattatttatgttaaatatacaattatcaagcaagtatgaagttattcaattaaaatgccacatttctggtctctgggaaaaaaaaaaaaaa

SEQ ID NO: 5247 - DNA, 2544 bp, Homo sapiens; identical to SEQ ID NO: 220

SEQ ID NO: 5248 - DNA, 4320 bp, Homo sapiens
aagaaaaacagctgagagggcatcaggaaggagtttcgacccgcgctggcgagtcatgagcgccaagtttcccactggcgcgcaaacttgagttacttttgagcgtggatactggcgaagaggctgcgggcggtattagcgtttgcagcgacttggctcgggcagctgacccaagtgtcctgtcttccttcctctgcttgtctctaggctctgaaactgcggagcggccaccggacgccttctggagcaggtagcagcatgcagccgcctccaagtctgtgcggacgcgccctggttgcgctggttcttgcctgcggcctgtcgcggatctggggagaggagagaggcttcccgcctgacagggccactccgcttttgcaaaccgcagagataatgacgccacccactaagaccttatggcccaagggttccaacgccagtctggcgcggtcgttggcacctgcggaggtgcctaaaggagacaggacggcaggatctccgccacgcaccatctcccctcccccgtgccaaggacccatcgagatcaaggagactttcaaatacatcaacacggttgtgtcctgccttgtgttcgtgctggggatcatcgggaactccacacttctgagaattatctacaagaacaagtgcatgcgaaacggtcccaatatcttgatcgccagcttggctctgggagacctgctgcacatcgtcattgacatccctatcaatgtctacaagctgctggcagaggactggccatttggagctgagatgtgtaagctggtgcctttcatacagaaagcctccgtgggaatcactgtgctgagtctatgtgctctgagtattgacagatatcgagctgttgcttcttggagtagaattaaaggaattggggttccaaaatggacagcagtagaaattgttttgatttgggtggtctctgtggttctggctgtccctgaagccataggttttgatataattacgatggactacaaaggaagttatctgcgaatctgcttgcttcatcccgttcagaagacagctttcatgcagttttacaagacagcaaaagattggtggctattcagtttctatttctgcttgccattggccatcactgcatttttttatacactaatgacctgtgaaatgttgagaaagaaaagtggcatgcagattgctttaaatgatcacctaaagcagagacgggaagtggccaaaaccgtcttttgcctggtccttgtctttgccctctgctggcttccccttcacctcagcaggattctgaagctcactctttataatcagaatgatcccaatagatgtgaacttttgagctttctgttggtattggactatattggtatcaacatggcttcactgaattcctgcattaacccaattgctctgtatttggtgagcaaaagattcaaaaactgctttaagtcatgcttatgctgctggtgccagtcatttgaagaaaaacagtccttggaggaaaagcagtcgtgcttaaagttcaaagctaatgatcacggatatgacaacttccgttccagtaataaatacagctcatcttgaaagaagaactattcactgtatttcattttctttatattggaccgaagtcattaaaacaaaatgaaacatttgccaaaacaaaacaaaaaactatgtatttgcacagcacactattaaaatattaagtgtaattattttaacactcacagctacatatgacattttatgagctgtttacggcatggaaagaaaatcagtgggaattaagaaagcctcgtcgtgaaagcacttaattttttacagttagcacttcaacatagctcttaacaacttccaggatattcacacaacacttaggcttaaaaatgagctcactcagaatttctattctttctaaaaagagatttatttttaaatcaatgggactctgatataaaggaagaataagtcactgtaaaacagaacttttaaatgaagcttaaattactcaatttaaaattttaaaatcctttaaaacaacttttcaattaatattatcacactattatcagattgtaattagatgcaaatgagagagcagtttagttgttgcatttttcggacactggaaacatttaaatgatcaggagggagtaacagaaagagcaaggctgtttttgaaaatcattacactttcactagaagcccaaacctcagcattctgcaatatgtaaccaacatgtcacaaacaagcagcatgtaacagactggcacatgtgccagctgaatttaaaatataatacttttaaaaagaaaattattacatcctttacattcagttaagatcaaacctcacaaagagaaatagaatgtttgaaaggctatcccaaaagacttttttgaatctgtcattcacataccctgtgaagacaatactatctacaattttttcaggattattaaaatcttcttctttcactatcgtagcttaaactctgtttggttttgtcatctgtaaatacttacctacatacactgcatgtagatgattaaatgagggcaggccctgtgctcatagctttacgatggagagatgccagtgacctcataataaagactgtgaactgcctggtgcagtgtccacatgacaaaggggcaggtagcaccctctctcacccatgctgtggttaaaatggtttctagcatatgtataatgctatagttaaaatactatttttcaaaatcatacagattagtacatttaacagctacctgtaaagcttattactaatttttgtattatttttgtaaatagccaatagaaaagtttgcttgacatggtgcttttctttcatctagaggcaaaactgctttttgagaccgtaagaacctcttagctttgtgcgttcctgcctaatttttatatcttctaagcaaagtgccttaggatagcttgggatgagatgtgtgtgaaagtatgtacaagagaaaacggaagagagaggaaatgaggtggggttggaggaaacccatggggacagattcccattcttagcctaacgttcgtcattgcctcgtcacatcaatgcaaaaggtcctgattttgttccagcaaaacacagtgcaatgttctcagagtgactttcgaaataaattgggcccaagagctttaactcggtcttaaaatatgcccaaatttttactttgtttttcttttaataggctgggccacatgttggaaataagctagtaatgttgttttctgtcaatattgaatgtgatggtacagtaaaccaaaacccaacaatgtggccagaaagaaagagcaataataattaattcacacaccatatggattctatttataaatcacccacaaacttgttctttaatttcatcccaatcactttttcagaggcctgttatcatagaagtcattttagactctcaattttaaattaattttgaatcactaatattttcacagtttattaatatatttaatttctatttaaattttagattatttttattaccatgtactgaatttttacatcctgataccctttccttctccatgtcagtatcatgttctctaattatcttgccaaattttgaaactacacacaaaaagcatacttgcattatttataataaaattgcattcagtggctttttaaaaaaatgtttgattcaaaactttaacatactgataagtaagaaacaattataatttctttacatactcaaaaccaagatagaaaaaggtgctatcgttcaacttcaaaacatgtttcctagtattaaggactttaatatagcaacagacaaaattattgttaacatggatgttacagctcaaaagatttataaaagattttaacctattttctcccttattatccactgctaatgtggatgtatgttcaaacaccttttagtattgatagcttacatatggccaaaggaatacagtttatagcaaaacatgggtatgctgtagctaactttataaaagtgtaatataacaatgtaaaaaattatatatctgggaggattttttggttgcctaaagtggctatagttactgattttttattatgtaagcaaaaccaataaaaatttaagtttttttaacaactaccttatttttcactgtacagacactaattcattaaatactaattgattgtttaaaagaaatataaatgtgacaagtggacattatttatgttaaatatacaattatcaagcaagtatgaagttattcaattaaaatgccacatttctggtctctgggaaaaaaaaaaaaaa

SEQ ID NO: 5249 - DNA, 1724 bp, Homo sapiens
cccgccccgcgcagcgctgggccagggacgcacccccaccgcgtcgtaggaaaattacctggtgtggggggtggggcggaaggcacctcctatactccgactccgcctgggccacccgcccctcaccctcggcctgacccagcctctccgtgcctcccctagccgcctcctcccagcagtcccccaggagcgagctgcgagatgccccaaatcggacccctccccagttggaaaaaaaacgactcctgacctttcccagcctcctcggtccgctgaggaacccgcagccccgggcctcgagcagactgctgggactgcggggcggccgggcgcggggccagaggcggggcggggcgggtcgggtcgggggcctttaagaggcgcggtcgccgggaccgacacagacgcggacagcgccgggactcgccgccccgggactcgcgcagcccgcagcgctccggctcctcctctcgcgaccgccctccgcagcgatggacggagacggtgacccagagagcgtgggccagcccgaggaggcaagcccggaggagcagccagaggaggcgagtgctgaggaggagcggccggaggaccagcaggaggaggaggcggcggccgccgccgcgtacctggacgagctgcccgagccgctgctgctgcgcgtgctggccgcactgccggccgccgagctggtgcaggcctgccgcctggtgtgcctgcgctggaaggagctggtggacggcgccccgctgtggctgctcaagtgccagcaggaggggctggtgcccgagggcggcgtggaggaggagcgcgaccactggcagcagttctacttcctgagcaagcggcgccgcaaccttctgcgtaacccgtgtggggaagaggacttggaaggctggtgtgacgtggagcatggtggggacggctggagggtggaggagctgcctggagacagtggggtggagttcacccacgatgagagcgtcaagaagtacttcgcctcctcctttgagtggtgtcgcaaagcacaggtcattgacctgcaggctgagggctactgggaggagctgctggacacgactcagccggccatcgtggtgaaggactggtactcgggccgcagcgacgctggttgcctctacgagctcaccgttaagctactgtccgagcacgagaacgtgctggctgagttcagcagcgggcaggtggcagtgccccaagacagtgacggcgggggctggatggagatctcccacaccttcaccgactacgggccgggcgtccgcttcgtccgcttcgagcacggggggcaggactccgtctactggaagggctggttcggggcccgggtgaccaacagcagcgtgtgggtagaaccctgagcgaccctgcctccactctcccccagctgcctggaggggcaaaggtcgagggtagataggccttaacttagtccatagcgtcctcaccttccccaagccacacatcctcctcccatcccttgctccgatcccagcccctgagcagggagagagaagttttgttggcataggtttgcttaggtagccggcttctagaatgtagatccgtgagggcgtgagcttggactggacccactgctgattccctgcacctagcacagtgcttgccacaaagtgggctctcaataaatattatttgtccaaggaaggaatgaatgaaaaaatggataaacaaaaaaaaaa

SEQ ID NO: 5250 - DNA, 1321 bp, Homo sapiens; identical to SEQ ID NO: 1557

SEQ ID NO: 5251 - DNA, 1667 bp, Homo sapiens; identical to SEQ ID NO: 729

SEQ ID NO: 5252 - DNA, 6326 bp, Homo sapiens
gggtgtgatgcgagcgtcacggtggggatgctgctggctgcgcggcgctgagggccagcgagagcgagagcccgcccggggcggaggacggactcatccggatctggctgcagcgtgggctcggagctcccccttcctctcggtctccctctcggcccccctttatttccttcttgctttgcgtctttaacacctctcgaccctgtcctccccccgccactggaagtcttcccgtctctaaatggaattagtggagcccggagcctctggtgtaacgcacagacatgatccatgggcgcagcgtgcttcacattgtagcaagtttaatcatcctccatttgtctggggcaaccaagaaaggaacagaaaagcaaaccacctcagaaacacagaagtcagtgcagtgtggaacttggacaaaacatgcagagggaggtatctttacctctcccaactatcccagcaagtatccccctgaccgggaatgcatctacatcatagaagccgctccaagacagtgcattgaactttactttgatgaaaagtactctattgaaccgtcttgggagtgcaaatttgatcatattgaagttcgagatggaccttttggcttttctccaataattggacgtttctgtggacaacaaaatccacctgtcataaaatccagtggaagatttctatggattaaattttttgctgatggagagctggaatctatgggattttcagctcgatacaatttcacacctgatcctgactttaaggaccttggagctttgaaaccattaccagcgtgtgagtttgagatgggcggttccgaaggaattgtggagtctatacaaattatgaaggaaggcaaagctactgctagcgaggctgttgattgcaagtggtacatccgagcacctccacggtccaagatttacttacgattcttggactatgagatgcagaattcaaatgagtgcaagaggaattttgtggctgtgtatgatggaagcagttccgtggaggatttgaaagctaagttctgtagcactgtggctaatgatgtcatgctacgcacgggtcttggggtgatccgcatgtgggcagatgagggcagtcgaaacagccgatttcagatgctcttcacatcctttcaagaacctccttgtgaaggcaacacattcttctgccatagtaacatgtgtattaataatactttggtctgcaatggactccagaactgtgtgtatccttgggatgaaaatcactgtaaagagaagaggaaaaccagcctgctggaccagctgaccaacaccagtgggactgtcattggcgtgacttcctgcatcgtgatcatcctcattatcatctctgtcatcgtacagatcaaacagcctcgtaaaaagtatgtccaaaggaaatcagactttgaccagacagttttccaggaggtatttgaacctcctcattatgagttatgcactctcagagggacaggagctacagctgactttgcagatgtggcagatgactttgaaaattaccataaactgcggaggtcatcttccaaatgcattcatgaccatcactgtggatcacagctgtccagcactaaaggcagccgcagtaacctcagcacaagagatgcttctatcttgacagagatgcccacacagccaggaaaacccctcatcccacccatgaacagaagaaatatccttgtcatgaaacacaactactcgcaagatgctgcagatgcctgtgacatagatgaaatcgaagaggtgccgaccaccagtcacaggctgtccagacacgataaagccgtccagcggttctgcctcattgggtctctaagcaaacatgaatctgaatacaacacaactagggtctagaaagaaaattcaagagaagaactatttatacaaacatggggactgtgaaaagaaaattctatagtgaattgtgaaaagtggacatatttctaaattcattccactgcctttatccaaacttaagaattacagacatttgttattccttcggcaagacatccccgctgcacactgatatgttcatttcgtaatttggttgctggccaccaagtgctccttagtttttaaatacattttgagattaactggaaacttgaagaagaaattagttcccgattaagactatcccaactttatttttattgtcagtttcacttttgtttctatgttgttttatgtctttgttatataattgtacattgtgtgatatgtgaaaaaaaaacacgaatttggatgaaccttgtgttacatgtacattgttttcattatatagacagcttgagaatagtgcgttcctgaatgattttgaacatgctacagtgaaaagtgacagtgtggaccatggaatcaccagctagaggttatggactatacacacctattattatattctgattaaatacaggaaaaagtaacaagtaaaattactagattgcaataaaaaaattcattttttggtctttcctgtatacccctgatttcctttttgttttatatcaaagaaagtactgagtttcagaaatcctttttgaagtcaggtattttaccattcatactctacagtagaaatgtttttgattaagcactcagcaatatgaccaaattgacagtttgagaaaataccctgcatgtcagtactggatatttgagttgggaaaatatcctttttgttagacacattgtgaaaagcatgcattgtcaaatactgttgttactcttccatttctttatgtcatatgcttgctacttacgactttttatataaatatatataaaatgtataataatttcctaatttgagttaagagaaatgttttcttccattagagtgattaaaaaactgactcacataaatacacattttatgtcaactctttccaccttttagggtacaggatgtccttcagtattgaggtttacttcccaaaatatttggcttctaaaagtttaggggaatattttcttcttttagaatagggaactctttttaaaactgctttaaaatcacaagcccttttatgaattaaaccaccattatgaattattcttattctcaggtacacataatacacctgaaagcttagtgattatgatgtgtttaacataaagtaaaatcctaaaatatattttactgctattaaattatatacacactctgtaaagtttgatttggtgagtggttattttttaaaatattcaatgtgtaatcttacaaaataaatttttaaaataagaattactatcagtatatatgcttcccaacattttcaaaactactgaattctccaggtttaaagaactctgtccttccactaacagagcagtctggtctactaaaatttggactttgcaattcaagcaggctttgcaaactagatgaattactgttatacttccctactaggaatacaatgtcatatatgttaaaaaataagcaaatagaaaataaatttttataatagaaaagtcaaagagttatcatagccattataaacactctatcttgaaaaaatgtcaagctacagaatcacttcaatgaatttgataaactagggaatcagaaaaggttttgaacatgacaaagattatttttcattgttatgctacatagttttatacacattgcttatgataaaatgtacccttttttatttggcttgactggtttatttattaccatggttccttttttgccctttaatttaaaattaatacaccaaagatttttttaaaggattaatcatatcttatattgctttctccatttagaaatcttcagaggactcctttccctttgaatgataatctcaaaagtatgatataactgtcaagattttttatttgtaacagcaataaaaatagtgaaataagttaggtgaacattttactattaatttgttctataactgtccggcatgtccgtcccctccagtttctcctgaatatacagaatgctgattccctgcttaaaaggtattttcaccagaaatctaccaatgggactttaaaaaaaaacactaaatgaagtataataataagaatgaatagctcacatatatttaacacacagcagcttcatgggaaaacaactgtattttaaatgaagaacaggcctcctcagtgataactctaaaatttctcaacaatgtacagacacagactaatcatgaaagaagataatgacgatgctgggcagtgtctggaggtagccttttctcctggcattcactctagatgctcaaacttgggagtgcagcgctctggcagagttgggagatgttctctggagggctctggcggtgcttatttatcagccagtattgaaatttgtcaatatatcaaaaacgatttagtagctatatcagaccttatcacctgaatgcagcctttggcccacattctaaaggtggtgacacacatagataaggaatgagatgtctcaagacttataagacatgttattttaataaatgattatattttttgataaagtgaattcaaatattaccaacccaagtgctttattgatttaacaagatgatttcaaataatgcattaagttagcctgctgtgttaatttcataaagctattctttttcattttattttttcaagttttcattcacttttcaaaataatggtagcatataatcacatgcaatgccaatgaatccccatattaagcttcgtacttctgtccaaatgtattgtagttgcctaatttcaaggttctaatttggaaatctgatttattttgtatgtttttatatacataccaattttaagcattatcttgcaaagtagacataggtggtgtttgatttgccataattaacttgaatttgattttgtaaccaaaatgtggctgtccacataattggagatcagtgtctttgggcttttaatggagaacaaatcacattgtggtgttgctggtttttctgtttcacatttacttttgctctagaagtatttccgtgagtctgatgactccataagttatgatcctcagtgttaagtaacttagacggttggcattactttaatattcacttaagcttctgtatcatttttttctgtatttttcccttaggaatttaattcgggtcttcctcaaattttacagctttaaaaaaattccatgaatgggttttcctcaacctcagaatatcataataaattacaagatatgaccccctggttcctattaccttgattaaagtggcggcaattaatttactgatgttttgtcagtgaaataaataatagcatcttatgaagtttgtgtatctctgatgaaaatgagtcatgtcagattccctctctgaagggaagttaaataaacaacatttttaaaattctttgaattctaaataaatatgctttgaaaagtgagttagggttttgtctaattgcactgaggcgagctagcttcggtgccatttttctctgtgcccttttccctccatggattcatttctatctattgcactctagcgtaaaggacccagccaagaaattgtaaaatagattcaacaacaaaataaacaggtcttgagttaattatcaatctctatgcacttaattaatatttcccaagcccatcttaaaggtgtaataaggtagaaaaataaaagtacactgttaaaatagccagaaatgtttttataaataatcctgctaaataaatctgaggccctttgttaatttacaattatgattcattttattaataaacttgtttgaattgtaccacaaatttaactgaattgtatcatcaaaataaataaaacagggtaataaaaataacaattagggtgactgatgtcagacactcatatcaactcatcattttcttgtagcctctgattctgtactttcttgtgtattattaaagaggtaaatgctctcttaaaatgcctctagttcctcagaggtaggaaaaataaactcaacctgctttggacttgtgtatttacttgggttggtttccagaatctccttattcctgaaacagtatgatcatgtagttaaactactcctttatatctgtaagtactgtgcagccaacatgttcttttttgtccccaacttctgccatctttccaacctctgaggcatgctattttatagtggtttgctctttgaaaaattgtttttgtgccctctcttaatagtcacagatactgacacaaaacttaaaaatgaccagaaaacaatgtataaattatttaaaataaaacattctttttatatcacattaaaaaaaaaaaaaaaaaa

SEQ ID NO: 5253 - DNA, 4542 bp, Homo sapiens; identical to SEQ ID NO: 662

SEQ ID NO: 5254 - DNA, 10640 bp, Homo sapiens; identical to SEQ ID NO: 581

SEQ ID NO: 5255 - DNA, 10668 bp, Homo sapiens
gaccacgcatggagaattttaccacccagagacacgcgagtggccctgtgcaagtttcaactgcgcggggggcggggaattccgcagacaggattctagaatttatgtcttgtgtggtaacatttcagccggtgggtggcggggattaggcgtgaagcggttcagcaggcagaggttctcggacgccctccggcgaagccacctgttgatgcttttgactttctgtccttgttcctcgtcccatctggagcatttccaattctggttttgcggagcagcaggtctgagcttgtccggcgagggtgggagttggtcccggcggagatccagtgggaagagccggcggctgcccgggcaactcccccactggaaaggattctgaaagaaatgaagtcagccctcagaaatgaagttgactgcctgctggctttctgttgactggcccggagctgtactgcaagacccttgtgagcttccctagtctaagagtaggatgtctgctgaagtcatccatcaggttgaagaagcacttgatacagatgagaaggagatgctgctctttttgtgccgggatgttgctatagatgtggttccacctaatgtcagggaccttctggatattttacgggaaagaggtaagctgtctgtcggggacttggctgaactgctctacagagtgaggcgatttgacctgctcaaacgtatcttgaagatggacagaaaagctgtggagacccacctgctcaggaaccctcaccttgtttcggactatagagtgctgatggcagagattggtgaggatttggataaatctgatgtgtcctcattaattttcctcatgaaggattacatgggccgaggcaagataagcaaggagaagagtttcttggaccttgtggttgagttggagaaactaaatctggttgccccagatcaactggatttattagaaaaatgcctaaagaacatccacagaatagacctgaagacaaaaatccagaagtacaagcagtctgttcaaggagcagggacaagttacaggaatgttctccaagcagcaatccaaaagagtctcaaggatccttcaaataacttcaggctccataatgggagaagtaaagaacaaagacttaaggaacagcttggcgctcaacaagaaccagtgaagaaatccattcaggaatcagaagcttttttgcctcagagcatacctgaagagagatacaagatgaagagcaagcccctaggaatctgcctgataatcgattgcattggcaatgagacagagcttcttcgagacaccttcacttccctgggctatgaagtccagaaattcttgcatctcagtatgcatggtatatcccagattcttggccaatttgcctgtatgcccgagcaccgagactacgacagctttgtgtgtgtcctggtgagccgaggaggctcccagagtgtgtatggtgtggatcagactcactcagggctccccctgcatcacatcaggaggatgttcatgggagattcatgcccttatctagcagggaagccaaagatgttttttattcagaactatgtggtgtcagagggccagctggaggacagcagcctcttggaggtggatgggccagcgatgaagaatgtggaattcaaggctcagaagcgagggctgtgcacagttcaccgagaagctgacttcttctggagcctgtgtactgcggacatgtccctgctggagcagtctcacagctcaccatccctgtacctgcagtgcctctcccagaaactgagacaagaaagaaaacgcccactcctggatcttcacattgaactcaatggctacatgtatgattggaacagcagagtttctgccaaggagaaatattatgtctggctgcagcacactctgagaaagaaacttatcctctcctacacataagaaaccaaaaggctgggcgtagtggctcacacctgtaatcccagcactttgggaggccaaggagggcagatcacttcaggtcaggagttcgagaccagcctggccaacatggtaaacgctgtccctagtaaaaatacaaaaattagctgggtgtgggtgtgggtacctgtattcccagttacttgggaggctgaggtgggaggatcttttgaacccaggagttcagggtcatagcatgctgtgattgtgcctacgaatagccactgcataccaacctgggcaatatagcaagatcccatctctttaaaaaaaaaaaaaaaggacaggaactatcttactcaatgtattagtcatgtttctctagagggacagaactaataggatacatgtatataaaaaggggagtttattaaggagtattgactcacatgatcacagggttaggtcccacaataggtcatctgcaagcaaggaagccaattcaagtcccaaagctgaagaacttggagtccaatgtttgagggcaggaagcattcagcatgagagaaagatggaggccagaagactacaccagtctagtctttccatgttttgcctgcttttattctggcagtgctggcagctgattagatggtgcccacccagattgaggatggtctgcctttcccagtccactgactcaaatgttaaatctcctttggcagcaccctcacagatgtacccgggaacactttgcatccttctattcaatcaagttgatactcagtattaaccatcacagtccatttgggcaactataccaaattaccatagaccaggtgacttaaacagcagttatttctcacagttccggaggctgggaaatccaacatctaagtggtagcatatctggtgtctggtaaggcatgcttccagatcttaccagatgtcagtcttttgatgttctcacatggcagaaaaagaggatgcaaactctcaagtatatctttaagggcacaaattccattcatgagggctctaccctcatcacctaattacctcccaaaggccccaccttctgatactgtcactttggggatactgtctcccctttgaattctggggggaatacaaacattcagtttgtaacaatagccttatgatttagaggttacttgttcattcacctagacctcaaattgcattttacagctagtcaagtatatctttctctgatttgatagtgtgacctaaaaggggaccattgtttgaaatatcattagagttgcttattattattattattattattattattattattattattattattgagacagagtttcattctgctgcccaggctggagtgcagtggcatcatcttggctcattgcaacctctgccttctgggttcaagcgattctcctgcctcagcctcccgagtagctgggattacaggctcctgccaccacacccggctaatttttgtatttttagtggagacagggtttccaccatgttggccagcgtggtcttgaactcctgacctcaggtgattcaccagcctcggcctcccaaagtgctgggattacaggtgtgagccactgcacctggcctattattatttttaaattttttttttttaattgatcattcttgggtgtttctcacagagggtgatttggcagggtcacaggacaatagtggagggaaggtcagcagataaacaagtgaacaaaggtctctggttttcctaggcagaggaccctgcggccttccgcagtgtttgtgtccctgggtacttgagattagggagtggtgatgactcttaaggagcatgctgccttcaagcatctgtttaacaaagcacatcttgcactgcccttaatccatttaaccctgagtggacacagcacatgtttcagagagcacagggttgggggtaaggtcatagatcaacagcatcctaaggcagaagaatttttcttagtacagaacaaaatgaagtctcccatgtctacttctttctacacagacacagcaacaatctgatttctctatcttttccccacctttcccccttttctattccacaaaaccgccatcgtcatcatggcctgttctcaatgagctgttgggtacacctcccagacggggtggcggctgggcagaggggctcctcacttcccagatggggcggccaggcggacgcgccccccacctccctcccggacgggatagctggccgggcgggggctgaccccccacctccctccccgacggggcggctggccgggcgggggctgacccccacgcctccctcccggacggggcggctgccaggcggaggggctcctcacttctcagacggggtggctgctgggcggagacgctcctcacttcccagacagggtggctgtcgggcggaggggctcctcacttctcagacggggcagctgcgggcggaggggctcctcacttctcagacggggtggccgggcagagaagctcctcacatcccagacgggggggcggggcagaggcgctccccacatctcagacgatgggcggccgggcagagacgctcctcacttcatcccagacggggtggcggccgggcagaagctgtaatctcggcaccctggggggccaaggcaggcggctgggaggcggaggccgtagccagctgagatcacaccactgcactccagcctgggcaacattgagcactgagtggacgagactctgcccgcaatcccggcacctcgggaggccgaggctggcagatcactcgcagtcaggagctggagaccagcccggccaacacagtgaaaccctgtctccaccaaaaaaatacgaaaaccagtcaggcgtggcggcgcccgcaatggcaggcacgcggcaggccgaggcgggagaatcaggcagggaggctgcagtgagccgagatggcagcagtacagtccagcttcggctcggcatcagagggagaccgtggggagagggagaagagagggagggggagagggctatttttaaaattttttaaaattgctgaacaggggtacctctgggcagtgtgtcagaataccactttttaaatattttatgatttatttatttttctatttcttgaggttttaactgatgtgtatctgtatgtctatttgtgtatattttgtcatgatcatgtaacagagtctgaaaagtgtcgaagagacagttttcaggaacaacaagcaattattcctactttccaagttattttgatgccatggtggctcatacctataatctgagtactttgggaggctgaggtggactgatcacttgagcccaggagtttgagaccagcctgggcaacatagcaagactccatctctacaaaaaaagacaaaatttagctgagcgtggtggcgtgttcctgtagtcccagctacttgggaggctgaagtgagtggatcccctgagcccagagaggtcaaggttgtgatgagctgtgatcacaccactgcacttcagcatgggagacagagtgagaccctgtttcagaaaaaataaataaataaaaccaccagcaccacaaacaacaacaaaaagttattttgtacttgttttgagcacaggactcctgagggtatctttgcatttaatattacataggggtgccagtgggaagtaatgtgtatgcttggcctcatgagctaaaaccctgtgttaattatgacagaaggaaagtgtgtgagagagatcttaactacctagcagctctagctgccatcttgaaccatgaagatacgggccacacgtaggggtagctgggtagtgagcagcaagaagccttgttggatgagggcacgaaggagcagaatcactggaatcactgtgtcagccctaattacctacctctggacttttatgtgaggggaaaaaaaattgacagtttatatttatctcaacctagttaacccaagtgatgcattgttatgagattaaaatgtttggaggccgggtgcggtggctcacgcctataatcccagccctttgggaggccaaggcgggcggatcacgaggtcaggagatcaagaccatcctggctaacatgtaaaaccccgtctctactaaaaatacaaaaaattagccaggcgttgtggcggtcgcctgtagtccctgctatttgggaggccgaggcaagagaacggcatgaacctgggaggtggagcttgcagcgagctgagatcttgccactgcactccagcctgggcgacagtgcgagactctgtctcaaaaataaataaataaataaataataaataaaatgtttggaatgttggcttcatccctgggatgcaaggctggttcaacatacgcaaatcaagaaacataattcatcacataaacagaactaaagacaaaaaccacatgattatctcaatagatacagaaaaggccttcaataaaattcaacgttgcttcatgttaaaaactctcaataaactaggtattgatggaaaatatctcaaaataataaccatttatgacaaacccacagccattatcatactgaatgggcaaaagctggaagcattccccttgaaaactggcacaagacagggatgccgtctcaccactcctatttaacatagtattggaagttctggccaagaaaatcaggcaagagaaacaaataaggggtattcaaataggaaaagaggaagtaaaactgtgtttgcagatgacatgatactatatctagaaaaccccattatctccacccaaaagttccttaagctgataagcaacttcagcaaagtctcaggatacaaaatcaatgtgcagaaatcacaagcattctatacaccaacaatacacaagcagagagccaaatcatgaatgaactcccattcacagttgctagaaagagaataaaatacctaggaatacagctaataagatgtgaaggatctcttcaaggagaactacaaaccactgctcaaggaaataagagaggacacaaatgaaaaaacattccattctcgtggataggaagaatcaatatcatgaaaatggccatactacccaaagtaatttataggttcattgctattcccattaaactactattgacattcttcacagaattagaaaaaaactactttaaaattcaaatggaaccaaaaaagagcccgtataaccaagacaacaataagcaaaaagaacaaagctggaagcatcacactacccaacttcaaagtatactgcaaggctacagtagccaaaatggcatggtactggtacaaaaacagacacatagaccaatggaacagaatagagaccagagaaagaagaccacacatctacagccatctgatcatcgacaaacctgacaaaaacaagcaatggggaaaagattccctatttaataaatggtgctgggaaaactggctagccatatgcagaaaattgaaactgaccccttccttacaccttatacaaaaattaactcaagattaaagacttaatgtaaaacctaaaactataaaaaccctagaagaaaatctatttaataccattcaagacataggcacaagcaaaggtttcatgacaaaaacatcaaaagcaattgcaacaaaagcaaaaattacaaatgggatctaattaaactaaagagctcctgcacagcaaaagaaactatcattagagtgaacaggcaacctacagaatgggagaacatttttgcaatctatccatctgacaaaggtctaatatccagaacctacaaggaacttaaaacaaatttacaaggaaaaaaacaaccccatcaaaaagtggacaaaggacatgaacagacacttctcaaaagaagacatttatgtggccaacaaacatataaaaaaaagctcaaccttactgatcattagagaaatgcaaaggagaaccacaatgagataccatctcatgccggtcagaatggtgattattaaaaagtcaaaaaacaacagatgctggcgaggctgtggagaagtaggaacacttttacattgttggtgggaatgtaaattagttcaaccgttgtggaagtgtgtgtggctattcctcaaagatctagaactagaaatactatttgtcccagcaatcccattactgggtatatacccaaaggaatataaaccattttattataaagatacatgcacatttttgttcattgcagcactcttcacaatagcaaagacacaatagcaaatgcccatcaaagatagactggataaagaaaatgtggtacatatacaccatggaatactgtgcagtgcagccattacagcttttggtgatacagtgaatcagatttttcattaattcttttaattggttattactgaacgtgaaaaagtaatgtttgtattgaaatcttgagtctggccatgtttctattttaaattcataaagaattctaacaagaggaattccaagaatgtcataaatggatgtttctccatggatgaaggaactgttttattcacttgctgataattcagcctaatccagtttgacatcatatagataagtagttgaattatggatttaaaatacatatcattttctaactccaaaggtaatacttatttaaatggttttgaaaatatagaaaggcacaatttctttttaaatctgttattctccaccaccactcaatctgtctatcatctatctctccattcattcttccatttgtttatatctgttaatctttgtatgtgttcatgtatagcttttacatgattggaatcataatgcatattccattttgaagtctgcttttttttacacaaaaatatgttgtgaatattttcctatattatgaaatatcattagctgagcttttagaattgactgcatgttttggtaccatttagatatagtttaagatacttagaagttatgtggctttgccactatggatgaatcttatttactcaatattaattacttacaaataacctcacctaaacactactcagccataaaaaggaatgaattaatgacattcacagcaacctggagactattactctaaaggaagtaactgaggaatggaaaaccaaacattgtatgttctcactcataagtgggagataagctatgaggatgcaaaggcataagaaggatacaatggactttggggacttaggggaaagggtgggaggggggtgaaggataaaagaatacaaattgggttcagtgtatactgctcaggtgatgggtgcaccagaatctcacaagtaaccacttaattacttacgcatgtaaccagataccacctgttccccaaacacctatggaaataattttgtttttttttttaaaaaaggaatgagatcatgtcctttgcagggacatggatgaagctggaagccattatcctcagcaaactaacagaggagcaggaaaccaaacaccacatgttctcacttgtaagcggaagctgaacaatgagaacacacggacacagggatgagatcaacacacactggggcctgatgcaggggccgtagcggggagagcatcaggataactagctaatgcatgtggggcttaatacctaggtgataggttgataggtgcagcaaaccaccatgggacacgtttacctatgtaacaaacccgcacatcctgcacttgtatccagaacttaaaatattttaaaaatctttagagaatacaaaaaaaaaaaaaaagattcttcaatgcatacacaataaaattgcagttcagtcaaacattggaagtctttctctgactgtctagttggtatcttcattttcagcttcttcaagatcccactccaaacactgttagctcagccaaattgaacagctcatatctcctacctctggatctttggttctggtgattgtatatttctggaccatctggaaccccagcatatcaccctaccccacatctccacatccccaaaatataaccatacttcaagggcagttcaaataccatctccttctatcctccatgaagtcagttatctcttccattggaattatcgccccctctcctgaacagtactatttcgtgtgaatctcctccaagccttcttttcattttatatctcatgctgtaattcttggaaagtatgctgtagctcaagtgcagaattctcatcagttttatctttatatctctcctaaacactttacctgatgaagagcctggcatacacataaatatatattgaatgaatcagtgatggattgaaaagagaaatgatggatctcctaaattttaacttttataaaatattttgatacattcatgaccttactttagcaagcaatgaacgtgatgtaaactattgttgatatagtttttatattggaagtgtaagtagtttgtggcatgggattgtgacatatcctaggtttcctcatcttctttttattgaaatgtaattcacaagccataaaatttgcccctttaaagtaaatgatgcagtggattttagtatatttacagagttgtgcaatcatcaccactatctaattccagaacatttccatctacctagaaactccataccagtgagctgccactctaatcctcctcttcccccagcctctagaaacaataatccattttctgtctctatgatttgcctgttctagatattttataaaaataaacatgtggcctttcgtgtctgacttccttcacttaaaaaaaaaaaaaaaaaa

SEQ ID NO: 5256 - DNA, 2907 bp, Homo sapiens; identical to SEQ ID NO: 1509

SEQ ID NO: 5257 - DNA, 3435 bp, Homo sapiens; identical to SEQ ID NO: 1932

SEQ ID NO: 5258 - DNA, 2161 bp, Homo sapiens; identical to SEQ ID NO: 593

SEQ ID NO: 5259 - DNA, 1944 bp, Homo sapiens; identical to SEQ ID NO: 730

SEQ ID NO: 5260 - DNA, 2279 bp, Homo sapiens; identical to SEQ ID NO: 708

SEQ ID NO: 5261 - DNA, 817 bp, Homo sapiens; identical to SEQ ID NO: 642

SEQ ID NO: 5262 - DNA, 4928 bp, Homo sapiens; identical to SEQ ID NO: 2402

SEQ ID NO: 5263 - DNA, 7447 bp, Homo sapiens; identical to SEQ ID NO: 2544

SEQ ID NO: 5264 - DNA, 2520 bp, Homo sapiens; identical to SEQ ID NO: 714

SEQ ID NO: 5265 - DNA, 5625 bp, Homo sapiens; identical to SEQ ID NO: 659

SEQ ID NO: 5266 - DNA, 6440 bp, Homo sapiens
gcagttcagacccccccacacccatcaaagagccgctcctcccccccgcaggcgccttcgccgcctccctcccttcctttcctttccgctcctcttccgacctgtccacccgggaggaagggagctggaaagggggcggaaacctctcccctccaaaaagcacaacaaaactgttcagtgcggaggagccgggttcgcccctgccggacagcggggggctttgttccccgcagttgtttcctgcccatttgacctgtcagctgctggggaaacgctgctgttgacctttggttgaactgctaaggcgattttgctgatttttctttctttttccgcgagggctgtcttttgctcctccaaatgagcccagtccccctcccttctccccaaagcgctccaagagaaagtgccaggaaggggcttgtcccggaaggcctggcggctgagcggggccaggtcctggttaggccaccagggtgggcgtccgcgccattgtttgagcttgtcggcgctggtgggagagatgagggcaattcctctgggacgcaagtcccctcgaatggccggggctggccgggatgttccccgcacggcgctgccctcgagtccccccgatggagagcgcgggcgcgccttccttcgctggcgtccaaacccgggaccagctagaacacagcagggctgggactgggttccagccccacgtggagtctggatttgttttgttgtgttttgctttccttcctggaagaaatcccgaggggaccgccctagagcggcagctccaggacctcggcccttgggcttccgggggtgcagccacttaggccccgctcccggggagagagggattattttttaagatttatccccagggcgcgcggcatttccctgtccctcgtgaatcccgttgagagtcctccctccccaacctcctccatttccccagccagaccgattcgagagccctggagattctgggcgaggctagtgactgggtagtacaggcctctagccccaccattgctctctctgtcttcagttccccaggagggcaatggcatcaaacagcacagctctgggggatgtcaatattgcataccttttctacctaaagggaaaatgactcgcttttctgcttgcaaatatggtagtttctgcttacaaatgtaatacaatgcccatgacagccaaggactggaagcataagttgctaggtcttacaggtgattttttacaatgaagcaaactcactatgttagacaccatttacattggatgtctccaactaacaaaagtaactaaagacagatgtaggtgtaaattgagagtgaaatttgaccctttagaccgtcacaacttccttgggcttatcctgggtgcttataggagaggtgggctccacccacaaaaatggactgctcagaaaaatgagggagagagaaagggtggccactttcccgagccaagaaattccttgaaaaaaaatcagaacatctgaaaccagagagccgatttccttaccgggaggcagttcctggctaacgaagaggaagcacgatgggaagaaaagttcactccaacggaagccagtttgctgaacatagcagatcgcccaggaggactgggagagactgcaaaccagttcgagcccccagcatggcgttaggtgtcagccagctggcaggaaggtccaggtgtctgtgttcagagtctcaaggcggctatgagaggttttcctccgagtacccagaattctgttctaaaaccaaggccctggcagccatcccacccccggttccccccagtgccacagagcccttggacctgggctgcagctcctgtgggaccccactacacgaccaggggggtcctgtggagatccttcccttcctctacctcggcagtgcctaccatgctgcccggagagacatgctggacgccctgggcatcacggctctgttgaatgtctcctcggactgcccaaaccactttgaaggacactatcagtacaagtgcatcccagtggaagataaccacaaggccgacatcagctcctggttcatggaagccatagagtacatcgatgccgtgaaggactgccgtgggcgcgtgctggtgcactgccaggcgggcatctcgcggtcggccaccatctgcctggcctacctgatgatgaagaaacgggtgaggctggaggaggccttcgagttcgttaagcagcgccgcagcatcatctcgcccaacttcagcttcatggggcagctgctgcagttcgagtcccaggtgctggccacgtcctgtgctgcggaggctgctagcccctcgggacccctgcgggagcggggcaagacccccgccacccccacctcgcagttcgtcttcagctttccggtctccgtgggcgtgcactcggcccccagcagcctgccctacctgcacagccccatcaccacctctcccagctgttagagccgccctgggggccccagaaccagagctggctcccagcaagggtaggacgggccgcatgcgggcagaaagttgggactgagcagctgggagcaggcgaccgagctccttccccatcatttctccttggccaacgacgaggccagccagaatggcaataaggactccgaatacataataaaagcaaacagaacactccaacttagagcaataacggctgccgcagcagccagggaagaccttggtttggtttatgtgtcagtttcacttttccgatagaaatttcttacctcatttttttaagcagtaaggcttgaagtgatgaaacccacagatcctagcaaatgtgcccaaccagctttactaaagggggaggaagggagggcaaagggatgagaagacaagtttcccagaagtgcctggttctgtgtacttgtccctttgttgtcgttgttgtagttaaaggaatttcattttttaaaagaaatcttcgaaggtgtggttttcatttctcagtcaccaacagatgaataattatgcttaataataaagtatttattaagactttcttcagagtatgaaagtacaaaaagtctagttacagtggatttagaatatatttatgttgatgtcaaacagctgagcaccgtagcatgcagatgtcaaggcagttaggaagtaaatggtgtcttgtagatatgtgcaaggtagcatgatgagcaacttgagtttgttgccactgagaagcaggcgggttgggtgggaggaggaagaaagggaagaattaggtttgaattgctttttaaaaaaaaaagaaaagaaaaagacagcatctcactatgttgccaaggctcatcttgagaagcaggcgggttgggtgggaggaggaagaaagggaagaattaggtttgaattgcttttttaaaaaaaaagaaaagaaaaaaaaagacagcatctcactatgttgccaaggctcatctcaagctcttgggctcaagagatcctcccacctcggcctcctgagtagctgggactgcaggtgtgtgtcatcatgaccaatgtgaattgcttttgaagctggttcatgggcatgtaggccaccgaagcaattttagaccacagtaagtcaagcttttttccctccgatgatcactgggtggttgcagcattttttgcataaacctgcctaagacttgtctatcgtctgtgatcaatatgccatattacactaaggtgctcctggaaaattgggtgcagttcaaattttcctacagcaaatcatttggcaaggccagccattggggaaaccagacaactagagataaccctgaaatgaatccttttgtaaattgaagcaccatcttttctttttttgcataaattggaggttttaattttagggcagttacctgaagtgaaatataccaacaatttcttgtgttctttaaattcctagttaggtgaatatttttgaaggtcctcttttgaataaagaggggaatggacaccacatttcaggtcttctcgaagtgtggaagggcaagagagcatcagtgagctgatggtggattgcttacatcggattccattggtatgaatttcccaaactggaaatcaaagcgccagggtggggttggggctgactgctggtgagggggctggccgctggctcccgtgacgtgcgtcatgggcacgcaggcgccattttgaatctatcgtcggcacgtgggtgccattttgaatccttagttgggcctttctaaatggagaatggctttggagggagacacgttttctgtggggagggtttgggggggagggaggagggaacaagctacatgctattttgtttgtagtattgtggaacagtcttgttatggagtgccagcttagaggttgttgcaaacttgtctagaagtgagagcatggttttttttagccctttgagagtctacatctaatgaacattcttgctcacccataaataacgtcaagcctcaatgtcaccgtcacgttgggatactctttctcatctggcatcctagacaggacaaggttggttacctttccttccatgaaccatgaacctgtgacggcatcattcatcctgacttcaccaagctccgcctgtgggtgaggccagagctcccactggcaatttttagaagagccagaggctccctgcttcctctagaaataacagttcagggtgaagcatggagggtttcagttcccagacaatggaaccatttagagacaacacagttggacatttccactttttccttgattcctggaagtccagtgggttctgcagctgaaaaagccctgggtcccagcagcagagagacaggacagaggggatgcttgggcggggagggacggtaacctgcagaacagattccatttttatagaacgagtacacgtttgctaaaacagtcctgctttcccagactggattcccaccacagggacagtcggaactcaggactagctccagcgacatctttcctccgaattcaagccttctatcacaatgtcaaaacagctatttataaagccattttcattgtacttgataacagcacgagtcccaaaacttttagaaataaaataggacattggcttgattgaaaagagggactttttaaaaattgttctttcgtcagaagccttttggatgacttacaatagctctgatgaagataccaccccagcgtcagtccaataggtcagtgagtttcaacaggcatccatccctcccatgaagggattctggtgatgggaagtttctgtaatgacaggaaagcattgaccctcattgattgtcaactttggtattagccatgaaagacaggatgctcattgggtgttctgtagagtgaggaatgctgcctattccctcccagaacgtctgacccaggggtgtgtgttgaggagccctgggggaaatggaccaagttttcccacagagcagtattaggctgaagagcaggtgactggtaggccccagctcccatcattccctcccaaagccattttgttcagttgctcatccacgctggattccagagagttttccaatttgggaagccatgagaaaggtttttaaatcttgggaagatggagagagggacataggatagttgactccaacatgacaggaagaggctggagattgggaattggccatcaaccaagcctgtagtagtaaagccatggtcccgcattggaattacttggggaacttatacagttctgatacccaggctctcctagaccagttcaaccaattctaggtgggggactcaggcatcagtgtgtttcgtagctccccgggtgttttccctgtgcagccgagcttgggaaactgccatgctttttggatgtcaaggcgctgttggaggctgggtgtgacagcacagagccaggttgtcttgtggaaaccacagccacgggtttgccactggctcagcatggcctcactgccagtcccagcctggctgagggacaagatggtttctcttgggagttcctgagtggagcacccttccaggctttttgaaagccagctgatctgtggagccttgttaagggactcaatacggtgtttggatattgatgtttttccttgagactgtcttgtccatcaataaagatggaggatgtctcctctttgaaccccgcttccccaccagtactctctctcccttagagtttatgagttattcaaggaggagacttcttaaagacagcaacgcaattcttgtaacttgtgtaaatagccccatctttcagagtgataccatttctacatttgataatgcctgtattcctgtaggatgtatatagtttaggggattttttttttgtttggttttgttttttagaagtcaatatgtctggttttatttattgcttgaaaaagatcatttgaaaaaaataaatacattttcaaccactaaaa

SEQ ID NO: 5267 - DNA, 3716 bp, Homo sapiens; identical to SEQ ID NO: 2538

SEQ ID NO: 5268 - DNA, 3713 bp, Homo sapiens
attcccatggcccgggctcaggcgtccaacctgctgccgcctgggccccgccgagcggagctagcgccgcgcgcagagcacacgctcgcgctccagctcccctcctgcgcggttcatgactgtgtcccctgaccgcagcctctgcgagcccccgccgcaggaccacggcccgctccccgccgccgcgagggccccgagcgaaggaaggaagggaggcgcgctgtgcgccccgcggagcccgcgaaccccgctcgctgccggctgcccagcctggctggcaccatgctgcccgcgcgctgcgcccgcctgctcacgccccacttgctgctggtgttggtgcagctgtcccctgctcgcggccaccgcaccacaggccccaggtttctaataagtgaccgtgacccacagtgcaacctccactgctccaggactcaacccaaacccatctgtgcctctgatggcaggtcctacgagtccatgtgtgagtaccagcgagccaagtgccgagacccgaccctgggcgtggtgcatcgaggtagatgcaaagatgctggccagagcaagtgtcgcctggagcgggctcaagccctggagcaagccaagaagcctcaggaagctgtgtttgtcccagagtgtggcgaggatggctcctttacccaggtgcagtgccatacttacactgggtactgctggtgtgtcaccccggatgggaagcccatcagtggctcttctgtgcagaataaaactcctgtatgttcaggttcagtcaccgacaagcccttgagccagggtaactcaggaaggaaagatgacgggtctaagccgacacccacgatggagacccagccggtgttcgatggagatgaaatcacagccccaactctatggattaaacacttggtgatcaaggactccaaactgaacaacaccaacataagaaattcagagaaagtctattcgtgtgaccaggagaggcagagtgccctggaagaggcccagcagaatccccgtgagggtattgtcatccctgaatgtgcccctgggggactctataagccagtgcaatgccaccagtccactggctactgctggtgtgtgctggtggacacagggcgcccgctgcctgggacctccacacgctacgtgatgcccagttgtgagagcgacgccagggccaagactacagaggcggatgaccccttcaaggacagggagctaccaggctgtccagaagggaagaaaatggagtttatcaccagcctactggatgctctcaccactgacatggttcaggccattaactcagcagcgcccactggaggtgggaggttctcagagccagaccccagccacaccctggaggagcgggtagtgcactggtatttcagccagctggacagcaatagcagcaacgacattaacaagcgggagatgaagcccttcaagcgctacgtgaagaagaaagccaagcccaagaaatgtgcccggcgtttcaccgactactgtgacctgaacaaagacaaggtcatttcactgcctgagctgaagggctgcctgggtgttagcaaagaaggacgcctcgtctaaggagcagaaaacccaagggcaggtggagagtccagggaggcaggatggatcaccagacacctaaccttcagcgttgcccatggccctgccacatcccgtgtaacataagtggtgcccaccatgtttgcacttttaataactcttacttgcgtgttttgtttttggtttcattttaaaacaccaatatctaataccacagtgggaaaaggaaagggaagaaagactttattctctctcttattgtaagtttttggatctgctactgacaacttttagagggttttgggggggtgggggagggtgttgttggggctgagaagaaagagatttatatgctgtatataaatatatatgtaaattgtatagttcttttgtacaggcattggcattgctgtttgtttatttctctccctctgcctgctgtgggtggtgggcactctggacacatagtccagctttctaaaatccaggactctatcctgggcctactaaacttctgtttggagactgacccttgtgtataaagacgggagtcctgcaattgtactgcggactccacgagttcttttctggtgggaggactatattgccccatgccattagttgtcaaaattgataagtcacttggctctcggccttgtccagggaggttgggctaaggagagatggaaactgccctgggagaggaagggagtccagatcccatgaatagcccacacaggtaccggctctcagagggtccgtgcattcctgctctccggacccccaaagggcccagcattggtgggtgcaccagtatcttagtgaccctcggagcaaattatccacaaaggatttgcattacgtcactcgaaacgttttcatccatgcttagcatctactctgtataacgcatgagaggggaggcaaagaagaaaaagacacacagaagggcctttaaaaaagtagatatttaatatctaagcaggggaggggacaggacagaaagcctgcactgaggggtgcggtgccaacagggaaactcttcacctccctgcaaacctaccagtgaggctcccagagacgcagctgtctcagtgccaggggcagattgggtgtgacctctccactcctccatctcctgctgttgtcctagtggctatcacaggcctgggtgggtgggttgggggaggtgtcagtcaccttgttggtaacactaaagttgttttgttggttttttaaaaacccaatactgaggttcttcctgttccctcaagttttcttatgggcttccaggctttaagctaattccagaagtaaaactgatcttgggtttcctattctgcctcccctagaagggcaggggtgataacccagctacagggaaatcccggcccagctttccacaggcatcacaggcatcttccgcggattctagggtgggctgcccagccttctggtctgaggcgcagctccctctgcccaggtgctgtgcctattcaagtggccttcaggcagagcagcaagtggcccttagcgccccttcccataagcagctgtggtggcagtgagggaggttgggtagccctggactggtcccctcctcagatcacccttgcaaatctggcctcatcttgtattccaacccgacatccctaaaagtacctccacccgttccgggtctggaaggcgttggcaccacaagcactgtccctgtgggaggagcacaaccttctcgggacaggatctgatggggtcttgggctaaaggaggtccctgctgtcctggagaaagtcctagaggttatctcaggaatgactggtggccctgccccaacgtggaaaggtgggaaggaagccttctcccattagccccaatgagagaactcaacgtgccggagctgagtgggccttgcacgagacactggccccactttcaggcctggaggaagcatgcacacatggagacggcgcctgcctgtagatgtttggatcttcgagatctccccaggcatcttgtctcccacaggatcgtgtgtgtaggtggtgttgtgtggttttcctttgtgaaggagagagggaaactatttgtagcttgttttataaaaaataaaaaatgggtaaatcttgaaaaaaaaaaaaaaaaaa

SEQ ID NO: 5269 - DNA, 4915 bp, Homo sapiens
acggaaacggtccggggctgagctgcagtcagatccggggatggagggagccggagaagaggagtgagaaggccggggaggcaggccctgctgtcttcctgcaggccggcagcctgctggcagtggaggaccaggccgtccaggaaaggaaggggtcaggaggtcgggcagggcctcagcaggttcagacaagtccccagaagggagctgcaggcgccctcgagtccaggccccaagcctggctccggttgtccaaagagggcctaggccaggcctctggtgcggaaactgagtcacagccagacctcagggcacggcctagacgcttacgagccaaagttaggggtagagagcagagacctccggggggtctcagggagtagggggcttcagggcctcccagtctagagccggattggcgagttagacgcttgtagatccaaggttggattggggtggggtctctgggacgttggatcgctacgcaaggattggggggattcaagtgcttagagatcgaagtctgccctgggtagggggagtcagacaattggaaagcctaggtagttatttggggaggggtctctacgccttggcgaagcgcacagctgcatctttttggcttgaggcctgaggccttgtcgagaagcttccgtgaaagggtgggccagccgggccacgagaaagaaagtgaataaatcaggaatataagtgggcggggggcccctgagaggggggtcgcaaagggtgagacatggccaccaggcgtttaaccgacgctttcttgttgttgcggaataattccatccaaaaccggcagctgttagccgagcaacttgctgatgaccgtatggcactggtgtcaggcatcagcttagatccagaagcagcgattggtgtgacaaaacggccacctcctaagtgggtggatggagtggatgaaattcagtatgatgttggccggattaagcagaagatgaaagaattggccagccttcatgacaagcatttaaacagacccaccctggatgacagcagcgaagaggaacatgccattgagataactacccaagagatcactcagctcttccacaggtgccagcgtgccgtgcaggccctgccgagccgggcccgggcctgctccgagcaggaggggcggctgcttgggaacgtggtggcctcgctggcgcaggccctgcaggaactctccaccagcttccggcacgcacagtcaggctacctcaaacgcatgaagaatcgagaggaaagatcccagcattttttcgacacatcagtaccactaatggatgatggagacgataacactctttaccatcggggttttacagaggaccagttagttctggtggagcagaacacactgatggtggaagagcgggaacgagagattcgccagattgtacagtccatttctgacctgaatgaaatattcagggacttaggggcgatgattgtagaacagggtacagtccttgacagaattgactataacgttgaacagtcctgtatcaaaactgaagatggtttgaaacagcttcacaaggcagaacagtatcaaaagaagaatcggaagatgcttgtgattttaatattatttgtcatcatcattgtgctcattgttgtcctcgttggcgtgaagtctcgataagtggcattgggttttcgtgtgtgccgcgcgtgtggatctcccgggtgtgaggggcttggcctgcgccccgccagctgcccgcagaggtgcagcctcgaggaatctgagggcgtcggggcagcgaacctttgcatccacggactcctccttccctagtcctgctcaagcggtccggggaatgggtttttgtttttccttcattgttgagaatttaaggacctttgatactgctgcacaatagagattgagttctgggatcagttataatatatattttttttagaaagagaaaatgagctgagagtttacaggcactgcagaagctgttcagtattatatgtgtatatgctatttttttagcagccatgtctgagcagaatgttaacataatttttggaaaaattttctttaaaccatctggtttttaagaaatttggtaccaaaaattgatgagtagaggcaaaaatgccccttcatctttctctatatattttccagttgaaaacaaactaagaagtcctttaagaatttataatccgttccccattaacttaatttagcttttccatcactgttaatgatcagagtaacaaagtgtgaaaaataagaaaccatcattgatgttaattaacacatttagatgggccagttaaaacagcttcataagttttaaattaattgtaaatggaatattcctcatttaaaatttttgcactgcattttctactgtaaaccaaaagaggttactaagcaaaaccacctaaatttaagttggtgatttaaatgaatctcacattaaaagaaagcttgacagtgttatgaaagccaccagactcagccagtgtgtccccatgggtatccccagccatccttgctcaatccattacttatatactaactacataatgacctgttcaaaccagactctatttaatgaactgtgaatttacacagaggccattttaaatgggtcaccccatttaggattagtggatctcaaattattaaccaaacatcactccatttcaaagtaaaatattccaccagcgatttgatttattggctcttccattgccactgagcaatgcccaggaagcaggcacattgccaaggactgggggcatcttgactaggaagctcctcgtttgtgtgagcgtgggtcagaccgccaaagtaggacttcatcgtttacctacctattatcaatatggtgcttgaatatattcctataactgtagaacagtgtggaaagtgatggtaactttgaagttgttcatgttttattggctttgttttaattgacactagtagagttttaatggtctttgtgtaaattttaatggcttttccattgtttttgcttctcttaaaaagtttaagaagaatatgacctcattaaatgtgctgttttatttggaccagtcacacaaaatgtctctctagagttgactttaaagttgtttacagaaatttaaactcaattccagagattgaagttgtccaaacagctcatgggcttagtgtccaaacccctgcccagccttccctttccaagttggtgccacctccaggtagccattggtggttttcctattactgatgtggctgtggaatgataaggtcctagaggggccctggcatttcaggaagcggacctggtattccctgacaaacattgcttaggaaagagggccggagaataagaagccagcacctcatcagtcagccctgcaatgtgagacttccgtagctgttgagagtcactgcaggtgttctttcatcccatctgattttaacccatggttgagacgttccaagttagatctgctgctcttaggtgtggggctgtccacattagggaacttgcctcaaaaacagtccacagtggcaataccggacttctgttcaagctttttaaagtgctgagccttacaaacccctgaaggaaggtgaccctttaagagaggatcatctttttttatatttattttcaccaaatagggtgatgagggttggtttttgttccctcaacccatttgggtaaaataacggatctgattagaaactgttttaaggaggggctgggctcggtggctcacgcctgtaatcccagactttgagaggccaaggcggtcacgaggtcaggagttcgagaccagcctagccaacatggtgaaaccccgtctctacaaaaaatacaaaaattagccgggtgggacacgcctgtaatcccagctactcaagaggctgaggcaggagaatagcttgaacccgggaggcagaggttgcagtgagccgagatcacaccactgcactccagcctgggtgacagagcgaggctccgtctcaaaaaaaaaaaaaaaaaattgttttagcgctgggtttcccaaggtgggagagacagacccagcctggagctggcccctggcctgtgtgctgacttcttggggtcctcaaaccactgtatttttctgttgagcctgtacttggggagagatcagtagcatttgaggaagtaagagaaaagaatcatggtacctcagggtttctttccctttactcgctggcagccattgtctgtgggcacctcatgtttttccacactctactgggccgtggaggtaacgatcacccaggccagtctcctctgcctgggatgcgccctctgagaggaggcctagcagggcaggctccctctgggcatccctggatgcagcctctggacacatgcctcctttaaagtgtccgggtgcagctcaggttgagtggaggtagaaggagaaacagacatgtttaccacgcgttttccaaagctcctgatctttcccaagattgtaactgaaaactgctgtctcttgttttgttcgttttgggggtggtggtgctggctgggccatgcttgtgaagtgatgtgtgtctctgatttaacggattcactgttttctctgctaattgagagagcgttatttacattatttatttgttttgacacaagtgctttcagtgttttatcctagctaatggcttcttaaaggtaataaaacccttccaacgtaattggtcagataaaactttttttcttgtatgcttaaataaagcaattagtgaagcacttctatccaaaatgacttttttgtccttttttaaaaccaatttactgttactggaaactttttgtacaataaagcaatcacgcagattaaagaacatcctgcaatcctagtattaattttaaaaaaaaaaaaa

SEQ ID NO: 5270 - DNA, 4978 bp, Homo sapiens; identical to SEQ ID NO: 2468

SEQ ID NO: 5271 - DNA, 4966 bp, Homo sapiens
acggaaacggtccggggctgagctgcagtcagatccggggatggagggagccggagaagaggagtgagaaggccggggaggcaggccctgctgtcttcctgcaggccggcagcctgctggcagtggaggaccaggccgtccaggaaaggaaggggtcaggaggtcgggcagggcctcagcaggttcagacaagtccccagaagggagctgcaggcgccctcgagtccaggccccaagcctggctccggttgtccaaagagggcctaggccaggcctctggtgcggaaactgagtcacagccagacctcagggcacggcctagacgcttacgagccaaagttaggggtagagagcagagacctccggggggtctcagggagtagggggcttcagggcctcccagtctagagccggattggcgagttagacgcttgtagatccaaggttggattggggtggggtctctgggacgttggatcgctacgcaaggattggggggattcaagtgcttagagatcgaagtctgccctgggtagggggagtcagacaattggaaagcctaggtagttatttggggaggggtctctacgccttggcgaagcgcacagctgcatctttttggcttgaggcctgaggccttgtcgagaagcttccgtgaaagggtgggccagccgggccacgagaaagaaagtgaataaatcaggaatataagtgggcggggggcccctgagaggggggtcgcaaagggtgagacatggccaccaggcgtttaaccgacgctttcttgttgttgcggaataattccatccaaaaccggcagctgttagccgagcaagtgagtagtcacatcacctccagccctctgcattcacgtagcattgctgcgcttgctgatgaccgtatggcactggtgtcaggcatcagcttagatccagaagcagcgattggtgtgacaaaacggccacctcctaagtgggtggatggagtggatgaaattcagtatgatgttggccggattaagcagaagatgaaagaattggccagccttcatgacaagcatttaaacagacccaccctggatgacagcagcgaagaggaacatgccattgagataactacccaagagatcactcagctcttccacaggtgccagcgtgccgtgcaggccctgccgagccgggcccgggcctgctccgagcaggaggggcggctgcttgggaacgtggtggcctcgctggcgcaggccctgcaggaactctccaccagcttccggcacgcacagtcaggctacctcaaacgcatgaagaatcgagaggaaagatcccagcattttttcgacacatcagtaccactaatggatgatggagacgataacactctttaccatcggggttttacagaggaccagttagttctggtggagcagaacacactgatggtggaagagcgggaacgagagattcgccagattgtacagtccatttctgacctgaatgaaatattcagggacttaggggcgatgattgtagaacagggtacagtccttgacagaattgactataacgttgaacagtcctgtatcaaaactgaagatggtttgaaacagcttcacaaggcagaacagtatcaaaagaagaatcggaagatgcttgtgattttaatattatttgtcatcatcattgtgctcattgttgtcctcgttggcgtgaagtctcgataagtggcattgggttttcgtgtgtgccgcgcgtgtggatctcccgggtgtgaggggcttggcctgcgccccgccagctgcccgcagaggtgcagcctcgaggaatctgagggcgtcggggcagcgaacctttgcatccacggactcctccttccctagtcctgctcaagcggtccggggaatgggtttttgtttttccttcattgttgagaatttaaggacctttgatactgctgcacaatagagattgagttctgggatcagttataatatatattttttttagaaagagaaaatgagctgagagtttacaggcactgcagaagctgttcagtattatatgtgtatatgctatttttttagcagccatgtctgagcagaatgttaacataatttttggaaaaattttctttaaaccatctggtttttaagaaatttggtaccaaaaattgatgagtagaggcaaaaatgccccttcatctttctctatatattttccagttgaaaacaaactaagaagtcctttaagaatttataatccgttccccattaacttaatttagcttttccatcactgttaatgatcagagtaacaaagtgtgaaaaataagaaaccatcattgatgttaattaacacatttagatgggccagttaaaacagcttcataagttttaaattaattgtaaatggaatattcctcatttaaaatttttgcactgcattttctactgtaaaccaaaagaggttactaagcaaaaccacctaaatttaagttggtgatttaaatgaatctcacattaaaagaaagcttgacagtgttatgaaagccaccagactcagccagtgtgtccccatgggtatccccagccatccttgctcaatccattacttatatactaactacataatgacctgttcaaaccagactctatttaatgaactgtgaatttacacagaggccattttaaatgggtcaccccatttaggattagtggatctcaaattattaaccaaacatcactccatttcaaagtaaaatattccaccagcgatttgatttattggctcttccattgccactgagcaatgcccaggaagcaggcacattgccaaggactgggggcatcttgactaggaagctcctcgtttgtgtgagcgtgggtcagaccgccaaagtaggacttcatcgtttacctacctattatcaatatggtgcttgaatatattcctataactgtagaacagtgtggaaagtgatggtaactttgaagttgttcatgttttattggctttgttttaattgacactagtagagttttaatggtctttgtgtaaattttaatggcttttccattgtttttgcttctcttaaaaagtttaagaagaatatgacctcattaaatgtgctgttttatttggaccagtcacacaaaatgtctctctagagttgactttaaagttgtttacagaaatttaaactcaattccagagattgaagttgtccaaacagctcatgggcttagtgtccaaacccctgcccagccttccctttccaagttggtgccacctccaggtagccattggtggttttcctattactgatgtggctgtggaatgataaggtcctagaggggccctggcatttcaggaagcggacctggtattccctgacaaacattgcttaggaaagagggccggagaataagaagccagcacctcatcagtcagccctgcaatgtgagacttccgtagctgttgagagtcactgcaggtgttctttcatcccatctgattttaacccatggttgagacgttccaagttagatctgctgctcttaggtgtggggctgtccacattagggaacttgcctcaaaaacagtccacagtggcaataccggacttctgttcaagctttttaaagtgctgagccttacaaacccctgaaggaaggtgaccctttaagagaggatcatctttttttatatttattttcaccaaatagggtgatgagggttggtttttgttccctcaacccatttgggtaaaataacggatctgattagaaactgttttaaggaggggctgggctcggtggctcacgcctgtaatcccagactttgagaggccaaggcggtcacgaggtcaggagttcgagaccagcctagccaacatggtgaaaccccgtctctacaaaaaatacaaaaattagccgggtgggacacgcctgtaatcccagctactcaagaggctgaggcaggagaatagcttgaacccgggaggcagaggttgcagtgagccgagatcacaccactgcactccagcctgggtgacagagcgaggctccgtctcaaaaaaaaaaaaaaaaaattgttttagcgctgggtttcccaaggtgggagagacagacccagcctggagctggcccctggcctgtgtgctgacttcttggggtcctcaaaccactgtatttttctgttgagcctgtacttggggagagatcagtagcatttgaggaagtaagagaaaagaatcatggtacctcagggtttctttccctttactcgctggcagccattgtctgtgggcacctcatgtttttccacactctactgggccgtggaggtaacgatcacccaggccagtctcctctgcctgggatgcgccctctgagaggaggcctagcagggcaggctccctctgggcatccctggatgcagcctctggacacatgcctcctttaaagtgtccgggtgcagctcaggttgagtggaggtagaaggagaaacagacatgtttaccacgcgttttccaaagctcctgatctttcccaagattgtaactgaaaactgctgtctcttgttttgttcgttttgggggtggtggtgctggctgggccatgcttgtgaagtgatgtgtgtctctgatttaacggattcactgttttctctgctaattgagagagcgttatttacattatttatttgttttgacacaagtgctttcagtgttttatcctagctaatggcttcttaaaggtaataaaacccttccaacgtaattggtcagataaaactttttttcttgtatgcttaaataaagcaattagtgaagcacttctatccaaaatgacttttttgtccttttttaaaaccaatttactgttactggaaactttttgtacaataaagcaatcacgcagattaaagaacatcctgcaatcctagtattaattttaaaaaaaaaaaaa

SEQ ID NO: 5272 - DNA, 4927 bp, Homo sapiens
acggaaacggtccggggctgagctgcagtcagatccggggatggagggagccggagaagaggagtgagaaggccggggaggcaggccctgctgtcttcctgcaggccggcagcctgctggcagtggaggaccaggccgtccaggaaaggaaggggtcaggaggtcgggcagggcctcagcaggttcagacaagtccccagaagggagctgcaggcgccctcgagtccaggccccaagcctggctccggttgtccaaagagggcctaggccaggcctctggtgcggaaactgagtcacagccagacctcagggcacggcctagacgcttacgagccaaagttaggggtagagagcagagacctccggggggtctcagggagtagggggcttcagggcctcccagtctagagccggattggcgagttagacgcttgtagatccaaggttggattggggtggggtctctgggacgttggatcgctacgcaaggattggggggattcaagtgcttagagatcgaagtctgccctgggtagggggagtcagacaattggaaagcctaggtagttatttggggaggggtctctacgccttggcgaagcgcacagctgcatctttttggcttgaggcctgaggccttgtcgagaagcttccgtgaaagggtgggccagccgggccacgagaaagaaagtgaataaatcaggaatataagtgggcggggggcccctgagaggggggtcgcaaagggtgagacatggccaccaggcgtttaaccgacgctttcttgttgttgcggaataattccatccaaaaccggcagctgttagccgagcaagagctggacgagcttgctgatgaccgtatggcactggtgtcaggcatcagcttagatccagaagcagcgattggtgtgacaaaacggccacctcctaagtgggtggatggagtggatgaaattcagtatgatgttggccggattaagcagaagatgaaagaattggccagccttcatgacaagcatttaaacagacccaccctggatgacagcagcgaagaggaacatgccattgagataactacccaagagatcactcagctcttccacaggtgccagcgtgccgtgcaggccctgccgagccgggcccgggcctgctccgagcaggaggggcggctgcttgggaacgtggtggcctcgctggcgcaggccctgcaggaactctccaccagcttccggcacgcacagtcaggctacctcaaacgcatgaagaatcgagaggaaagatcccagcattttttcgacacatcagtaccactaatggatgatggagacgataacactctttaccatcggggttttacagaggaccagttagttctggtggagcagaacacactgatggtggaagagcgggaacgagagattcgccagattgtacagtccatttctgacctgaatgaaatattcagggacttaggggcgatgattgtagaacagggtacagtccttgacagaattgactataacgttgaacagtcctgtatcaaaactgaagatggtttgaaacagcttcacaaggcagaacagtatcaaaagaagaatcggaagatgcttgtgattttaatattatttgtcatcatcattgtgctcattgttgtcctcgttggcgtgaagtctcgataagtggcattgggttttcgtgtgtgccgcgcgtgtggatctcccgggtgtgaggggcttggcctgcgccccgccagctgcccgcagaggtgcagcctcgaggaatctgagggcgtcggggcagcgaacctttgcatccacggactcctccttccctagtcctgctcaagcggtccggggaatgggtttttgtttttccttcattgttgagaatttaaggacctttgatactgctgcacaatagagattgagttctgggatcagttataatatatattttttttagaaagagaaaatgagctgagagtttacaggcactgcagaagctgttcagtattatatgtgtatatgctatttttttagcagccatgtctgagcagaatgttaacataatttttggaaaaattttctttaaaccatctggtttttaagaaatttggtaccaaaaattgatgagtagaggcaaaaatgccccttcatctttctctatatattttccagttgaaaacaaactaagaagtcctttaagaatttataatccgttccccattaacttaatttagcttttccatcactgttaatgatcagagtaacaaagtgtgaaaaataagaaaccatcattgatgttaattaacacatttagatgggccagttaaaacagcttcataagttttaaattaattgtaaatggaatattcctcatttaaaatttttgcactgcattttctactgtaaaccaaaagaggttactaagcaaaaccacctaaatttaagttggtgatttaaatgaatctcacattaaaagaaagcttgacagtgttatgaaagccaccagactcagccagtgtgtccccatgggtatccccagccatccttgctcaatccattacttatatactaactacataatgacctgttcaaaccagactctatttaatgaactgtgaatttacacagaggccattttaaatgggtcaccccatttaggattagtggatctcaaattattaaccaaacatcactccatttcaaagtaaaatattccaccagcgatttgatttattggctcttccattgccactgagcaatgcccaggaagcaggcacattgccaaggactgggggcatcttgactaggaagctcctcgtttgtgtgagcgtgggtcagaccgccaaagtaggacttcatcgtttacctacctattatcaatatggtgcttgaatatattcctataactgtagaacagtgtggaaagtgatggtaactttgaagttgttcatgttttattggctttgttttaattgacactagtagagttttaatggtctttgtgtaaattttaatggcttttccattgtttttgcttctcttaaaaagtttaagaagaatatgacctcattaaatgtgctgttttatttggaccagtcacacaaaatgtctctctagagttgactttaaagttgtttacagaaatttaaactcaattccagagattgaagttgtccaaacagctcatgggcttagtgtccaaacccctgcccagccttccctttccaagttggtgccacctccaggtagccattggtggttttcctattactgatgtggctgtggaatgataaggtcctagaggggccctggcatttcaggaagcggacctggtattccctgacaaacattgcttaggaaagagggccggagaataagaagccagcacctcatcagtcagccctgcaatgtgagacttccgtagctgttgagagtcactgcaggtgttctttcatcccatctgattttaacccatggttgagacgttccaagttagatctgctgctcttaggtgtggggctgtccacattagggaacttgcctcaaaaacagtccacagtggcaataccggacttctgttcaagctttttaaagtgctgagccttacaaacccctgaaggaaggtgaccctttaagagaggatcatctttttttatatttattttcaccaaatagggtgatgagggttggtttttgttccctcaacccatttgggtaaaataacggatctgattagaaactgttttaaggaggggctgggctcggtggctcacgcctgtaatcccagactttgagaggccaaggcggtcacgaggtcaggagttcgagaccagcctagccaacatggtgaaaccccgtctctacaaaaaatacaaaaattagccgggtgggacacgcctgtaatcccagctactcaagaggctgaggcaggagaatagcttgaacccgggaggcagaggttgcagtgagccgagatcacaccactgcactccagcctgggtgacagagcgaggctccgtctcaaaaaaaaaaaaaaaaaattgttttagcgctgggtttcccaaggtgggagagacagacccagcctggagctggcccctggcctgtgtgctgacttcttggggtcctcaaaccactgtatttttctgttgagcctgtacttggggagagatcagtagcatttgaggaagtaagagaaaagaatcatggtacctcagggtttctttccctttactcgctggcagccattgtctgtgggcacctcatgtttttccacactctactgggccgtggaggtaacgatcacccaggccagtctcctctgcctgggatgcgccctctgagaggaggcctagcagggcaggctccctctgggcatccctggatgcagcctctggacacatgcctcctttaaagtgtccgggtgcagctcaggttgagtggaggtagaaggagaaacagacatgtttaccacgcgttttccaaagctcctgatctttcccaagattgtaactgaaaactgctgtctcttgttttgttcgttttgggggtggtggtgctggctgggccatgcttgtgaagtgatgtgtgtctctgatttaacggattcactgttttctctgctaattgagagagcgttatttacattatttatttgttttgacacaagtgctttcagtgttttatcctagctaatggcttcttaaaggtaataaaacccttccaacgtaattggtcagataaaactttttttcttgtatgcttaaataaagcaattagtgaagcacttctatccaaaatgacttttttgtccttttttaaaaccaatttactgttactggaaactttttgtacaataaagcaatcacgcagattaaagaacatcctgcaatcctagtattaattttaaaaaaaaaaaaa

SEQ ID NO: 5273 - DNA, 1644 bp, Homo sapiens; identical to SEQ ID NO: 1991

SEQ ID NO: 5274 - DNA, 3920 bp, Homo sapiens; identical to SEQ ID NO: 609

SEQ ID NO: 5275 - DNA, 2287 bp, Homo sapiens
caatcatgctgaggagagatttccagtggttccccgcggggctcatattcacattccctaagaggacgttctggactctcgggcagagctttgtgagagaaacaaggctggcttcaagtgatctgcaaccagagtaattgggatttgacaaggactgtgaaaggctgactctccctgttctctttcatgctggcaccgggcagagtgtgggaactactgcctcaatacgatcatagaagccattgagatcccgcagtttatcggccgcagttacctgacgtatgacaacccagatatcttgaagagggtgtcaggatcaagatcaaatgtgttcatgaggtttaaaacaactgccaaggatggccttttgctgtggaggggagacagccccatgagacccaacagcgacttcatttccttgggccttcgggatggagccctcgtgttcagctataacctgggcagtggtgtggcatccatcatggtgaatggctccttcaacgatggtcggtggcaccgagttaaggccgttagggatggccagtcaggaaagataaccgtggatgactatggagccagaacaggcaaatccccaggcatgatgcggcagcttaacatcaatggagctctgtatgtgggtggaatgaaggaaattgctctgcacactaacaggcaatatatgagagggctcgtgggctgtatctctcacttcaccctgtccaccgattaccacatttccctcgtggaagatgccgtggatgggaaaaacatcaacacttgtggagccaagtaacaccagctggccttgtccaagggacagagccttctattctgagaatcccaggggccctcagaccctgcctgatgctatatgcagaggcccagggaccaggtgtgtttcctctcaccaagaagaaagtacacactgatgagaaactgagaaccaagacaggcatccctgggtggcctttcctgctgacactccacgagctgacccagcagaattctctgtgtaggaagcatcggactttgtccattgaatatgtagcggctgccagagatcacacatcaatgcaaattccagagcctgtctgctatagctcagtgactgtgttgtgattcatagtacattaaaaagagagagagagagaaagaatcccacagggcactattaaaatacttctctccttccctgactcatgacactcttcctgacagcagaatgactgtgtgaccttgaacttcacatttcccacattggcccttggattgttcggattaaccccttccactcctcactggctggttcactgtgttctgactagtccataaaaataaagatggaaggagatcaaacacagaatcataatcataatgcggcccccttccccagagcttacctcgaatgtgaaatccctacttcttataatgcagagttaaggagctgagcccccatgattttgtagctgtacttttgtatgtgtatatttttatagctgcagattgtccacacagtatacttttggaagtttgggtggatgactctgaattcttgcacacctttcctaaaaatttctcccaagagagacttgtttgggccttttgtggtgtcagtggaatggataggtaacttgggtgggcaacttggggagctgaccattctcttttggtaaatgttgacggctcaagaggatgaatatgaagctttccaagataagcagattaaaaggaacatgtgttaccgaggtaggtcactgtcatttttgttttaagagttggggggagtatctatagtaaacttgaataaaggggacaaagctagaacttattcattcattcattcacttatggagttgttactgattttgcggaggtcaggttcataccaatggacactaatacaatcagtgttcccaaggctgtgcaggggtggggggacatgctgtcaggatggtctgagcatctgggtgagaaccagagaaacaggacttcttccttctgtaccatgagctgtgtccctttactatgcaagcacatgaccccagagacagctggttcactggcagatccccatgatggacttactaagggaaaggtgagatgaacactgcccccaaggagggggtgaaatatgatctaacttatgcaagagcctataattagtcccagtctcgactctacatttgtttgtgcagcattcattcagcaaagacttttggggtttgtgcaaggcacagttttaagcacataatgtaattctaaaagatgaataaactagagaggttca

SEQ ID NO: 5276 - DNA, 4172 bp, Homo sapiens
agtgaatctgacaactgagacggctgcagaccatggggcagggagcatatggagcacggatatgccagacagagggatgattcatatcccaggcaggatggagcagggcagtgtgctatttcatcgtgctactcagaacttatgaattgtttatttctggaatttcccatttaatatttttggactgtggttgatcgagggtaaatgaaattgcagaaagcaaaaatacagataagggggactgcttgctgtacaaagatagagacaagaggaaggagctgtcctcaagggccttttgtgtgaagacatctggcacacagatacgctgcatgcaggtggcttgagagaacatgcatccaggccctgaggaggcgggaagtggccgctatggaccccgttatatcaccgacatgggagctggtgaggatgatgaaggatttgaagacgacttagatttggatatttcctttgaggaggttaaaccacttcctgctaccaaaggagggaataagaaatttttggtggaaagcaagaagatgtctatatctaacccaaagaccatttctaggctcatcccccctacctcagcatctctccctgtgaccacggtggctccccagcccattcccatacagagaaaggggaagaatggtgtggccataatgtcaaggctctttgacatgccttgtgatgaaactctctgctctgctgacagcttctgtgtcaatgactacacctgggggggctcgcgatgccagtgcaccctgggcaaaggtggtgagagctgctcagaagatattgttatccagtatcctcagttctttggccactcctatgtaacgtttgaacctctgaagaattcttatcaggcatttcaaattactcttgaatttagggcggaggcagaggatggcttactgctctactgtggggagaacgaacacgggaggggggatttcatgtccctggctatcatccgacgctccctgcagttcaggtttaattgtggaactggggttgccatcatcgtaagtgagaccaaaatcaaactagggggttggcacacggttatgctctacagagatgggctgaacgggctgctgcagctgaacaatggcaccccagtgacaggccagtctcagggccaatacagtaaaattactttccggacacctctctatcttggtggcgctcccagcgcttactggttggttagagcaacagggacaaaccgaggctttcaaggctgtgtgcagtcgctcgctgtgaatgggaggagaattgacatgaggccctggcccctgggaaaagcactcagtggggctgatgtgggggaatgcagcagtggaatctgtgatgaggcctcgtgcatccatggtggcacctgcacagcaatcaaagccgactcctacatttgcctctgtccccttgggtttaaaggtcgacactgtgaagatgctttcaccttgaccattcctcagttcagagagtctctgagatcttacgctgcaactccctggccactggagccccagcattacctttccttcatggaatttgagatcacatttcggccagactcaggagatggtgtcctcctgtacagctatgacacaggcagcaaagacttcctgtccatcaacttggcagggggccacgtggagttccgctttgactgtggctctgggaccggtgtcctcaggagtgaagatcccctcaccctgggcaactggcacgagcttcgtgtatctcgcacagcaaagaatggaatcttacaggtggataagcagaagatagtggagggaatggcagagggaggcttcacacagattaagtgcaacacagacattttcattggcggagtccccaattatgatgatgtgaagaagaactcgggtgtcctgaagcctttcagcgggagcatccagaagatcatcctgaatgaccgaaccatccatgtgaagcatgacttcacctccggagtgaatgtggagaatgcggcccacccctgtgtgagagccccttgtgcccatgggggcagctgccggcccaggaaggagggctatgactgtgactgccccttgggctttgaggggcttcactgccagaaagcgatcatagaagccattgagatcccgcagtttatcggccgcagttacctgacgtatgacaacccagatatcttgaagagggtgtcaggatcaagatcaaatgtgttcatgaggtttaaaacaactgccaaggatggccttttgctgtggaggggagacagccccatgagacccaacagcgacttcatttccttgggccttcgggatggagccctcgtgttcagctataacctgggcagtggtgtggcatccatcatggtgaatggctccttcaacgatggtcggtggcaccgagttaaggccgttagggatggccagtcaggaaagataaccgtggatgactatggagccagaacaggcaaatccccaggcatgatgcggcagcttaacatcaatggagctctgtatgtgggtggaatgaaggaaattgctctgcacactaacaggcaatatatgagagggctcgtgggctgtatctctcacttcaccctgtccaccgattaccacatttccctcgtggaagatgccgtggatgggaaaaacatcaacacttgtggagccaagtaacaccagctggccttgtccaagggacagagccttctattctgagaatcccaggggccctcagaccctgcctgatgctatatgcagaggcccagggaccaggtgtgtttcctctcaccaagaagaaagtacacactgatgagaaactgagaaccaagacaggcatccctgggtggcctttcctgctgacactccacgagctgacccagcagaattctctgtgtaggaagcatcggactttgtccattgaatatgtagcggctgccagagatcacacatcaatgcaaattccagagcctgtctgctatagctcagtgactgtgttgtgattcatagtacattaaaaagagagagagagagaaagaatcccacagggcactattaaaatacttctctccttccctgactcatgacactcttcctgacagcagaatgactgtgtgaccttgaacttcacatttcccacattggcccttggattgttcggattaaccccttccactcctcactggctggttcactgtgttctgactagtccataaaaataaagatggaaggagatcaaacacagaatcataatcataatgcggcccccttccccagagcttacctcgaatgtgaaatccctacttcttataatgcagagttaaggagctgagcccccatgattttgtagctgtacttttgtatgtgtatatttttatagctgcagattgtccacacagtatacttttggaagtttgggtggatgactctgaattcttgcacacctttcctaaaaatttctcccaagagagacttgtttgggccttttgtggtgtcagtggaatggataggtaacttgggtgggcaacttggggagctgaccattctcttttggtaaatgttgacggctcaagaggatgaatatgaagctttccaagataagcagattaaaaggaacatgtgttaccgaggtaggtcactgtcatttttgttttaagagttggggggagtatctatagtaaacttgaataaaggggacaaagctagaacttattcattcattcattcacttatggagttgttactgattttgcggaggtcaggttcataccaatggacactaatacaatcagtgttcccaaggctgtgcaggggtggggggacatgctgtcaggatggtctgagcatctgggtgagaaccagagaaacaggacttcttccttctgtaccatgagctgtgtccctttactatgcaagcacatgaccccagagacagctggttcactggcagatccccatgatggacttactaagggaaaggtgagatgaacactgcccccaaggagggggtgaaatatgatctaacttatgcaagagcctataattagtcccagtctcgactctacatttgtttgtgcagcattcattcagcaaagacttttggggtttgtgcaaggcacagttttaagcacataatgtaattctaaaagatgaataaactagagaggttca

SEQ ID NO: 5277 - DNA, 4870 bp, Homo sapiens; identical to SEQ ID NO: 586

SEQ ID NO: 5278 - DNA, 9657 bp, Homo sapiens; identical to SEQ ID NO: 665

SEQ ID NO: 5279 - DNA, 3590 bp, Homo sapiens
tttcgttgggtagaaacaggaagaacaagaaagcagtactataaacaggcaatggaggggcagcgtggggaacgagaaactctttgcctgtagggacccttctagctgcaaacttaaaaatgtatgtggcaagatgcaacccaagcaccgagcaggattccagacgagttataatcattctgaacggggagaggaaaggtaatgcaggtggtgaaggagcaggttatgagagcacttacaaccaagcctagctccctggaccagttcaagagcaaactgcagaacctgagctacactgagatcctgaaaatccgccagtccgagaggatgaaccaggaagatttccagtcccgcccgattttggaactaaaggagaagattcagccagaaatcttagagctgatcaaacagcaacgcctgaaccgccttgtggaagggacctgctttaggaaactcaatgcccggcggaggcaagacaagttttggtattgtcggctttcgccaaatcacaaagtcctgcattacggagacttagaagagagtcctcagggagaagtgccccacgattccttgcaggacaaactgccggtggcagatatcaaagccgtggtgacgggaaaggactgccctcatatgaaagagaaaggtgcccttaaacaaaacaaggaggtgcttgaactcgctttctccatcttgtatgactcaaactgccaactgaacttcatcgctcctgacaagcatgagtactgtatctggacggatggactgaatgcgctactcgggaaggacatgatgagcgacctgacgcggaatgacctggacaccctgctcagcatggaaatcaagctccgcctcctggacctggaaaacatccagatccctgacgcacctccgccgattcccaaggagcccagcaactatgacttcgtctatgactgtaactgaagtggccgggcccagacatgccccttccaaaactggaacacctagctaacaggagagaggaatgaaaacacacccacgccttggaaccgtcctttggtaaagggaagctgtgggtccacattcccttcagcatcacctctagccctggcaactttcagcccctagctggcatcttgctcaccgccctgattctgttcctcggctccactgcttcaggtcacttcccatggctgcagtccactggtgggacaagagcaaagcccactgccagtaagaaggccaaagggcccttccatcctagccctctgcaggcatgcccttccttcccttgggcaggaaagccagcagccccagactgcccaaaaacttgcccaccagaccaagggcagtgccccaaggcccctgtctggaggaaatggcctagctatttgatgagaagaccaaaccccacatcctcctttcccctctctctagaatcatctcgcaccaccagttacacttgaattaagatctgcgctcaaatctcctcccacctctctccctgcttttgccttgctctgttcctctttggtcccaagagcagcagccgcagcctcctcgtgatcctccctagcataaatttcccaaacagtccacaggtcccatgcccactttgcgtctgcactgtgatcgtgacaaatcttccctcctcaccagctagtctggggtttcctctccctgccccaggccagaactgccttcttcatttccacccacgctcccagcctcttagctgaaagcacaaatggtgaaatcagtagtctcgctccatctctaatagactaaacctaaatgcctctaggacggactgttgctatccaagcgtttggtgttaccttctcctgggaggtcctgctgcaactcaagttccacaggatggtcaagctgtcagacatccaagtttacatcattgtaattattactggtatttacaatttgcaagagttttgggttagtttttttttttttttttgctttgtttttgtacaaaagagtctaacattttttgccaaacagatatatatttaatgaaaagaagagatacataaatgtgtgaatttccagtttttttttaattattttaatcccaaacatcttcctgaaaataacattcccttaaacatgctgtggaataaaatggattgtgatgatttggggagctggtgttttgatttagtaacttaggttcttgctactcagtcatcagcatcacctgggagcttgttggagatgccagctcttcagctccaccctagacctgctgaattgggtgatgtttatgtacattggtttgaaaaacactgctgtgggaaaccctccaccattgctaggtcaccataggctctgagcatcagtggagaatgttacttctaagaagaccatctcgactcactgagaaaatcagacccactgtatgaaaatatctattccttttacattgctgtctcttgaccatgactttctcttttttctttcttaccatgatataatttatagaatgggtctaattaaagacatcacaactttgagggagcacatttagcaatgaaaagaatgcatacccacagacctgaaataagccagaactaaataaatctaaccgtgggttaataaattataggtcagagcccagcgaaggatgtttcttaagtcatttgcactggaggcattatcaggattgtaaactcccagcactgggagggatgtcagaagggtccaagcatgcagtattaagcgtggcacagcaccagccactctggcctcacagcacaagctgtggaagcatccaggtcatttctctttaccgtcatcaggatgtgcaattacagattgacctgggttgagatgatatggtccagagcactgcatgcattgcaggaaaaaagtcctttgcattcacaggggttccttcttcccatcagagcactcacacctgtgtcaagctgttaattccttgatcattaagcttcgatgttattaacatgtacttgctatcaggagcagttattaatctacccatcatcatgataaaacagtaagtgttaggtcaaaggcagcaaacaaagtcatattatttttttcttatgggttacaagatccaatccatgaaaaagggaactttctggaccaggatctctgaggtcctgagacactgggtttaagaaatgtatctgtcctgtgaccttggttggggagatccagcccctctctcttctggcactccagctttggtgcatttaatagaaagaaaccttttcaggactatgaaaggcagcattctccagctcctccctagaccctcctttggacctgtgagatctgaagagtatgccatctgtttccattcattttgtgaccatgtggggaaggattgttgcccatatttggccacctcaccttctctctccaggctgcccaaggctttttttcccatgcaatgagcctaccacctccaactcatctcctgttgcctgcagtttcctaagcctgggcaactcagccaaatccaaggcagaagtaaagtaggaagactgatgttgtcgtgaagtccaagttgcattctgctattcatattactcaaaataaaactgattacttaatttgaa

SEQ ID NO: 5280 - DNA, 5180 bp, Homo sapiens; identical to SEQ ID NO: 594

SEQ ID NO: 5281 - DNA, 2098 bp, Homo sapiens
ttgggaagggtttccagaaggtgggaaatgtcacctgattcacactgaacttttgaaagctccccacccccaaggagccgcgcacaccctcgctcgcggccgccctcccacagccccacacactgggagaccgcccaccgcaaaccgcggagacccccgtctagatttaaagcgcggctgcgcccggcttctgacgtccattgaatcgcgcgggcggccggcggcgagcgcggggctgcgccgggatcgctgcgccctccgccgctggcctctgcgacgcgcgccgctcgcccgagccacccgccgccgcgccggctccccgcgccgctgcgctcctcgccccgcgcctgcccccaggatggtccgcgcgaggcaccagccgggtgggctttgcctcctgctgctgctgctctgccagttcatggaggaccgcagtgcccaggctgggaactgctggctccgtcaagcgaagaacggccgctgccaggtcctgtacaagaccgaactgagcaaggaggagtgctgcagcaccggccggctgagcacctcgtggaccgaggaggacgtgaatgacaacacactcttcaagtggatgattttcaacgggggcgcccccaactgcatcccctgtaaagaaacgtgtgagaacgtggactgtggacctgggaaaaaatgccgaatgaacaagaagaacaaaccccgctgcgtctgcgccccggattgttccaacatcacctggaagggtccagtctgcgggctggatgggaaaacctaccgcaatgaatgtgcactcctaaaggcaagatgtaaagagcagccagaactggaagtccagtaccaaggcagatgtaaaaagacttgtcgggatgttttctgtccaggcagctccacatgtgtggtggaccagaccaataatgcctactgtgtgacctgtaatcggatttgcccagagcctgcttcctctgagcaatatctctgtgggaatgatggagtcacctactccagtgcctgccacctgagaaaggctacctgcctgctgggcagatctattggattagcctatgagggaaagtgtatcaaagcaaagtcctgtgaagatatccagtgcactggtgggaaaaaatgtttatgggatttcaaggttgggagaggccggtgttccctctgtgatgagctgtgccctgacagtaagtcggatgagcctgtctgtgccagtgacaatgccacttatgccagcgagtgtgccatgaaggaagctgcctgctcctcaggtgtgctactggaagtaaagcactccggatcttgcaactgaatctgcccgtaaaacctgagccattgattcttcagaactttctgcagtttttgacttcatagattatgctttaaaaaaatttttttaacttattgcataacagcagatgccaaaaacaaaaaaagcatctcactgcaagtcacataaaaatgcaacgctgtaatatggctgtatcagagggctttgaaaacatacactgagctgcttctgcgctgttgttgtccgtatttaaacaacagctcccctgtattcccccatctagccatttcggaagacaccgaggaagaggaggaagatgaagaccaggactacagctttcctatatcttctattctagagtggtaaactctctataagtgttcagtgttgacatagcctttgtgcaaaaaaaaaaaaaaaaaaaaagaaaaagaaaaaaagaaaaatatattgtccatactgtaaataagtgtatgcttatttatttggggggaaaactatacattaaaggacctttgtcctaaagctctctcccaggccaccttgttactcattggacacggagaggcattcattgtgaggtctactggatgaggcccatagttgagacttgtagacatttatttatactgtgtcatgttttataatttatacataaaatgtctggttgactgtataccttgtttttgaagaaatttattcgtgaaaggaagagcagttgttatttattgtgaggtctcttgcttgtaaagtaaaagctttttttccttgtaaaccatttaagtccattccttactattcactcac

SEQ ID NO: 5282 - DNA, 1834 bp, Homo sapiens; identical to SEQ ID NO: 1485

SEQ ID NO: 5283 - DNA, 2958 bp, Homo sapiens; identical to SEQ ID NO: 2488

SEQ ID NO: 5284 - DNA, 1959 bp, Homo sapiens
ctgaagagccggtgcagagcgggcggcggcggcggcggcagcggaggcggcggctccagccggcgcggcgcgaggctcggcggtgggatccggcgggcggtgctagctccgcgctccctgcctcgctcgctgccgggggcggtcggaaggcgcggcgcgaagcccgggtggcccgagggcgcgatggctgctcctgtcccgtgggcctgctgtgctgtgcttgccgccgccgccgcagttgtctacgcccagagacacagtccacaggaggcaccccatgtgcagtacgagcgcctgggctctgacgtgacactgccatgtgggacagcaaactgggatgctgcggtgacgtggcgggtaaatgggacagacctggcccctgacctgctcaacggctctcagctggtgctccatggcctggaactgggccacagtggcctctacgcctgcttccaccgtgactcctggcacctgcgccaccaagtcctgctgcatgtgggcttgccgccgcgggagcctgtgctcagctgccgctccaacacttaccccaagggcttctactgcagctggcatctgcccacccccacctacattcccaacaccttcaatgtgactgtgctgcatggctccaaaattatggtctgtgagaaggacccagccctcaagaaccgctgccacattcgctacatgcacctgttctccaccatcaagtacaaggtctccataagtgtcagcaatgccctgggccacaatgccacagctatcacctttgacgagttcaccattgtgaagcctgatcctccagaaaatgtggtagcccggccagtgcccagcaaccctcgccggctggaggtgacgtggcagaccccctcgacctggcctgaccctgagtcttttcctctcaagttctttctgcgctaccgacccctcatcctggaccagtggcagcatgtggagctgtccgacggcacagcacacaccatcacagatgcctacgccgggaaggagtacattatccaggtggcagccaaggacaatgagattgggacatggagtgactggagcgtagccgcccacgctacgccctggactgaggaaccgcgacacctcaccacggaggcccaggctgcggagaccacgaccagcaccaccagctccctggcacccccacctaccacgaagatctgtgaccctggggagctgggcagcggcgggggaccctcggcacccttcttggtcagcgtccccatcactctggccctggctgccgctgccgccactgccagcagtctcttgatctgagcccggcaccccatgaggacatgcagagcacctgcagaggagcaggaggccggagctgagcctgcagaccccggtttctattttgcacacgggcaggaggaccttttgcattctcttcagacacaatttgtggagaccccggcgggcccgggcctgccgccccccagccctgccgcaccaagctggccctccttcctccctcaggggaggtgggccatgcagctaacccacccaccaaagaccccctcaccctggccccttgggctggaccctccaatgccagcgactcccaggagcccttgggggacgtgaggggagcctctcacatccgatttctcctcctgccccagcctcctgtctatcccagggtctctgttgccaccatcagattataagctcctgatgctgggggggcccagccatccccctccccccagcacccacaattttcagtcccctcccctctgccctgttttgtatacccctcccctgaccctgctcctatcccacagtatttaatgccctgtcagtcccttctagtctgactcaatggtaacttgctgtatttgaattttttatagatgtatatacagggtggggggagtgggcggttctcattaaacgtcaccatttcatgagaaaaaaaaaaaaaaaaaa

SEQ ID NO: 5285 - DNA, 2070 bp, Homo sapiens; identical to SEQ ID NO: 2312

SEQ ID NO: 5286 - DNA, 5836 bp, Homo sapiens; identical to SEQ ID NO: 2448

SEQ ID NO: 5287 - DNA, 2583 bp, Homo sapiens; identical to SEQ ID NO: 1728

SEQ ID NO: 5288 - DNA, 4272 bp, Homo sapiens
gaagggagagagcaaacaaaggggtcaggagggaaaataatgcactggcttcctgagcccctgcagaggctgagcagggagagggggccagggccagaggggacagaggctggcggcagacgggccgggacaggcaggtcctaaatggcattgtttgaaggggccggctaattgcacagagcagtctgagcctgagaccccagccctggcctccccactctgtcctgggtgctggcgtctgagccttcgggacagcctgtccacatggaaccaagtcctgagcctccaagcttggaaagcatgaagggagacaccaggcatctcaatggagaggaggacgccggcgggagggaagactcgatcctcgtcaacggggcctgcagcgaccagtcctccgactcgcccccaatcctggaggctatccgcaccccggagatcagaggccgaagatcaagctcgcgactctccaagagggaggtgtccagtctgctaagctacacacaggacttgacaggcgatggcgacggggaagatggggatggctctgacaccccagtcatgccaaagctcttccgggaaaccaggactcgttcagaaagcccagctgtccgaactcgaaataacaacagtgtctccagccgggagaggcacaggccttccccacgttccacccgaggccggcagggccgcaaccatgtggacgagtcccccgtggagttcccggctaccaggtccctgagacggcgggcaacagcatcggcaggaacgccatggccgtcccctcccagctcttaccttaccatcgacctcacagacgacacagaggacacacatgggacgccccagagcagcagtaccccctacgcccgcctagcccaggacagccagcaggggggcatggagtccccgcaggtggaggcagacagtggagatggagacagttcagagtatcaggatgggaaggagtttggaataggggacctcgtgtggggaaagatcaagggcttctcctggtggcccgccatggtggtgtcttggaaggccacctccaagcgacaggctatgtctggcatgcggtgggtccagtggtttggcgatggcaagttctccgaggtctctgcagacaaactggtggcactggggctgttcagccagcactttaatttggccaccttcaataagctcgtctcctatcgaaaagccatgtaccatgctctggagaaagctagggtgcgagctggcaagaccttccccagcagccctggagactcattggaggaccagctgaagcccatgttggagtgggcccacgggggcttcaagcccactgggatcgagggcctcaaacccaacaacacgcaaccagagaacaagactcgaagacgcacagctgacgactcagccacctctgactactgccccgcacccaagcgcctcaagacaaattgctataacaacggcaaagaccgaggggatgaagatcagagccgagaacaaatggcttcagatgttgccaacaacaagagcagcctggaagatggctgtttgtcttgtggcaggaaaaaccccgtgtccttccaccctctctttgagggggggctctgtcagacatgccgggatcgcttccttgagctgttttacatgtatgatgacgatggctatcagtcttactgcactgtgtgctgcgagggccgagagctgctgctttgcagcaacacgagctgctgccggtgtttctgtgtggagtgcctggaggtgctggtgggcacaggcacagcggccgaggccaagcttcaggagccctggagctgttacatgtgtctcccgcagcgctgtcatggcgtcctgcggcgccggaaggactggaacgtgcgcctgcaggccttcttcaccagtgacacggggcttgaatatgaagcccccaagctgtaccctgccattcccgcagcccgaaggcggcccattcgagtcctgtcattgtttgatggcatcgcgacaggctacctagtcctcaaagagttgggcataaaggtaggaaagtacgtcgcttctgaagtgtgtgaggagtccattgctgttggaaccgtgaagcacgaggggaatatcaaatacgtgaacgacgtgaggaacatcacaaagaaaaatattgaagaatggggcccatttgacttggtgattggcggaagcccatgcaacgatctctcaaatgtgaatccagccaggaaaggcctgtatgagggtacaggccggctcttcttcgaattttaccacctgctgaattactcacgccccaaggagggtgatgaccggccgttcttctggatgtttgagaatgttgtagccatgaaggttggcgacaagagggacatctcacggttcctggagtgtaatccagtgatgattgatgccatcaaagtttctgctgctcacagggcccgatacttctggggcaacctacccgggatgaacaggcccgtgatagcatcaaagaatgataaactcgagctgcaggactgcttggaatacaataggatagccaagttaaagaaagtacagacaataaccaccaagtcgaactcgatcaaacaggggaaaaaccaacttttccctgttgtcatgaatggcaaagaagatgttttgtggtgcactgagctcgaaaggatctttggctttcctgtgcactacacagacgtgtccaacatgggccgtggtgcccgccagaagctgctgggaaggtcctggagcgtgcctgtcatccgacacctcttcgcccctctgaaggactactttgcatgtgaatagttccagccaggccccaagcccactggggtgtgtggcagagccaggacccaggaggtgtgattcctgaaggcatccccaggccctgctcttcctcagctgtgtgggtcataccgtgtacctcagttccctcttgctcagtgggggcagagccacctgactcttgcaggggtagcctgaggtgccgcctccttgtgcacaaatcagacctggctgcttggagcagcctaacacggtgctcattttttcttctcctaaaactttaaaacttgaagtaggtagcaacgtggctttttttttttcccttcctgggtctaccactcagagaaacaatggctaagataccaaaaccacagtgccgacagctctccaatactcaggttaatgctgaaaaatcatccaagacagttattgcaagagtttaatttttgaaaactggctactgctctgtgtttacagacgtgtgcagttgtaggcatgtagctacaggacatttttaagggcccaggatcgttttttcccagggcaagcagaagagaaaatgttgtatatgtcttttacccggcacattccccttgcctaaatacaagggctggagtctgcacgggacctattagagtattttccacaatgatgatgatttcagcagggatgacgtcatcatcacattcagggctattttttcccccacaaacccaagggcaggggccactcttagctaaatccctccccgtgactgcaatagaaccctctggggagctcaggaaggggtgtgctgagttctataatataagctgccatatattttgtagacaagtatggctcctccatatctccctcttccctaggagaggagtgtgaagcaaggagcttagataagacaccccctcaaacccattccctctccaggagacctaccctccacaggcacaggtccccagatgagaagtctgctaccctcatttctcatctttttactaaactcagaggcagtgacagcagtcagggacagacatacatttctcataccttccccacatctgagagatgacagggaaaactgcaaagctcggtgctccctttggagattttttaatccttttttattccataagaagtcgtttttagggagaacgggaattcagacaagctgcatttcagaaatgctgtcataatggtttttaacaccttttactcttcttactggtgctattttgtagaataaggaacaacgttgacaagttttgtggggctttttatacactttttaaaatctcaaacttctatttttatgtttaacgttttcattaaaattttttttgtaactggagccacgacgtaacaaatatggggaaaaaactgtgccttgtttcaacagtttttgctaatttttaggctgaaagatgacggatgcctagagtttaccttatgtttaattaaaatcagtatttgtctaaaaaaaaaaaaaaaaaa

SEQ ID NO: 5289 - DNA, 7394 bp, Homo sapiens; identical to SEQ ID NO: 573

SEQ ID NO: 5290 - DNA, 4633 bp, Homo sapiens; identical to SEQ ID NO: 611

SEQ ID NO: 5291 - DNA, 2299 bp, Homo sapiens
gttttcctgttttccatttcagtccccgttaccctctgctttttctgctcctcagagtcaacagctgttgcagcatgagcgatacgcttggttctcctaactagcaccttcccctctcccctgactcagctggtagcccctcctccccgcacctgcccaaaggtcactggacaggcatttgtctggccttcccttttactgctggctgggaaggaggagcatcagaccacagatcctggaaggcacttctctccctgactgctgctcacactgccgtgagaacctgcttatatccaggaccaaggaggcaatgccaggaagctggtgaagggtttcctctcctccaccatggttgacagcactgagtatgaagtggcctcccagcctgaggtggaaacctcccctttgggtgatggggccagcccagggccggagcaggtgaagctgaagaaggagatctcactgcttaacggcgtgtgcctgattgtggggaacatgatcggctcgggcatctttgtttcccccaagggtgtgctcatatacagtgcctcctttggtctctctctggtcatctgggctgtcgggggcctcttctccgtctttggggccctttgttatgcggaactgggcaccaccattaagaaatctggggccagctatgcctatatcctggaggcctttggaggattccttgctttcatcagactctggacctccctgctcatcattgagcccaccagccaggccatcattgccatcacctttgccaactacatggtacagcctctcttcccgagctgcttcgccccttatgctgccagccgcctgctggctgctgcctgcatttgtctcttaaccttcattaactgtgcctatgtcaaatggggaaccctggtacaagatattttcacctatgctaaagtattggcactgatcgcggtcatcgttgcaggcattgttagacttggccagggagcctctactcattttgagaattcctttgagggttcatcatttgcagtgggtgacattgccctggcactgtactcagctctgttctcctactcaggctgggacaccctcaactatgtcactgaagagatcaagaatcctgagaggaacctgcccctctccattggcatctccatgcccattgtcaccatcatctatatcttgaccaatgtggcctattatactgtgctagacatgagagacatcttggccagtgatgctgttgctgtgacttttgcagatcagatatttggaatatttaactggataattccactgtcagttgcattatcctgttttggtggcctcaatgcctccattgtggctgcttctaggcttttctttgtgggctcaagagaaggccatctccctgatgccatctgcatgatccatgttgagcggttcacaccagtgccttctctgctcttcaatggtatcatggcattgatctacttgtgcgtggaagacatcttccagctcattaactactacagcttcagctactggttctttgtggggctttctattgtgggtcagctttatctgcgctggaaggagcctgatcgacctcgtcccctcaagctcagcgttttcttcccgattgtcttctgcctctgcaccatcttcctggtggctgttccactttacagtgatactatcaactccctcatcggcattgccattgccctctcaggcctgcccttttacttcctcatcatcagagtgccagaacataagcgaccgctttacctccgaaggatcgtggggtctgccacaaggtacctccaggtcctgtgtatgtcagttgctgcagaaatggatttggaagatggaggagagatgcccaagcaacgggatcccaaatctaactaaacaccatctggaatcctgatgtggaaagcaggggtttctggtctactggctagagctaaggaagttgaaaaggaaagctcacttctttggaggcacctgtccagaagcctggcctaggcagcttcaacctttgaacttactttttgaaatgaaaagtaatttatttgttttgctacatactgttccagacttttaaaggggacaatgaaggtgactgtggggaggagcatgtcaggtttgggcttggttgttttagaagcacctgggtgtgcctacctactcctcttttcttttaaaagggcccacaatgctccaatttcctgtctcctttagagagacatgaaactatcacaggtgctggatgacaataaaagtttatgttcctaaaaaaaaaaaaaaaaaaaaaaaaaaaaaa

SEQ ID NO: 5292 - DNA, 2193 bp, Homo sapiens; identical to SEQ ID NO: 137

SEQ ID NO: 5293 - DNA, 8605 bp, Homo sapiens; identical to SEQ ID NO: 1907

SEQ ID NO: 5294 - DNA, 1160 bp, Homo sapiens
ggagttcctggggccagagacatctccaagggaaggtcaagggcctggaggatgtgcggacctgacgacagatgccccgcacgctggccgggaccgggaagggcggtcaagtgtggaaagggtctggcggctgccaggcctggcagagtggagcggggcggggcgcagcggggcggggcgggcctggagctgcacccgcttctgggtggacgcacttggcgagcggcgcgggatgcagacggctgcgaggcgctgggcacaggttgccaggacaaccgtgaggctgcataaaaagaacctatgacaggatgcacatgagagagacaagtggcttcacattgaagaaggggaggagtgcgccattggttttccatcctccagatgcactgattgctgtcccctttgacgatgatgacaagattgttgggggctacacctgtgaggagaattctctcccctaccaggtgtccctgaattctggctcccacttctgcggtggctccctcatcagcgaacagtgggtggtatcagcagctcactgctacaagacccgcatccaggtgagactgggagagcacaacatcaaagtcctggaggggaatgagcagttcatcaatgcggccaagatcatccgccaccctaaatacaacagggacactctggacaatgacatcatgctgatcaaactctcctcacctgccgtcatcaatgcccgcgtgtccaccatctctctgcccaccgcccctccagctgctggcactgagtgcctcatctccggctggggcaacactctgagctttggtgctgactacccagacgagctgaagtgcctggatgctccggtgctgacccaggctgagtgtaaagcctcctaccctggaaagattaccaacagcatgttctgtgtgggcttccttgagggaggcaaggattcctgccagcgtgactctggtggccctgtggtctgcaacggacagctccaaggagttgtctcctggggccatggctgtgcctggaagaacaggcctggagtctacaccaaggtctacaactatgtggactggattaaggacaccatcgctgccaacagctaaagcccccggtccctctgcagtctctataccaataaagtggccctgctctcaaaaaaaaaaaaaaaa

SEQ ID NO: 5295 - DNA, 1506 bp, Homo sapiens
ctgcctggggagcccccccgccccacatcctgccccgcaaaaggcagcttcaccaaagtggggtatttccagcctttgtagctttcacttccacatctaccaagtgggcggagtggccttctgtggacgaatcagattcctctccagcaccgactttaagaggcgagccggggggtcagggtcccagatgcacaggaggagaagcaggagctgtcgggaagatcagaagccagtcatggatgaccagcgcgaccttatctccaacaatgagcaactgcccatgctgggccggcgccctggggccccggagagcaagtgcagccgcggagccctgtacacaggcttttccatcctggtgactctgctcctcgctggccaggccaccaccgcctacttcctgtaccagcagcagggccggctggacaaactgacagtcacctcccagaacctgcagctggagaacctgcgcatgaagcttcccaagcctcccaagcctgtgagcaagatgcgcatggccaccccgctgctgatgcaggcgctgcccatgggagccctgccccaggggcccatgcagaatgccaccaagtatggcaacatgacagaggaccatgtgatgcacctgctccagaatgctgaccccctgaaggtgtacccgccactgaaggggagcttcccggagaacctgagacaccttaagaacaccatggagaccatagactggaaggtctttgagagctggatgcaccattggctcctgtttgaaatgagcaggcactccttggagcaaaagcccactgacgctccaccgaaagagtcactggaactggaggacccgtcttctgggctgggtgtgaccaagcaggatctgggcccagtccccatgtgagagcagcagaggcggtcttcaacatcctgccagccccacacagctacagctttcttgctcccttcagcccccagcccctcccccatctcccaccctgtacctcatcccatgagaccctggtgcctggctctttcgtcacccttggacaagacaaaccaagtcggaacagcagataacaatgcagcaaggccctgctgcccaatctccatctgtcaacaggggcgtgaggtcccaggaagtggccaaaagctagacagatccccgttcctgacatcacagcagcctccaacacaaggctccaagacctaggctcatggacgagatgggaaggcacagggagaagggataaccctacacccagaccccaggctggacatgctgactgtcctctcccctccagcctttggccttggcttttctagcctatttacctgcaggctgagccactctcttccctttccccagcatcactccccaaggaagagccaatgttttccacccataatcctttctgccgacccctagttccctctgctcagccaagcttgttatcagctttcagggccatggttcacattagaataaaaggtagtaattagaacaaaaaaaaaaaaaaaaaa

SEQ ID NO: 5296 - DNA, 1698 bp, Homo sapiens; identical to SEQ ID NO: 2335

SEQ ID NO: 5297 - DNA, 1322 bp, Homo sapiens
ctgcctggggagcccccccgccccacatcctgccccgcaaaaggcagcttcaccaaagtggggtatttccagcctttgtagctttcacttccacatctaccaagtgggcggagtggccttctgtggacgaatcagattcctctccagcaccgactttaagaggcgagccggggggtcagggtcccagatgcacaggaggagaagcaggagctgtcgggaagatcagaagccagtcatggatgaccagcgcgaccttatctccaacaatgagcaactgcccatgctgggccggcgccctggggccccggagagcaagtgcagccgcggagccctgtacacaggcttttccatcctggtgactctgctcctcgctggccaggccaccaccgcctacttcctgtaccagcagcagggccggctggacaaactgacagtcacctcccagaacctgcagctggagaacctgcgcatgaagcttcccaagcctcccaagcctgtgagcaagatgcgcatggccaccccgctgctgatgcaggcgctgcccatgggagccctgccccaggggcccatgcagaatgccaccaagtatggcaacatgacagaggaccatgtgatgcacctgctccagagtcactggaactggaggacccgtcttctgggctgggtgtgaccaagcaggatctgggcccagtccccatgtgagagcagcagaggcggtcttcaacatcctgccagccccacacagctacagctttcttgctcccttcagcccccagcccctcccccatctcccaccctgtacctcatcccatgagaccctggtgcctggctctttcgtcacccttggacaagacaaaccaagtcggaacagcagataacaatgcagcaaggccctgctgcccaatctccatctgtcaacaggggcgtgaggtcccaggaagtggccaaaagctagacagatccccgttcctgacatcacagcagcctccaacacaaggctccaagacctaggctcatggacgagatgggaaggcacagggagaagggataaccctacacccagaccccaggctggacatgctgactgtcctctcccctccagcctttggccttggcttttctagcctatttacctgcaggctgagccactctcttccctttccccagcatcactccccaaggaagagccaatgttttccacccataatcctttctgccgacccctagttccctctgctcagccaagcttgttatcagctttcagggccatggttcacattagaataaaaggtagtaattagaacaaaaaaaaaaaaaaaaaa

SEQ ID NO: 5298 - DNA, 9805 bp, Homo sapiens; identical to SEQ ID NO: 1586

SEQ ID NO: 5299 - DNA, 2840 bp, Homo sapiens; identical to SEQ ID NO: 1983

SEQ ID NO: 5300 - DNA, 7319 bp, Homo sapiens; identical to SEQ ID NO: 2532

SEQ ID NO: 5301 - DNA, 9685 bp, Homo sapiens; identical to SEQ ID NO: 2395

SEQ ID NO: 5302 - DNA, 8171 bp, Homo sapiens
gaggcaggggtgagaccggcggccacccgtgagccctccgcacccgcaccatgcagaagagcgtgcgctacaacgaggggcacgccctgtacctggcctttctggcgcgcaaggagggcaccaagcgcggcttcctgagtaagaagacggccgaggcgagccgctggcacgagaagtggttcgccctctaccagaatgtgctcttctacttcgagggcgagcagagctgccgcccggcgggcatgtacctcctggagggctgcagctgcgaacgaacgcccgcgccacccagggccggcgccgggcagggaggcgtccgagacgcgctggacaagcagtattactttactgttctttttggccatgaaggtcagaagccactggagctgcgctgtgaggaggagcaggatggtaaagagtggatggaggccattcaccaagccagttatgcagacattttgattgagagggaagtattaatgcagaagtacattcatctagttcagatcgtagagacagaaaaaattgcagctaaccaactccgacatcaacttgaagatcaagacacagaaatcgaaaggcttaaatcagagattattgctcttaataaaaccaaagaacgaatgcgaccttaccaaagcaaccaagaagacgaagatccagacatcaagaagattaaaaaggttcagagcttcatgcgaggatggttgtgcagaaggaaatggaagaccatcgtgcaggattacatttgttctcctcatgctgaaagtatgaggaagagaaaccagattgtgttcaccatggtggaggcagagtcagagtacgttcaccagctctacatcctggtcaatggctttctccggcccctgcgtatggccgccagctccaagaagccccccatcagccacgacgacgtcagcagtatttttcttaacagtgaaacaatcatgtttcttcatgaaatatttcatcaaggactaaaggcaaggatagcaaactggcccactttaattttagctgatctgtttgatattttgctccccatgctgaacatttatcaagaatttgtgcgtaatcaccagtacagcctgcaagttctcgccaattgtaagcaaaacagagattttgacaaactcttaaaacagtatgaagccaatccagcctgtgaggggaggatgctggagacattcttgacctatcccatgtttcagatccccagatatatcatcacactccatgagctccttgctcacacaccccatgagcatgtggaaaggaaaagcctggagtttgccaaatcaaagctagaggaactatccagagtaatgcacgatgaagtcagcgacactgaaaacataaggaaaaaccttgccatcgaaagaatgatcgtggagggctgtgacatcttgctggacaccagccaaacgttcatccgccaaggttctcttattcaagtaccttccgttgagagggggaaacttagtaaagttcgcctgggttcgttgtctttgaaaaaggaaggagagagacaatgcttcttatttacaaaacactttttaatatgtacaagaagttcaggagggaagcttcatctgctcaagacaggtggggttctgtctctaatagactgcacattgattgaggagccagatgcaagcgatgatgactctaaaggttctgggcaagtgtttgggcacctggattttaaaatagtggtggagcctcctgacgctgccgccttcactgttgtcttgttagcaccctcacgccaggagaaagctgcctggatgagtgacatcagtcagtgtgtggacaatatacgatgtaatggtttaatgactatagtgtttgaagagaattccaaagtcactgtgccacatatgattaagtctgatgcccgtcttcataaagacgacactgacatttgcttcagtaaaacactcaactcctgcaaagtgccccagatccgttatgccagcgtggagcgcctcttggaacgactgacagacttgcggtttcttagtattgatttcctcaacacctttctgcacacctatcgtattttcactactgccgctgtggtgctggggaaactctccgacatatacaagaggcctttcacctccatccctgtcaggtcattggaattgttttttgctaccagccagaacaacagaggtgaacatttggtggatggcaaatccccacgtctgtgtcgcaaattctcttccccgccaccactggctgtgtccagaacatcttccccagtgagggccagaaagctgtctttgacttctcccttgaactcaaagataggagcattggacctgacaacttccagcagtcccaccaccaccacccagagtcccgctgcgtctccaccaccacacactggtcagataccactggatctcagcagaggcctctcttctccagagcaaagcccgggaacggtagaagagaatgtcgataacccacgcgtggatctgtgtaacaagctaaaacgaagtattcaaaaagcagtcctagagtctgcaccagcggaccgagcaggagtggaaagctcccctgcagcggacaccacagaactttcaccttgcagatccccctcaactcctcggcacctccgctatcgacagcctggaggacagacggcggacaatgcccactgctctgtttcaccggcttctgcttttgcaatagccacagctgcagcaggacatgggagtccaccaggctttaacaacaccgagagaacatgtgataaagagtttattatacggagaacggctaccaatcgagttctgaacgtcctccgtcactgggtctcaaagcacgcacaggatttcgaactcaacaatgaactaaagatgaatgtcctaaatttgctagaagaagttttgcgagacccagaccttcttccccaagaaaggaaagccgccgcgaatatcctcagggccctttcacaagatgaccaagatgacatccacctaaaattagaggatataattcaaatgactgactgcatgaaggccgaatgctttgagtccttgtcggccatggagctggcagaacagatcaccctcctggaccatgtcattttcagaagcattccctacgaggagtttcttgggcaggggtggatgaagctggataaaaacgaaagaactccttacattatgaaaaccagccaacacttcaatgacatgagtaacctggtggcctcccagataatgaactatgctgatgtcagctcccgtgccaacgccatcgagaaatgggtggcagtggcggacatctgccgatgcctgcacaactacaacggcgtgctggagatcacctcggccttaaacagaagtgccatctacaggctgaagaaaacctgggccaaggtctctaagcagacaaaagctctaatggacaaacttcaaaagactgtttcctctgaaggaagatttaaaaatcttagagaaacccttaaaaattgtaaccctcctgcagttccttatcttgggatgtacttgacagacctggcatttattgaagaaggaacaccaaactttactgaggaaggccttgtcaatttctccaaaatgagaatgatatcacacatcatcagagagatacgccagttccagcagacttcctacagaatagatcatcagccaaaggtcgcacagtacttgcttgacaaagaccttatcatagatgaagatacgctatatgagctgtcactaaaaattgaacctcgactccctgcttgaagatctggccttgcccctgagtccacgggatgttcatggaaagcaggacagacagaattgtgtatgccttgcctatcacggtacagcacgaagccaggctcctttctccaccaaagaagatggaaccagactggaattctgtctccagagagaaacccagctgtttgggtcaaagacagatgcttcagacttgggtgggaaggtgaaagatggctatttagaaagctggtggcacgttttacataagggaatgtcagatgggagatgctagttgccattttaacaaagcaggtaaatcggtaaattttaaactctgtccatgttctgttagaactcagggacaaggatccatgaaaaagacctgtgatgtttctctggcgctttactggcctgggcacacctaccaatcttctaggatttgactggttccattacatttccttttggtataagcttcacagaaaagctgacacttcctctacagagatggaccaaaacataagcaatttcagtctacagcatgtgcatggttgtcagtgcattctaaatatttctatgtgaggaatggtaccttctgaaactgcctttccagtctttaggcaatgggataggaaagaaagaatgaaacacaaatggatttgtatgtaacatttccttaattaaatgcagtaggctgtgccccagaggattccagacagtggctggctgaggtgggtggggagcttttccttgagactgttggtcctaagaagccagcccttttggagaggcagctgcaaaaaggtgcacgcccatctcaccgacaaaactgtggaacagaaggccaccaagtgctgtggggaatcatgggtttcagtgctgagtgaaaatctatacctaaaaatcatctctgcaccttgctttgtttgttttctttccccactcatagtactgcaggaatctattctcatttacacagacctttttttaggcttactatgaacattggctgtattttttttaaacagtttagtgaaattttcttttcaaaacccacacttccatatgctgttcgtagatctctttctttaaaaactgatgttgagagatctctgagaatattataagtgcatgggaaatgggcccaaccaccgaacagctcttacattacaaaaccaaatgcaagggttagtcctgctacctgaggctggggaagtgaccttccttttcccaagattgtcagttgttgaagaaatagggctatctcattgtttacctccctcttctcttctcagggagactgctgctttaaaagaaggaagagaaaaaatatagttctatttccctgaacctgttgcacctgacattttctcttagcagcatgaaacttattgatgctgacaatgaaaaatggatctgtctggctgctttccctctttccttgcactttaattatgttgctagagctaacagactaataaattccacctgctggctcttaagactcagtgaaagagctagcattggtaatgcaccatagaggtagagaatgtacactttctgcacggtaagtgccatctctgtatgtaactatatagtgaaatatcaactaagtaaaagaaaatataatatttgaagaccattcccaaaatattttcaatagttcatattagccaacagtgtagcactcaacccaaggagggttccttatggatgctttctttttcttttttaaagttgcttgtttgttctctttagtttcaaataagaggttgacgcatcttgatgcatgatgagaagcatgggctgtttggatcctaacaacgcataacttgtgatttatttctcagtgctccagaaactgagggtttgaaataatatgtatcagttgcaccaaacacctcaaggtcttgcagaagaaaagtaaaggttagctttcatggctcaaaagcatagtcctgaagggtgaactaaaaccgggacaaatctgtgagaggaccacacacatactagtttcgggccaaacaacacgtggaaaggtgcatgcattctactctgccttggagttgccagagtccttcagagggaaagggatggttctgtgtgcactttttctggaagttcggactcatttctttgacccaaatgttccagagacactgcagccattcttattaacaaaaaataagacaggagtttccaaatgctccttcccttttggatcgcagcttttcttcaactagtgacaaagcttttgcgcctatttcctgcaggatgttggaactgccccgcactggtcatattaggcactgtcaattgctatgctgacttttagggggtttttgtttgtttgaaaaacagggtctcaccatgttgcccaggctggtctcgaactcctggactcaagcaatcttcctgcctcagcctctcaagcagctgggactgcaggggtgtgccactcactagcctttcgcatttttgtttgagaattacaccactttctggagtctgcagccttcctggagctgcaagagggcaagagagagagctccacctctgagggagtgtctgttgatgacctgcactattcgtgtgccagctgggagaggaatgcacattttaaaatcccttcaatttggtcaaattaaaaatccccaagagcaatttgcagtgttttttctggtcgttaaagtacccatcctcttctgcctacacacaaagcatgcattcccagctgcatctgcctctagtccattatggagacccatttctaagaggagatgggaggtcaacctctaacagccaagtagcgaacatgtatactgtaaaattaacctagaaaatcagaagaaaaatccaatttcatgctttcgaatgaatgcccacattttgtactgtcaacgaaattatcttggagcttttaggggatgccttttcgttattaactgagacatctagttttgctacagggacaaatctcttacctaatccaatatattatttgacagattcaggcatgaagtaaaacgtcgtcacttttccttagtgcttttctgaaggaatttaaagacggaattttaaacggccattgcaatattttcaagtggctctcataccaagtcccattactgtttgttaaatttcagtacgtcttaaagtactacttataaacaaatgaaactcagagaaactgaatcacctggaagagaaaaatccattatggtcccatgtggagtgaataatgatggatcagcaccctttctctcatgttattgtataagacgagacttttgggccagcagcgattgggcagcttttaaattcttaactgaaaagagtaatgcaatacagggattattcccaataaaattaacttttatttaaaagcaagagattttacttagcttttttttttcaaagtttgattttatccccttgaaaaaaaatctcttcactttaaagtataaaggtttttaaaaatccaattgcaaaatgtattatttttacaactatcgaaaaggcataaaagagaacatactatttatggctgaagggtatagccaggctaatgtgcacagagggaatcaataaataaaactctttttcatttcagtaagaaatcagattgtaagtttaatggctccattatagataccaccgtgtaatagaagacttaagtcaatgaaatctaatcagtgtgtcatttctcagcggccattggtgacttaaaattaagatgaggcagagccaaaatggaaaacagtcattttgttgtaggtataaacacatgaacgattcagaaaattattcatctcagctgccatgcagcatgacattaacattaggattgatagcactagtctgatctgctcaaggaaaataatagttctattatacttaatgatgttggtttttacacagctcatttcatttttcactagaaagccagttatgaaagagagctggcctaggcatcccggccctgagtcctaggcccagtctccaactggaaaaccttaggctggtgtttacacatccctgagcctcagtttcctcatctgcaaaacggtgtgaatagtaatccctgtgctgcttatctcacagggctattgtgaggaccaaatggattagactgtaaactgcaaagtgctgtccgcacatgaggtcatctgattactgtcctcagatctcttttgtagaggatttcaatgtatttctttatcatttgagtgtgtgtgtgatggacgaatatgtgtgtgagtttgagaagcatatcgttcgtgtccagttactttgcaaatttgtggacatttgtgattggacagaggggtttgtgctgtggcctaacacttgccaagtgaggtgtaggttatgcctatatgcaaattaaacttcacctttcttgaatattcaaaaaaaaaaaaaaaa

SEQ ID NO: 5303 - DNA, 4753 bp, Homo sapiens
agtttgacgtcgtcagccggcttggtcttctacccagtgactcaaagcactaaaagtcagcataatcggaactgaagtcagtagcatcgcccatttgccattcactgcagtagcaaaagtagtactctgtggtgggttaatcggtttgaggcagctccttaaatgaacatttgtgtttcatttttctgttattttcccgaacatgaaaagacgataaaactgaaatggaaaagatctattccagaggggagcttcaccacttcattgacggctttaatgaagagaaaagcaactggatgcgctatgtgaatccagcacactctccccgggagcaaaacctggctgcgtgtcagaacgggatgaacatctacttctacaccattaagcccatccctgccaaccaggaacttcttgtgtggtattgtcgggactttgcagaaaggcttcactacccttatcccggagagctgacaatgatgaatctcacacaaacacagagcagtctaaagcaaccgagcactgagaaaaatgaactctgcccaaagaatgtcccaaagagagagtacagcgtgaaagaaatcctaaaattggactccaacccctccaaaggaaaggacctctaccgttctaacatttcacccctcacatcagaaaaggacctcgatgactttagaagacgtgggagccccgaaatgcccttctaccctcgggtcgtttaccccatccgggcccctctgccagaagactttttgaaagcttccctggcctacgggatcgagagacccacgtacatcactcgctcccccattccatcctccaccactccaagcccctctgcaagaagcagccccgaccaaagcctcaagagctccagccctcacagcagccctgggaatacggtgtcccctgtgggccccggctctcaagagcaccgggactcctacgcttacttgaacgcgtcctacggcacggaaggtttgggctcctaccctggctacgcacccctgccccacctcccgccagctttcatcccctcgtacaacgctcactaccccaagttcctcttgcccccctacggcatgaattgtaatggcctgagcgctgtgagcagcatgaatggcatcaacaactttggcctcttcccgaggctgtgccctgtctacagcaatctcctcggtgggggcagcctgccccaccccatgctcaaccccacttctctcccgagctcgctgccctcagatggagcccggaggttgctccagccggagcatcccagggaggtgcttgtcccggcgccccacagtgccttctcctttaccggggccgccgccagcatgaaggacaaggcctgtagccccacaagcgggtctcccacggcgggaacagccgccacggcagaacatgtggtgcagcccaaagctacctcagcagcgatggcagcccccagcagcgacgaagccatgaatctcattaaaaacaaaagaaacatgaccggctacaagacccttccctacccgctgaagaagcagaacggcaagatcaagtacgaatgcaacgtttgcgccaagactttcggccagctctccaatctgaaggtccacctgagagtgcacagtggagaacggcctttcaaatgtcagacttgcaacaagggctttactcagctcgcccacctgcagaaacactacctggtacacacgggagaaaagccacatgaatgccaggtctgccacaagagatttagcagcaccagcaatctcaagacccacctgcgactccattctggagagaaaccataccaatgcaaggtgtgccctgccaagttcacccagtttgtgcacctgaaactgcacaagcgtctgcacacccgggagcggccccacaagtgctcccagtgccacaagaactacatccatctctgtagcctcaaggttcacctgaaagggaactgcgctgcggccccggcgcctgggctgcccttggaagatctgacccgaatcaatgaagaaatcgagaagtttgacatcagtgacaatgctgaccggctcgaggacgtggaggatgacatcagtgtgatctctgtagtggagaaggaaattctggccgtggtcagaaaagagaaagaagaaactggcctgaaagtgtctttgcaaagaaacatggggaatggactcctctcctcagggtgcagcctttatgagtcatcagatctacccctcatgaagttgcctcccagcaacccactacctctggtacctgtaaaggtcaaacaagaaacagttgaaccaatggatccttaagattttcagaaaacacttattttgtttcttaagttatgacttggtgagtcagggtgcctgtaggaagtggcttgtacataatcccagctctgcaaagctctctcgacagcaaatggtttcccctcacctctggaattaaagaaggaactccaaagttactgaaatctcagggcatgaacaaggcaaaggccatatatatatatatatatatatctgtatacatattatatatacttatttacacctgtgtctatatatttgcccctgtgtattttgaatatttgtgtggacatgtttgcatagccttcccattactaagactattacctagtcataattattttttcaatgataatccttcataatttattatacaatttatcattcagaaagcaataattaaaaaagtttacaatgactggaaagattccttgtaatttgagtataaatgtatttttgtcttgtggccattctttgtagataatttctgcacatctgtataagtacctaagatttagttaaacaaatatatgacttcagtcaacctctctctctaataatggtttgaaaatgaggtttgggtaattgccaatgttggacagttgatgtgttcattcctgggatcctatcatttgaacagcattgtacataacttgggggtatgtgtgcaggattacccaagaataacttaagtagaagaaacaagaaagggaatcttgtatatttttgttgatagttcatgtttttcccccagccacaattttaccggaagggtgacaggaaggctttaccaacctgtctctccctccaaaagagcagaatcctcccaccgccctgccctccccaccgagtcctgtggccattcagagcggccacatgacttttgcatccattgtattatcagaaaatgtgaagaagaaaaaaatgccatgttttaaaaccactgcgaaaatttccccaaagcataggtggctttgtgtgtgtgcgatttgggggcttgagtctgggtggtgttttgttgttggtttttgttgctttttttttttttttttttttaatgtcaaaattgcacaaacatggtgctctaccaggaaggattcgaggtagataggctcaggccacactttaaaaacaaacacacaaacaacaaaaaacgggtattctagtcatcttggggtaaaagcgggtaatgaacattcctatccccaacacatcaattgtattttttctgtaaaactcagattttcctcagtatttgtgtttttacattttatggttaatttaatggaagatgaaagggcattgcaaagttgttcaacaacagttacctcattgagtgtgtccagtagtgcaggaaatgatgtcttatctaatgatttgcttctctagaggagaaaccgagtaaatgtgctccagcaagatagactttgtgttattctatcttttattctgctaagcccaaagattacatgttggtgttcaaagtgtagcaaaaaatgatgtatatttataaatctatttataccactatatcatatgtatatatatttataaccacttaaattgtgagccaagccatgtaaaagatctactttttctaagggcaaaaaaaaaaaaaaaaaaaaaagaacactcctttctgagactttgcttaatacttggtgacctcacaatcacgtcggtatgattgggcacccttgcctactgtaagagaccctaaaaccttggtgcagtggtggggaccacaaaacaaccagggaggaagagatacatcattttttagtattaaggaccatctaagacagctctattttttttttgccactttatgattatgtggtcacacccaagtcacagaaataaaaaactgactttaccgctgcaatttttctgttttcctccttactaaatactgatacattactccaatctattttataattatatttgacattttgttcacatcaactaatgttcacctgtagaagagaacaaatttcgaataatccagggaaacccaagagccttactggtcttctgtaacttccaagactgacagctttttatgtatcagtgtttgataaacacagtccttaactgaaggtaaaccaaagcatcacgttgacattagaccaaatacttttgattcccaactactcgtttgttctttttctccttttgtgctttcccatagtgagaatttttataaagacttcttgcttctctcaccatccatccttctcttttctgcctcttacatgtgaatgttgagcccacaatcaacagtggttttattttttcctctactcaaagttaaaactgaccaaagttactggctttttactttgctagaacaacaaactatcttatgtttacatactggtttacaatgttatttatgtgcaaattgtcaaaatgtaaattaaatataaatgttcatgctttaccaaaat

SEQ ID NO: 5304 - DNA, 1129 bp, Homo sapiens
acagcgtggtgggagggactgagcgttttcaaaaccagcagtctttgaaacagctgtaacggcatctgtgaaagaagataggttccaggaacggaactgccacttagattgtaaattcctgaaaaacaggacgtttttgcatctcctcccggcttccccatccctaaaccaacgtctgttgaattaaactaccaaacaaaataactgcagtacagcaatggcgatcagaaggtagaacagctgtatggctgcacattcccatcctccaaagccgatttattgcccctgctgcttccctgggcttctgctttcaccacgcagaatcggattcatcaacgttgactctgtggctgagagaagggcccagcagattaccaggatatgcttcacatcaagtaggagttgcaggagctgtatttgatgaaagtactagaaaaatactggttgtacaagatcgaaataaattgaaaaatatgtggaagtttccaggaggcctgtcagagcctgaagaagatattggagacacagcggttcgagaagtttttgaagagactggtataaaatcagaattcaggtccgtcctgagtattcggcaacagcacacaaatcctggagcttttgggaagtcagatatgtatatcatctgccgcctaaagccatattcattcaccataaatttttgccaggaagaatgcttaagatgtgagtggatggatctcaatgacctggcgaagactgaaaatacaactcccatcaccagcagagttgctaggctgctgctgtatgggtacagagaagggtttgacaaaattgacctgactgtggaagaacttccagcagtttacacaggactgttttataaactctatcataaggaactgccagagaattataaaactatgaaaggaattgattaaattcacatttatatgtttagaaacatgtagactaacgaatgacataagaaatagtggacattttggattgattaaacatctgactgtgattttctaatgtatatgatttccatgaagaaattttgtttctaaacatgcacattttaaaagcctcttttcgaataaagcaaatgcgtgaaaaagaaaaaaaaaaaaaaaaaaaaaaaaaaaaa

SEQ ID NO: 5305 - DNA, 1197 bp, Homo sapiens
catttgggcaacggacgaattaagcggcgtggagatgcggcagccactgagctggggccgctggcgcgcgatgcttgcccgaacctacggccccgggccttcggcgggttaccgctgggcctcgggcgcacagggttacgtgcggaatccgccagttggagcgtgcgatctgcagggcgagctggacagattcgggggcatctcggtgcgcctggcgcggctcgatgcgctggaccgcctggacgctgccgccttccagaagggcttgcaggctgcagtacagcaatggcgatcagaaggtagaacagctgtatggctgcacattcccatcctccaaagccgatttattgcccctgctgcttccctgggcttctgctttcaccacgcagaatcggattcatcaacgttgactctgtggctgagagaagggcccagcagattaccaggatatgcttcacatcaagtaggagttgcaggagctgtatttgatgaaagtactagaaaaatactggttgtacaagatcgaaataaattgaaaaatatgtggaagtttccaggaggcctgtcagagcctgaagaagatattggagacacagcggttcgagaagtttttgaagagactggtataaaatcagaattcaggtccgtcctgagtattcggcaacagcacacaaatcctggagcttttgggaagtcagatatgtatatcatctgccgcctaaagccatattcattcaccataaatttttgccaggaagaatgcttaagatgtgagtggatggatctcaatgacctggcgaagactgaaaatacaactcccatcaccagcagagttgctaggctgctgctgtatgggtacagagaagggtttgacaaaattgacctgactgtggaagaacttccagcagtttacacaggactgttttataaactctatcataaggaactgccagagaattataaaactatgaaaggaattgattaaattcacatttatatgtttagaaacatgtagactaacgaatgacataagaaatagtggacattttggattgattaaacatctgactgtgattttctaatgtatatgatttccatgaagaaattttgtttctaaacatgcacattttaaaagcctcttttcgaataaagcaaatgcgtgaaaaagaaaaaaaaaaaaaaaaaaaaaaaaaaaaa

SEQ ID NO: 5306 - DNA, 768 bp, Homo sapiens; identical to SEQ ID NO: 2437

SEQ ID NO: 5307 - DNA, 2206 bp, Homo sapiens; identical to SEQ ID NO: 2274

SEQ ID NO: 5308 - DNA, 6938 bp, Homo sapiens
aataggatgctcagccggaggtggccctgcgcgtgacgcagcggtgctcggaggcagggggcgtaggggccgggctgtccggcgctttagcttagcaggcgacgttgcgggccctgggcgccaggagagcttcccggagtcgaccttcctgctggctgctctgtgaccgcttcccggctctgccctcttggccgaagtgcccgctgccgggcgcgggcctcagacaatacaatggtgggtgaagagaagatgtctctaagaaaccggctgtcaaagtccagggaaaatcctgaggaagatgaagaccagagaaaccctgcaaaggagtccctagagacacctagtaatggtcgaattgacataaaacagttgatagcaaagaagataaagttgacagcagaggcagaggaattgaagccattttttatgaaggaagttggcagtcactttgatgattttgtgaccaatctcattgaaaagtcagcatcattagataatggtgggtgcgctctcacaaccttttctgttcttgaaggagagaaaaacaaccatagagcgaaggatttgagagcacctccagaacaaggaaagatttttattgcaaggcgctctctcttagatgaactgcttgaagtggaccacatcagaacaatatatcacatgtttattgccctcctcattctctttatcctcagcacacttgtagtagattacattgatgaaggaaggctggtgcttgagttcagcctcctgtcttatgcttttggcaaatttcctaccgttgtttggacctggtggatcatgttcctgtctacattttcagttccctattttctgtttcaacattgggccactggctatagcaagagttctcatccgctgatccgttctctcttccatggctttcttttcatgatcttccagattggagttctaggttttggaccaacatatgttgtgttagcatatacactgccaccagcttcccggttcatcattatattcgagcagattcgttttgtaatgaaggcccactcatttgtcagagagaacgtgcctcgggtactaaattcagctaaggagaaatcaagcactgttccaatacctacagtcaaccagtatttgtacttcttatttgctcctacccttatctaccgtgacagctatcccaggaatcccactgtaagatggggttatgtcgctatgaagtttgcacaggtctttggttgctttttctatgtgtactacatctttgaaaggctttgtgcccccttgtttcggaatatcaaacaggagcccttcagcgctcgtgttctggtcctatgtgtatttaactccatcttgccaggtgtgctgattctcttccttactttttttgcctttttgcactgctggctcaatgcctttgctgagatgttacgctttggtgacaggatgttctataaggattggtggaactccacgtcatactccaactattatagaacctggaatgtggtggtccatgactggctatattactatgcttacaaggactttctctggtttttctccaagagattcaaatctgctgccatgttagctgtctttgctgtatctgctgtagtacacgaatatgccttggctgtttgcttgagctttttctatcccgtgctcttcgtgctcttcatgttctttggaatggctttcaacttcattgtcaatgatagtcggaaaaagccgatttggaatgttctgatgtggacttctcttttcttgggcaatggagtcttactctgcttttattctcaagaatggtatgcacgtcagcactgtcctctgaaaaatcccacatttttggattatgtccggccacgttcctggacttgtcgttacgtgttttagaagcttggactttgtttcctccttgtcactgaagattgggtagctccctgatttggagccagctgtttccagttgttactgaagttatctgtgttatttggaccactccaggctttacagatgactcactccattcctaggtcacttgaagccaaactgttggaagttcactggagtcttgtacacttaagcagagcagaactttttttgtggggctgggtggggggagaagaccgactaacagctgaagtaatgacagattgttgctgggtcatatcagctttatcccttggtaattatatctgttttgtttcttgactctgtccaatcagagaataaacatcatagtttcttggccactgaattagccaaaacacttaggaagaaatcacttaaatacctctggcttagaaattttttcatgcacactgttggaatgtatgctaattgaacatgcaattggggaagaaaaaatgtagaatgatttttgctatttctagtagaaagaaaatgtctgttttccaaagataatgttatacatcctattttgtaatttttttgaaaaaagttcaatgttcagttttccttagtttttaccttgttttctctataggtcatgatttctgtgaagcaaaaagatgccttttaccatgaattcttgagtttacatcaataatattgtatattaaggggatcagaagtaggaaggaaaaaataagagatagcagaggaaaaagaaaaacatttcctcttataacttctgaagtaatttgtaaaaaagatttgtagagtcaatcatgtgtttaaattattttatcacaaacttaacatggaagatattcctttttaactttgtggtaacttctttgaagttatttagaaatatcctttggaacaattattttattgtctaataaatattgacttctcttgaattattttgcagactagtgagtctgtaccataagtattaatcacctccactcatattaaagtgatcattaagaatccagaagctggcttctgcatttgctcagttatacttttaatggtagtatgtttttaggtggaataaattaatatgtgattggtttcaaggaaatgtactctattatgtaatacttccattttataagatgcccatttctaatacaatgtgtgtaggaattatttgtatgtatgaggtatgattgtaaagattgagcattggaaggggtatcagagaccatgtagttcaactttccactcaaagtaagatttatgaattatttaaatgatagttgttacttggaacagccacttgagaggctctcttggtattgtttggaattgttttaaagtcagtttgagtctcacaagaaggtaagtagagtttcttaatagtcacaacttaatttgaaccacaagtatccagcttaatcacgtatcttactcacgataccactggtccagatgagtttaggtaattttcaaacattaaatccaacttcaacggaaacaaatacactcaagggaagttatttttaaaaaggtactctgcatgttcccgcagtaatgttctgcacaacagtattgtaattgtaatggaatcataacctgctaactagtttgctttaatatggcttgtaattcttgacatttttcttaaaattaaaacgaatttttattttgaatttataactgcattttaaatatattggggacagattgcgctgagacctggttatgagcaagccaatcttttgaatctagagaatggaattcttaggtttatatttctgttaagaaatactataaatatgactcttatgagaagactttgttgctctgtagtgtttctgaatactgtatttgttggattgatcaaggctatttttcaaaaagctctctgcttcctgtttgtttgtttgtttgtttttgagacagagtcttgctctgtcgccggggctggagtgcaatggcgtgaactcagctcactgcaacctctgcctccctggttcaagctattctcctgcctcagcctcctgagtagctgggattacagggccacgcctggctaatttttgtatttttagtagagatggggtttcaccctgttggtcaggctggtctcaaactcctgaccttgtgatctgcccacctcagcctcccaaagtgctgggaagacaggcgttagccaccgtgcccggcctctgtttcctgttattagtgattttcctgcccaagattgcaacaacaaatatgtagaactacagactgtttagaatgctgagactgttctaagaaactttcaaaaacagtagcacttcaaggaatggtcactttctatgaaagaaactggtttgatagccataatcttattgctagctgcttttagcaaaagtcttttcttgaaaccaccacctatactctttaaacaaataaaaactaaaatctcttgctaatgtttcaggaagatttattttttctattttgctattgtggcgaaaattattttcagttataggatacttttttccttctgaaaagtaataagcttaaagtttttgtttctgtaagatgtaatgatagtaactattattttgggcatattaaccaacagaacaattatgtagtatgtatatcactttctcattagatctctaacttgaccttctagtacctttatgtgtgaggataaatttgttagatccttttattctcaatcttggataatgatgcaaaatggaattttgttttgtttgttggtagattcacatactaaaactttgcaggtaaagttgcttgcctcatgttagaatttaattagaaaactgaggctgcctttttttttttttttttttttttttaagacagagtcttgttctgtcgcccaggccagttttttttttcttgtacagatggggttttaccatgttgctcaggctggtctcaaactcctggagtcaagggatctatttgcctcagcctctcaaagtgctgggattacaggtgtgagccacggctcctggctccttgctccagaatcagttttttaatggaagatagctcatactttgtttttgtttttaaagagacagggtctcactctgttgcccaggctggtagtagcgtgatcatagctcactgcagtctcaaactcctggactcaaatagtgctctggagtacctagaactacaagtgcctaccaccacacccagctaatttatttgtttttttttttttagagatggggggggtctccctatgttgcccaggctggtctcaaactcttcacctcaagcaaaactcccactgcagaaagctttgggattacaggcatgagccaccatgccaagcccatacttattgttaataaagtttcagtgacttgcttactaatcttatgcaaaatttcatgtaatttatgtaatactacataacaatgctacatatggtatgtatacatacactgtatacacacaaaggtctgttctgggtattttatgtatcttatctctaggctttatggctctgaaatggagggaactggacataaatgtttcaaggaataaagtgaatgttttgtttgtttgtttgttttgagacggagtctcagtcaccaggctggagtgcagtgctgtgatctcagctcactgcaacctctgcctcctgggttcaagcgattctcctgcctcagcctcccgagtagctggcattacaggtgcctgccaccatgtccagctaatttttgtgtttttagtagagatggggtttcaccatgatggtcaggctggtctcgaactcctgacctcatgatccgccagcctcagcctcccatagtgctgggattataggcatgagccatgctcccggccaaagtgaatgttttgggtgaagtttatataaggatttgacttttgtatcattattaaagtttctgtcaggtaatacagtgttggccctctgttgaaataaaatgttacatatcgctgggtgtagtggctcatgcctttaatcccagtactttgggaggccaaggcaggaggattgcttgagctcagaagtttgagaccagcctgggcaacatagcaaaaccttgtcactataaaaaatacaaaaattagccaggcgtggtggtgcacgcctgtagtctcagctactcagtcggctgaggtgggaagatggcttcaagccgggagatggaggcttcagtgacctgtgacctgtgatcacaccacttaattcctcaaaacatttatgtcccagttccctccatttcagagccatgggcaacagagcgagaccctgtctcaaaaaaaaaattacatataagcccggtttaaagagaggataatatgcaaccaccctagttgaaacagagtgtatcacttctttctcaccctaaatttaatgcctagtttgaaaatcagtagacaataataaagttgataagctttaggttggtaggaaagctatgtaatctatatagtgtactaaatccttatatgtttttggtaaaaaaagactttaatagctaatttggacttcagaaaatgggttaatttcacgagtgcatatcacttttgactatattagtcaagcatattattaaagtttaaaaaactctaaaacttctgtactgtttttttcttaagtgctctcttccttatttctacattactacattcacatttctgctgtcaataagccctaatggagtgataaactttaagctagtagatactgcaccatgtcttgtggtggtgttttcttaatgaaatggaagctgtacttcctgtttgtttttaaatacttttgaaacagacagttcatgtaccccatcatttagagatgcagtttgaatttccatggaaaaaggtgccaattttggattgggaaaggagctgaagccccagtcaagactttgccatttggggtaatgcagcagattcctgtgtctgtatctttccagtgtgtgtgttaatccatagtgttctgagcaccagaagggtcatgtaaatctgaagttgttattaaaggtttttctatagtgaaaaaaaaaaaaaaaaaa

SEQ ID NO: 5309 - DNA, 1728 bp, Homo sapiens
ccggccaagagtgcgtgggcggcggcgcgcgggtgcgatcgcggagctgtgaggcgcaggcagggctctggggcacctagagaccggggccggagacgtggcagccgccctgcccgccagaaagtttcctagaagtttgctgggcgcgggcgcacgactgactggctggaccatgaacgtgttccgaatcctcggcgacctgagccacctcctggccatgatcttgctgctggggaagatctggaggtccaagtgctgcaagggcatctctgggaagagccagatcctgtttgctctcgtcttcaccaccaggtacctggacctgttcaccaacttcatctccatctacaacacagtaatgaaggtggtttttctcctctgtgcctatgttacagtgtacatgatatatgggaaattccgtaaaacttttgacagtgagaatgacacattccgcctggagtttcttctggtcccagtcattggcctttccttccttgaaaactacagtttcactctgctggagatcctctggactttctctatctatctggaatcagtggctatcctgccccagctcttcatgatcagcaagactggagaggctgagaccataactactcactacctgttctttctgggtctgtaccgggcactctacctggctaactggatcaggcggtaccagactgagaatttctatgaccaaattgcagtcgtgtctggagtagtacaaaccatcttctactgtgacttcttctacttgtatgtgaccaaagtccttaagggaaagaagttaagtcttccaatgccaatctgaggaccttcagagacagtctacgccttaacaagcacatgaaggaaactattttgaatgttctctttggcaacttatccataatttgggatcaaatgttaaaaccagaaaagtgtttagtgtggatttcagcaaaacctgatcatcccacccagaagaccttctcatcaatagatcgcccttaaagacccattgtaaggtcataaaaaacctcggccacctgcacaaagatggtgcctcactgcaacaagaaaccttaaggtgtcttaccgacgaaataaaaaacataaatgattgttctccaaggcctgagggcaagactcatgatgagcaagtcaaccccaatctggaacaatgtccctcctcttagaatgtcccaactaaagaccagttaaaatattagggtacgttcttgtgaatttccactttccaggtagatgaccaaatttaggtggtcaagatataaaggtgtcagctagttttaagtgtgaaacttatttcactttcacactgccttcaggccagaagcaaaccaaatttaccaggtttggctggaggagttttgtgactcatcttttactggtttgaattttttcaaaccagtggctgatacctgccttgtacttagtaccttaataccaataacctaatggtacttaggcgagtaccatttgcacaatcactgttttacttatgagcagatacagatatatccaaacccttacctactaggtatcctgctagggttttcaattccaattcttgtattaagttttttcctttcagttttaggtgcgaaagtaatcagtcaatccaatatcccccatctttgtcttgaaacaaaaactgttttaagacgtctacgttgaattattcagagaattaagcaataaaagctcacaccttattgtcaa

SEQ ID NO: 5310 - DNA, 4255 bp, Homo sapiens
gaagggagagagcaaacaaaggggtcaggagggaaaataatgcactggcttcctgagcccctgcagaggctgagcagggagagggggccagggccagaggggacagaggctggcggcagacgggccgggacaggcaggtcctaaatggcattgtttgaaggggccggctaattgcacagagcagtctgagcctgagaccccagccctggcctccccactctgtcctgggtgctggcgtctgagccttcgggacagcctgtccacatggaaccaagtcctgagcctccaagcttggaaagcatgaagggagacaccaggcatctcaatggagaggaggacgccggcgggagggaagactcgatcctcgtcaacggggcctgcagcgaccagtcctccgactcgcccccaatcctggaggctatccgcaccccggagatcagaggccgaagatcaagctcgcgactctccaagagggaggtgtccagtctgctaagctacacacaggacttgacaggcgatggcgacggggaagatggggatggctctgacaccccagtcatgccaaagctcttccgggaaaccaggactcgttcagaaagcccagctgtccgaactcgaaataacaacagtgtctccagccgggagaggcacaggccttccccacgttccacccgaggccggcagggccgcaaccatgtggacgagtcccccgtggagttcccggctaccaggtccctgagacggcgggcaacagcatcggcaggaacgccatggccgtcccctcccagctcttaccttaccatcgacctcacagacgacacagaggacacacatgggacgccccagagcagcagtaccccctacgcccgcctagcccaggacagccagcaggggggcatggagtccccgcaggtggaggcagacagtggagatggagacagttcagagtatcaggatgggaaggagtttggaataggggacctcgtgtggggaaagatcaagggcttctcctggtggcccgccatggtggtgtcttggaaggccacctccaagcgacaggctatgtctggcatgcggtgggtccagtggtttggcgatggcaagttctccgaggtctctgcagacaaactggtggcactggggctgttcagccagcactttaatttggccaccttcaataagctcgtctcctatcgaaaagccatgtaccatgctctggagaaagctagggtgcgagctggcaagaccttccccagcagccctggagactcattggaggaccagctgaagcccatgttggagtgggcccacgggggcttcaagcccactgggatcgagggcctcaaacccaacaacacgcaaccagagaacaagactcgaagacgcacagctgacgactcagccacctctgactactgccccgcacccaagcgcctcaagacaaattgctataacaacggcaaagaccgaggggatgaagatcagagccgagaacaaatggcttcagatgttgccaacaacaagagcagcctggaagatggctgtttgtcttgtggcaggaaaaaccccgtgtccttccaccctctctttgagggggggctctgtcagacatgccgggatcgcttccttgagctgttttacatgtatgatgacgatggctatcagtcttactgcactgtgtgctgcgagggccgagagctgctgctttgcagcaacacgagctgctgccggtgtttctgtgtggagtgcctggaggtgctggtgggcacaggcacagcggccgaggccaagcttcaggagccctggagctgttacatgtgtctcccgcagcgctgtcatggcgtcctgcggcgccggaaggactggaacgtgcgcctgcaggccttcttcaccagtgacacggggcttgaatatgaagcccccaagctgtaccctgccattcccgcagcccgaaggcggcccattcgagtcctgtcattgtttgatggcatcgcgacaggctacctagtcctcaaagagttgggcataaaggtaggaaagtacgtcgcttctgaagtgtgtgaggagtccattgctgttggaaccgtgaagcacgaggggaatatcaaatacgtgaacgacgtgaggaacatcacaaagaaaaatattgaagaatggggcccatttgacttggtgattggcggaagcccatgcaacgatctctcaaatgtgaatccagccaggaaaggcctgtatgagggtacaggccggctcttcttcgaattttaccacctgctgaattactcacgccccaaggagggtgatgaccggccgttcttctggatgtttgagaatgttgtagccatgaaggttggcgacaagagggacatctcacggttcctggagtgtaatccagtgatgattgatgccatcaaagtttctgctgctcacagggcccgatacttctggggcaacctacccgggatgaacaggcccgtgatagcatcaaagaatgataaactcgagctgcaggactgcttggaatacaataggatagccaagttaaagaaagtacagacaataaccaccaagtcgaactcgatcaaacaggggaaaaaccaacttttccctgttgtcatgaatggcaaagaagatgttttgtggtgcactgagctcgaaaggatctttggctttcctgtgcactacacagacgtgtccaacatgggccgtggtgcccgccagaagctgctgggaaggtcctggagcgtgcctgtcatccgacacctcttcgcccctctgaaggactactttgcatgtgaatagttccagccaggccccaagcccactggggtgtgtggcagagccaggacccaggaggtgtgattcctgaaggcatccccaggccctgctcttcctcagctgtgtgggtcataccgtgtacctcagttccctcttgctcagtgggggcagagccacctgactcttgcaggggtagcctgaggtgccgcctccttgtgcacaaatcagacctggctgcttggagcagcctaacacggtgctcattttttcttctcctaaaactttaaaacttgaagtaggtagcaacgtggctttttttttttcccttcctgggtctaccactcagagaaacaatggctaagataccaaaaccacagtgccgacagctctccaatactcaggttaatgctgaaaaatcatccaagacagttattgcaagagtttaatttttgaaaactggctactgctctgtgtttacagacgtgtgcagttgtaggcatgtagctacaggacatttttaagggcccaggatcgttttttcccagggcaagcagaagagaaaatgttgtatatgtcttttacccggcacattccccttgcctaaatacaagggctggagtctgcacgggacctattagagtattttccacaatgatgatgatttcagcagggatgacgtcatcatcacattcagggctattttttcccccacaaacccaagggcaggggccactcttagctaaatccctccccgtgactgcaatagaaccctctggggagctcaggaaggggtgtgctgagttctataatataagctgccatatattttgtagacaagtatggctcctccatatctccctcttccctaggagaggagtgtgaagcaaggagcttagataagacaccccctcaaacccattccctctccaggagacctaccctccacaggcacaggtccccagatgagaagtctgctaccctcatttctcatctttttactaaactcagaggcagtgacagcagtcagggacagacatacatttctcataccttccccacatctgagagatgacagggaaaactgcaaagctcggtgctccctttggagattttttaatccttttttattccataagaagtcgtttttagggagaacgggaattcagacaagctgcatttcagaaatgctgtcataatggtttttaacaccttttactcttcttactggtgctattttgtagaataaggaacaacgttgacaagttttgtggggctttttatacactttttaaaatctcaaacttctatttttatgtttaacgttttcattaaaattttttttgtaactggagccacgacgtaacaaatatggggaaaaaactgtgccttgtttcaacagtttttgctaatttttaggctgaaagatgacggatgcctagagtttaccttatgtttaattaaaatcagtatttgtcta

SEQ ID NO: 5311 - DNA, 4023 bp, Homo sapiens
atgtttagggttggcttcttaataatttcttcttcctcttctctctctcctcttcttttggtcagtgttgtgcgggttaatacaacaaactgtcacaagtgtttgttgtccgggacgtacattttcgcggtcctgctagtatgcgtggtgttccactctggcgcccaggagaaaaactacaccatccgagaagaaattccagaaaacgtcctgataggcaacttgttgaaagaccttaacttgtcgctgattccaaacaagtccttgacaactactatgcagttcaagctagtgtacaagaccggagatgtgccactgattcgaattgaagaggatactggtgagatcttcactaccggcgctcgcattgatcgtgagaaattatgtgctggtatcccaagggatgagcattgcttttatgaagtggaggttgccattttgccggatgaaatatttagactggttaagatacgttttctgatagaagatataaatgataatgcaccattgttcccagcaacagttatcaacatatcaattccagagaactcggctataaactctaaatatactctcccagcggctgttgatcctgacgtaggcataaacggagttcaaaactacgaactaattaagagtcaaaacatttttggcctcgatgtcattgaaacaccagaaggagacaagatgccacaactgattgttcaaaaggagttagatagggaagagaaggatacctatgtgatgaaagtaaaggttgaagatggtggctttcctcaaagatccagtactgctattttgcaagtaagtgttactgatacaaatgacaaccacccagtctttaaggagacagagattgaagtcagtataccagaaaatgctcctgtaggcacttcagtgacacagctccatgccacagatgctgacataggtgaaaatgccaagatccacttctctttcagcaatctagtctccaacattgccaggagattatttcacctcaatgccaccactggacttatcacaatcaaagaaccactggatagggaagaaacaccaaaccacaagttactggttttggcaagtgatggtggattgatgccagcaagagcaatggtgctggtaaatgttacagatgtcaatgataatgtcccatccattgacataagatacatcgtcaatcctgtcaatgacacagttgttctttcagaaaatattccactcaacaccaaaattgctctcataactgtgacggataaggatgcggaccataatggcagggtgacatgcttcacagatcatgaaattcctttcagattaaggccagtattcagtaatcagttcctcctggagaatgcagcatatcttgactatgagtccacaaaagaatatgccattaaattactggctgcagatgctggcaaacctcctttgaatcagtcagcaatgctcttcatcaaagtgaaagatgaaaatgacaatgctccagttttcacccagtctttcgtaactgtttctattcctgagaataactctcctggcatccagttgatgaaagtaagtgcaacggatgcagacagtgggcctaatgctgagatcaattacctgctaggccctgatgctccacctgaattcagcctggatcgtcgtacaggcatgctgactgtagtgaagaaactagatagagaaaaagaggataaatatttattcacaattctggcaaaagataatggggtaccacccttaaccagcaatgtcacagtctttgtaagcattattgatcagaatgacaatagcccagttttcactcacaatgaatacaaattctatgtcccagaaaaccttccaaggcatggtacagtaggactaatcactgtaactgatcctgattatggagacaattctgcagttacgctctccattttagatgagaatgatgacttcaccattgattcacaaactggtgtcatccgaccaaatatttcatttgatagagaaaaacaagaatcttacactttctatgtaaaggctgaggatggtggtagagtatcacgttcttcaagtgccaaagtaaccataaatgtggttgatgtcaatgacaacaaaccagttttcattgtccctccttacaactattcttatgaattggttctaccgtccactaatccaggcacagtggtctttcaggtaattgctgttgacaatgacactggcatgaatgcagaggttcgttacagcattgtaggaggaaacacaagagatctgtttgcaatcgaccaagaaacaggcaacataacattgatggagaaatgtgatgttacagaccttggtttacacagagtgttggtcaaagctaatgacttaggacagcctgattctctcttcagtgttgtaattgtcaatctgttcgtgaatgagtcagtgaccaatgctacactgattaatgaactggtgcgcaaaagcattgaagcaccagtgaccccaaatactgagatagctgatgtatcctcaccaactagtgactatgtcaagatcctggttgcagctgttgctggcaccataactgtcgttgtagttattttcatcactgctgtagtaagatgtcgccaggcaccacaccttaaggctgctcagaaaaacatgcagaattctgaatgggctaccccaaacccagaaaacaggcagatgataatgatgaagaaaaagaaaaagaagaagaagcattcccctaagaacctgctgcttaatgttgtcactattgaagaaactaaggcagatgatgttgacagtgatggaaacagagtcacactagaccttcctattgatctagaagagcaaacaatgggaaagtacaattgggtaactacacctactactttcaagcctgacagccctgatttggcccgacactacaaatctgcctctccacagcctgccttccaaattcagcctgaaactcccctgaatttgaagcaccacatcatccaagaactgcctctcgataacacctttgtggcctgtgactctatctccaattgttcctcaagcagttcagatccctacagcgtttctgactgtggctatccagtgacaaccttcgaggtacctgtgtccgtacacaccagaccgtcccagcggcgtgtcacatttcacctgccagaaggctctcaggaaagcagcagtgatggtggactgggagaccatgatgcaggcagccttaccagcacatcccatggcctgccccttggctatcctcaggaggagtactttgatcgtgctacacccagcaatcgcactgaaggggatggcaactccgatcctgaatctaattttatcagtgggatgagggagaaaataactgttcaaccaactgtggaagaggcctctgacaactgcactcaagaatgtctcatctatggccattctgatgcctgctggatgccggcatctctggatcattccagctcttcacaagcacaggcctctgctctatgccacagcccaccactgtcacaggcctctactcagcaccacagcccaccagtgacacagaccattgttctctgccacagccctccagtgacacagaccatcgcattgtgccacagcccaccaccgatacaggtgtctgctctccaccacagtcctcctctagtgcagggtactgcacttcaccacagcccaccatcagcacaggcctcagccctctgctacagccctcctttagcacaggctgctgcaatcagccacagctcttctctgccacaggttattgccctccatcgtagtcaggcccaatcatcagtcagtttgcagcaaggttgggtgcaaggtgctaatggactatgctctgttgatcagggagtgcaaggtagtgcaacatctcagttttacaccatgtctgaaagacttcatcccagtgatgattcaattaaagtcattcctttgacaaccttcgctccacgccaacaggccagaccgtccagaggtgattcccccattatggaaacacatcccttgtaa

SEQ ID NO: 5312 - DNA, 5000 bp, Homo sapiens
ttctgcgtttctctagtgcagtgcctggagatgaccaccaaacggaaaatcatcggccgtctggtgccatgccgatgtttccgaggtgaagaagaaatcatctcagttttagattactcccactgcagtcttcagcaggtgccaaaggaggtctttaacttcgaacgaacattagaggagctttatctagatgccaatcaaattgaagaactacccaagcaattgttcaactgtcaagctctacgaaaactaagtattcctgataacgacctttcaaatctgccaaccactattgctagtttagttaatcttaaagaactcgacatcagtaaaaatggtgtacaagaatttccagaaaacataaagtgctgtaagtgtttaacaattattgaagccagtgtcaatcccatttctaaactacctgatggcttcacacagctcctaaacctgacccagctctacctgaatgacgcctttcttgaatttcttccagccaattttggaagacttgtcaaattgcggatcttggagttaagagaaaatcacttgaaaactctaccaaagtcaatgcacaaactggcccagttggaaagacttgacctaggcaataatgaattcggtgagctgcctgaagttctggatcaaatacaaaatttgagggagttatggatggataataatgcattacaagtgttacctgggtctatagggaagttaaagatgttggtatacctggatatgtcaaaaaacagaatagaaacagttgacatggacatttctggatgtgaagcccttgaggacctcttattgtcatccaatatgttgcaacaattgcctgattctataggacttttgaaaaaactaacaactctaaaagtagatgacaatcaacttacaatgctacccaatacaattggaaatttatctttattagaagaatttgactgtagctgtaatgaactggagtcactaccttctactattggctaccttcatagtcttcggacattagcagttgatgagaatttccttccagaattacccagagaaattggaagttgtaagaatgtaacagtcatgtctctacgctccaacaaattagaatttcttcctgaagagattggacagatgcagaaactaagagtcctaaatttgagtgacaacagattgaagaatttaccattctcatttaccaaacttaaagagcttgcagctttgtggctttctgacaatcagtccaaagcccttatccctttacaaacagaagcccatccagaaacaaagcaaagagtattgactaactacatgtttccccagcagcctcgtggtgatgaagatttccagtcagacagtgacagctttaaccctacactgtgggaagagcagagacaacaacgcatgactgttgcctttgaatttgaagacaaaaaagaagatgacgaaaatgctgggaaagttaaggatctctcctgccaagccccctgggaaaggggccagcgtgggattactctccaacctgccagactgtctggcgattgctgcacaccatgggccaggtgtgatcagcagatccaagatatgcccgtcccccagaatgacccacagctggcatggggttgtataagtggcctccagcaggaaaggagcatgtgtactccattgccagttgcagcacaatccaccactcttccctctctaagtggcagacaggttgaaataaacctaaaacgatatccaactccttacccagaggatttaaagaatatggtaaaatctgttcaaaatttggtgggtaagccaagccatggagtgcgtgttgagaattcaaatccaactgctaacacggagcaaactgtgaaagaaaaatatgaacacaagtggccggtagccccaaaggagattacagtggaggattcttttgttcatccagctaatgaaatgaggattggggaacttcacccttcattagctgagacccctctgtacccacccaaacttgttctgctagggaaggacaaaaaagaatcaactgatgagtctgaagttgacaaaactcactgtctgaataacagtgtttcctcaggcacttactcagactactcgccttcccaggcttcctcaggatcctctaatacccgggttaaagtggggtccttgcagacaacagctaaagatgcagtacataattctttgtggggtaacaggattgcaccatctttcccacagcctcttgattcaaagccattactcagccagcgggaggctgttcccccaggcaatataccacagcgtcctgaccggctgcccatgagtgatactttcactgacaactggactgatggctcgcattatgacaacacagggtttgttgctgaggaaaccacagccgagaatgccaacagtaatcctctcttaagttcgaaatctagaagcacatcttcgcatggacgcaggcctttgatcaggcaagacaggattgttggtgttcccctggaactcgagcagtctacacacagacacacaccagaaacagaagtgcctccttccaatccttggcagaattggaccagaacccctagtccgtttgaagacaggaccgcttttccttccaaattagagacaacccccactaccagcccattgcctgaaaggaaagaacatataaaggaatctactgaaatacctagtcctttttctccaggcgtaccatgggagtatcatgattccaatcccaacaggagtcttagtaatgtcttttctcaaatccactgccgcccggaatcttctaaaggtgttatttcaattagcaaaagcacagagaggctttcccccctaatgaaagatatcaagtctaataaattcaaaaagtcacagagtatcgatgagattgacattggtacatataaggtgtataacataccattagaaaactatgcttctgggagtgatcacttaggaagccacgaacgaccggataagatgctgggaccagagcatggtatgtccagtatgtctcgaagccagtcagtcccaatgctggatgatgagatgctcacctacggaagtagtaaggggccacaacaacaaaaagcttctatgacaaaaaaagtctatcagtttgaccaaagcttcaatcctcaaggatcagtggaagtgaaagccgaaaagaggataccacccccttttcaacacaatcccgagtacgtgcaacaggccagcaaaaacatcgccaaggatttgattagtcctagagcttacagaggatacccaccgatggagcaaatgttttcattttctcagccatctgtgaatgaggatgctgtggtgaatgcccagttcgcaagccaaggggccagggcgggcttcctgagaagggccgactccctggtgagcgccacagaaatggccatgtttagaagggtcaatgagcctcatgagctgcccccaactgataggtacggcagacccccatataggggagggctggatcgccaaagcagcgttacagtgactgagtcccagttcctgaaaaggaatggcaggtatgaagatgaacacccttcatatcaagaagtgaaagctcaggcgggaagttttccggttaaaaaccttacccaaaggaggccattgtctgcgagaagctacagtacagagagttacggtgcctcccaaaccaggccagtttcagctaggcctactatggcagctcttttggaaaaaataccatctgactataacttgggtaactatggtgacaagccatcagataacagtgatttaaagacgaggcctactcctgtgaagggagaggagagctgtggtaaaatgcctgcagactggagacaacagctgcttagacatatagaagctagacggttagacaggaatgctgcttacaaacacaatacagttaaccttggcatgctgccctatggaggtatttcagcaatgcatgcaggcagaagcatgactttaaacttgcagactaagtctaaatttgatcatcaagaactacctcttcagaaaaccccgtcccagcaaagcaacattttagacaatggacaagaagatgtatctcctagtggccaatggaatccttatccacttgggaggcgggatgtacctccggacaccattactaagaaggcaggcagccacatccagacgttgatggggtcccaaagccttcagcatcgcagccgggagcagcagccgtatgaaggaaatataaacaaagtgaccatccagcaatttcagtcaccattgcctattcagatcccctcttcacaggccacccggggacctcagcctggacggtgcttaattcaaactaaagggcaaaggagtatggatggatatccagagcagttttgtgtgagaatagaaaagaatcctggccttggatttagtatcagtggtggaattagtggacaaggaaatccattcaaaccttctgacaagggtatctttgttactagggttcagcctgatgggccagcatcaaacctactgcagcctggtgataagatccttcaggcaaatggacacagttttgtacatatggaacatgaaaaagctgtattactactgaagagtttccagaacacagtagacctagttattcaacgtgagcttactgtctaaatattttttataaatagtgaagatacgtctagccagacctaatgttcaaaaataaatttatacatagaaacaaattttgccaattgctggaccaatggcaaacattagtgccaaatgtataatactatatgttagcactgaccatccttaaaaaatgttaactctataaatatgatgttcatgtggttatgtattagttttaattgtcagcctctggctgtgcattggtgcagttttgtttctgtttttgtttttgtttttaatcaaataagtttcttctcaaaatggatttcatataatttcggagcacggaagcacacacaagctctttatgaattctgctctccatcagaaac

SEQ ID NO: 5313 - DNA, 3388 bp, Homo sapiens
agcagccagcagcgcgccggtggcgtgcggctcgaaaggccgggaggacgtcatcgacgcgctgtcgagcctccagcccgcccgggtttccttcgcagtcgcgcaccgacgctcaaacgcgcgctccaacccgcagcctcctcctgcctcaccgcccgaagatggcggctctcaaactcctctcctccgggcttcggctctgcgcctctgcccgcggatctggggcaacctggtacaagggatgtgtttgttccttttccaccagtgctcatcgccataccaagttttatacagatccagtagaagctgtaaaagacatccctgatggtgccacggttttggttggtggttttgggctatgtggaattccagagaatcttatagatgctttactgaaaactggagtaaaaggactaactgcagtcagcaacaatgcaggggttgacaattttggtttggggcttttgcttcggtccaagcagataaaacgcatggtctcttcatatgtgggagaaaatgcagaatttgaacgacagtacttatctggtgaattagaagtggagctgacaccacagggcacacttgcagagaggatccgtgcaggcggggctggagttcctgcattttacaccccaacagggtatgggaccctggtacaagaaggaggatcgcccatcaaatacaacaaagatggcagtgttgccattgccagtaagccaagagaggtgagggagttcaatggtcagcactttattttggaggaagcaattacaggggattttgctttggtgaaagcctggaaggcggaccgagcaggaaacgtgattttcaggaaaagtgcaaggaatttcaacttgccaatgtgcaaagctgcagaaaccacagtggtagaggttgaagaaattgtggatattggagcatttgctccagaagacatccatattcctcagatttatgtacatcgccttataaagggagaaaaatatgagaaaagaattgagcgtttatcaatccggaaagagggagatggggaagccaaatctgctaaacctggagatgacgtaagggaacgaatcatcaagagggccgctcttgagtttgaggatggcatgtatgctaatttgggcataggaatccctctcctggccagcaattttatcagcccaaatataactgttcatcttcaaagtgaaaatggagttctgggtttgggtccatatccacgacaacatgaagctgatgcagatctcatcaatgcaggcaaggaaacagttactattcttccaggagcctcttttttctccagcgatgaatcatttgcaatgattagaggtggacacgtcgatctgacaatgctaggagcgatgcaggtttccaaatatggtgacctggctaactggatgatacctgggaagatggtgaaaggaatgggaggtgctatggatttagtgtccagtgcgaaaaccaaagtggtggtcaccatggagcattctgcaaagggaaatgcacataaaatcatggagaaatgtacattaccattgactggaaagcaatgtgtcaaccgcattattactgaaaaggctgtgtttgatgtggacaagaagaaagggttgactctgattgagctctgggaaggcctgacagtggatgacgtacagaagagtactgggtgtgattttgcagtttcaccaaaactcatgccaatgcagcagatcgcaaattgaaatatggatatttgtaccaggctgcgtgtttttcattttaaacacacaagatttaattgaaaggacatcaataatcataattgtgtatttaacaggtggttttttattagttttcttgtgtttcagactttatgcagccatataaactgttctctaggcatgctgtgacattttaataaaaagcaaaaggagcatttataattatctcatttgttaaggctgagaaggttgtttttataataggtaattatattgaatgcattttcactgaatatggtatgtatgctaaattatatgaacctttccccaagaagggccctagaaattgatgtggctttcctcttaaatattaattattagtcctgaaagaaagataacatatgtgatttttgtggttaggagagttgctgtcatgattgttttttcttcagcctcctctgacttttcttttggggcttcagattttatgattacatcttgtccccctagaacatcccccttcctcccatactgcttttaaacagatgcccaagaaggcaagcaggaatgcctcttgtgggggagggcagggagaaataactagttcaaaccaactatctatctatgctttgcaaagactaaggcgtattataggaagagggctagaaacctaactgattcttctcagttttctcattttaaaacagcccagtattcctttgtatcctcaagggtccttgagaatacttctgttattgagaccctgtgggctacttgtactgtacctcctctcaagccaagaagggctgtgggataatttaccatgaatccttagtagcaatgacagcagagttaaaaaataaaaggtgttttactttcaggctcttgttttggttcagaggagattttaaatattgaatgacacttctacagaacaacggtttttcttctgccaaggctacttcctttaacgaagtgcctttaattcagccttatccaactagggaaaataatgttggacaagtctaggatttgaagagtcagtgaacttttagtgtcagggaataaacatggtgggtagattaggtttgaaaaaaacttccttagaggtatttattctcaatacctgacaggggcccatgggaatgacttcagaagcatcccggataatagatgggtaaaaagtctaggcaccctgaagaacaggtgagacagctggcctctggacagaggtaggcatagtacagtacgatatatcattcctctggtcctaaatatacaaacttattcatgtttttaggtgatgatggtcattgaaactcacttcttttcaggtgtagctacaattgtgtaatgtacaatattagagaaaggacaggctttttatgagtaacacacaccatatataaaacagcctttctggctgaccacatggttaaatgcataccttcccagtactggggggaaaaaatgacccttcttagaatgtgcaagttccatgagagtaatatattgatatgattttgaaaagaattgttgatagttacatcttcaaacttatcattccagtatgcatctttaagataatgtgattctaagtagatgactttatattcttgattgaagagtgctatacatgttaagaaatgcattaaggaatacaataaatattctaaagtgatgta

SEQ ID NO: 5314 - DNA, 2805 bp, Homo sapiens; identical to SEQ ID NO: 2107

SEQ ID NO: 5315 - DNA, 2169 bp, Homo sapiens
agcagcgctgctgtccccgccgtgcgcccttcgccgctgagctcgcagcctccggcgcccacctccacctccagtgtcccgcctcgggccgtcgccctccagcggctcgcgagcgtgggagacgtacctgggcaggcactgtccagcccaggcccaggcacagccgtgaggggcgaggcacggggacatcctggcggccaccatggtggccacgtgcctgcaggtggtgggcttcgtcacgagcttcgtgggctggatcggggtcatcgtgaccacctccaccaatgactgggtggtgacctgcggctacaccatccccacctgccgcaagctggatgagctgggctccaaggggctgtgggccgactgcgtcatggccacggggctgtaccactgcaagcccctggtggacatcctcatcctgccgggctacgtgcaggcctgccgcgccctgatgattgctgcctcggtcctgggtctgccggccattttactgctgctgactgttcttccctgcatccggatgggccaggagcccggtgtggctaagtacaggcgggcccagctggctggtgttttgctcattctgctggctctctgcgcccttgttgccaccatctggttccctgtgtgcgcccaccgtgagaccaccatcgtgagctttggctactccctgtatgcaggctggattggtgctgtgctgtgcctcgtgggtggctgtgtcatcctctgctgcgctggagatgcccaggcctttggtgaaaaccgtttctactacactgcgggctctagctccccgactcatgcgaagagtgcccacgtataagagggctgcccggctgcccacagaggtgctgtagatgctgggcccagggccctaggtttgctcgtcacagtgtggggaagcccattcctctgccaggctctaaagccaaaggtctagaaaagcatcctgtctggcattttgtagtcttaacttctccccatttcccccatcttttggttgccttaaaagaaatctctagctcagataatgcccagacatttttttcccttggtgttgcccctattagctcttttcttgggcattcttttgctgtttattaaaaatatattatatatattttgtttctttaaatttcaaatgttttgcaaacatcactgagttaggtgggggtggggaagagaaatacaagatacttttttttttttttttttttttttttttttaaatagggcctcactctgttgctcaggctggagtgcggtggtgtgatctcggctcatgtagcctcaacctccccggctcaagtgatcctcctgcctcagcctcccaagtagctgggactacaggcgttcactactacacccagctaatttttaagttttttatagagatgagggctccctatgttgcccaggttggtctcgaactcctggactcaaagtatcctcccgcctcggcctcccaaagtgttgggattataggagtgagccaccacaccggccaagatgcttttcaaactgatacagatgacaatgggagcctcataaagatggcttttgtttcttcccttcaaggtcatttacttgtacgagacagaaaaagatagcattggggacatgggatgggggagggagggcaatagtggaacgaactttccatgggaaactttcccttttgtaagttgagggccaggggtagggatattttttagtttgtgattttacatttatctgtacatactttttcaagattgatcatttttataaccatggttttcctgaaatcctcaattcatcaatatgaaggaaatgaaccacatagactttatgcaataaataacagtgcaagtgagtataactctaactgatgttccacaaaacatttttgatttcaggtttgtatgatgtagtttttaatcgtacattttcatatgcttcaaactaacacatttttaaagctttcccccacttttctctctatttgtattgttagccatcttgaagtgatgttgtttaacataaattgtactgttgaatttggctttacgggtgtaaacactgatggtatatcagtatctgagaccccaaactctccaaatactgatggtgcattttattcttgaagtgaaatctgtgcaataaaataacagactgtctgcaaaa

SEQ ID NO: 5316 - DNA, 1094 bp, Homo sapiens
ccgcgctcagcgccttcactgccatccccgctgtccttgccgcccccgccatgggcctagagctgtttcttgacctggtgtcccagcccagccgcgccgtctacatcttcgccaagaagaatggcatccccttagagctgcgcaccgtggatttggtcaaagggcagcacaagagcaaggagttcttgcagatcaacagcctggggaaactgccgacgctcaaggatggtgatttcatcttgaccgaaagctcggccatcctgatttacctgagctgtaagtaccagacgccggaccactggtatccatctgacctgcaggctcgtgcccgtgttcatgagtacctgggctggcatgccgactgcatccgtggcacctttggtatacccctgtgggtccaggtgttggggccactcattggggtccaggtgcccaaggagaaggtggaacgcaacaggactgccatggaccaggccctgcaatggctggaggacaagttcctgggggacaggcccttcctcgctggccagcaggtgacactggctgatctcatggccctggaggagctgatgcagccggtggctctcggctatgaactgtttgagggacggccacgactggcagcatggcgtggacgagtggaggctttcctgggtgctgagctatgccaggaggcccacagcatcatcttgagcatcctggaacaggcggccaagaaaaccctcccaacaccctcaccagaggcctatcaggctatgctgcttcgaatcgccaggatcccctgaagggtctgggatgggggccaggagattagcaacaaggattcattctgttacttacttgcccctttttatctttccctcttgccccagtcccttctctccagcttcatgtgaagctctgcacagacaagacactcagtgtccttggcagtgctgctactcctcaggtgcagcatacataaccagtaagagactaaatctgcaatatataaagagctcctacaaatcagtaacatgaagaacactcaaaaattggcaaatgtcatcagtgttttaaacagaataaagattccaaacactttgaatagagaa

SEQ ID NO: 5317 - DNA, 3520 bp, Homo sapiens
gagcagacaagtgcctcttgggcccgcttctctaacaaatgtaaaaataatgcccttgaaccaggagcgaaactgagctatctaaggaaaacactgtgagcaaatactgagagcctagggaaaccatctgattagaagagctcccctcaggagcgcgttagcttcacaccttcggcagcaggagggcggcagcttctcgcaggcggcagggcgggcggccaggatcatgtccaccaccacatgccaagtggtggcgttcctcctgtccatcctggggctggccggctgcatcgcggccaccgggatggacatgtggagcacccaggacctgtacgacaaccccgtcacctccgtgttccagtacgaagggctctggaggagctgcgtgaggcagagttcaggcttcaccgaatgcaggccctatttcaccatcctgggacttccagccatgctgcaggcagtgcgagccctgatgatcgtaggcatcgtcctgggtgccattggcctcctggtatccatctttgccctgaaatgcatccgcattggcagcatggaggactctgccaaagccaacatgacactgacctccgggatcatgttcattgtctcaggtctttgtgcaattgctggagtgtctgtgtttgccaacatgctggtgactaacttctggatgtccacagctaacatgtacaccggcatgggtgggatggtgcagactgttcagaccaggtacacatttggtgcggctctgttcgtgggctgggtcgctggaggcctcacactaattgggggtgtgatgatgtgcatcgcctgccggggcctggcaccagaagaaaccaactacaaagccgtttcttatcatgcctcaggccacagtgttgcctacaagcctggaggcttcaaggccagcactggctttgggtccaacaccaaaaacaagaagatatacgatggaggtgcccgcacagaggacgaggtacaatcttatccttccaagcacgactatgtgtaatgctctaagacctctcagcacgggcggaagaaactcccggagagctcacccaaaaaacaaggagatcccatctagatttcttcttgcttttgactcacagctggaagttagaaaagcctcgatttcatctttggagaggccaaatggtcttagcctcagtctctgtctctaaatattccaccataaaacagctgagttatttatgaattagaggctatagctcacattttcaatcctctatttctttttttaaatataactttctactctgatgagagaatgtggttttaatctctctctcacattttgatgatttagacagactccccctcttcctcctagtcaataaacccattgatgatctatttcccagcttatccccaagaaaacttttgaaaggaaagagtagacccaaagatgttattttctgctgtttgaattttgtctccccacccccaacttggctagtaataaacacttactgaagaagaagcaataagagaaagatatttgtaatctctccagcccatgatctcggttttcttacactgtgatcttaaaagttaccaaaccaaagtcattttcagtttgaggcaaccaaacctttctactgctgttgacatcttcttattacagcaacaccattctaggagtttcctgagctctccactggagtcctctttctgtcgcgggtcagaaattgtccctagatgaatgagaaaattattttttttaatttaagtcctaaatatagttaaaataaataatgttttagtaaaatgatacactatctctgtgaaatagcctcacccctacatgtggatagaaggaaatgaaaaaataattgctttgacattgtctatatggtactttgtaaagtcatgcttaagtacaaattccatgaaaagctcactgatcctaattctttccctttgaggtctctatggctctgattgtacatgatagtaagtgtaagccatgtaaaaagtaaataatgtctgggcacagtggctcacgcctgtaatcctagcactttgggaggctgaggaggaaggatcacttgagcccagaagttcgagactagcctgggcaacatggagaagccctgtctctacaaaatacagagagaaaaaatcagccagtcatggtggcctacacctgtagtcccagcattccgggaggctgaggtgggaggatcacttgagcccagggaggttggggctgcagtgagccatgatcacaccactgcactccagccaggtgacatagcgagatcctgtctaaaaaaataaaaaataaataatggaacacagcaagtcctaggaagtaggttaaaactaattctttaaaaaaaaaaaaaagttgagcctgaattaaatgtaatgtttccaagtgacaggtatccacatttgcatggttacaagccactgccagttagcagtagcactttcctggcactgtggtcggttttgttttgttttgctttgtttagagacggggtctcactttccaggctggcctcaaactcctgcactcaagcaattcttctaccctggcctcccaagtagctggaattacaggtgtgcgccatcacaactagctggtggtcagttttgttactctgagagctgttcacttctctgaattcacctagagtggttggaccatcagatgtttgggcaaaactgaaagctctttgcaaccacacaccttccctgagcttacatcactgcccttttgagcagaaagtctaaattccttccaagacagtagaattccatcccagtaccaaagccagataggccccctaggaaactgaggtaagagcagtctctaaaaactacccacagcagcattggtgcaggggaacttggccattaggttattatttgagaggaaagtcctcacatcaatagtacatatgaaagtgacctccaaggggattggtgaatactcataaggatcttcaggctgaacagactatgtctggggaaagaacggattatgccccattaaataacaagttgtgttcaagagtcagagcagtgagctcagaggcccttctcactgagacagcaacatttaaaccaaaccagaggaagtatttgtggaactcactgcctcagtttgggtaaaggatgagcagacaagtcaactaaagaaaaaagaaaagcaaggaggagggttgagcaatctagagcatggagtttgttaagtgctctctggatttgagttgaagagcatccatttgagttgaaggccacagggcacaatgagctctcccttctaccaccagaaagtccctggtcaggtctcaggtagtgcggtgtggctcagctgggtttttaattagcgcattctctatccaacatttaattgtttgaaagcctccatatagttagattgtgctttgtaattttgttgttgttgctctatcttattgtatatgcattgagtattaacctgaatgttttgttacttaaatattaaaaacactgttatcctaca

SEQ ID NO: 5318 - DNA, 1778 bp, Homo sapiens
ccttttcccctgcctgcccttcgggcacctcaggaaggcaccttcctctgtcagaatggccaccatggtaccatccgtgttgtggcccagggcctgctggactctgctggtctgctgtctgctgaccccaggtgtccaggggcaggagttccttttgcgggtggagccccagaaccctgtgctctctgctggagggtccctgtttgtgaactgcagtactgattgtcccagctctgagaaaatcgccttggagacgtccctatcaaaggagctggtggccagtggcatgggctgggcagccttcaatctcagcaacgtgactggcaacagtcggatcctctgctcagtgtactgcaatggctctcagataacaggctcctctaacatcaccgtgtacaggctcccggagcgtgtggagctggcacccctgcctccttggcagccggtgggccagaacttcaccctgcgctgccaagtggaggatgggtcgccccggaccagcctcacggtggtgctgcttcgctgggaggaggagctgagccggcagcccgcagtggaggagccagcggaggtcactgccactgtgctggccagcagagacgaccacggagcccctttctcatgccgcacagaactggacatgcagccccaggggctgggactgttcgtgaacacctcagccccccgccagctccgaacctttgtcctgcccgtgacccccccgcgcctcgtggccccccggttcttggaggtggaaacgtcgtggccggtggactgcaccctagacgggctttttccagcctcagaggcccaggtctacctggcgctgggggaccagatgctgaatgcgacagtcatgaaccacggggacacgctaacggccacagccacagccacggcgcgcgcggatcaggagggtgcccgggagatcgtctgcaacgtgaccctagggggcgagagacgggaggcccgggagaacttgacggtctttagcttcctaggacccattgtgaacctcagcgagcccaccgcccatgaggggtccacagtgaccgtgagttgcatggctggggctcgagtccaggtcacgctggacggagttccggccgcggccccggggcagccagctcaacttcagctaaatgctaccgagagtgacgacggacgcagcttcttctgcagtgccactctcgaggtggacggcgagttcttgcacaggaacagtagcgtccagctgcgagtcctgtatggtcccaaaattgaccgagccacatgcccccagcacttgaaatggaaagataaaacgagacacgtcctgcagtgccaagccaggggcaacccgtaccccgagctgcggtgtttgaaggaaggctccagccgggaggtgccggtggggatcccgttcttcgtcaacgtaacacataatggtacttatcagtgccaagcgtccagctcacgaggcaaatacaccctggtcgtggtgatggacattgaggctgggagctcccactttgtccccgtcttcgtggcggtgttactgaccctgggcgtggtgactatcgtactggccttaatgtacgtcttcagggagcaccaacggagcggcagttaccatgttagggaggagagcacctatctgcccctcacgtctatgcagccgacagaagcaatgggggaagaaccgtccagagctgagtgacgctgggatccgggatcaaagttggcgggggcttggctgtgccctcagattccgcaccaataaagccttcaaactccct

SEQ ID NO: 5319 - DNA, 1169 bp, Homo sapiens
cgcgccccccagtcccgcacccgttcggcccaggctaagttagccctcaccatgccggtcaaaggaggcaccaagtgcatcaaatacctgctgttcggatttaacttcatcttctggcttgccgggattgctgtccttgccattggactatggctccgattcgactctcagaccaagagcatcttcgagcaagaaactaataataataattccagcttctacacaggagtctatattctgatcggagccggcgccctcatgatgctggtgggcttcctgggctgctgcggggctgtgcaggagtcccagtgcatgctgggactgttcttcggcttcctcttggtgatattcgccattgaaatagctgcggccatctggggatattcccacaaggatgaggtgattaaggaagtccaggagttttacaaggacacctacaacaagctgaaaaccaaggatgagccccagcgggaaacgctgaaagccatccactatgcgttgaactgctgtggtttggctgggggcgtggaacagtttatctcagacatctgccccaagaaggacgtactcgaaaccttcaccgtgaagtcctgtcctgatgccatcaaagaggtcttcgacaataaattccacatcatcggcgcagtgggcatcggcattgccgtggtcatgatatttggcatgatcttcagtatgatcttgtgctgtgctatccgcaggaaccgcgagatggtctagagtcagcttacatccctgagcaggaaagtttacccatgaagattggtgggattttttgtttgtttgttttgttttgtttgttgtttgttgtttgtttttttgccactaattttagtattcattctgcattgctagataaaagctgaagttactttatgtttgtcttttaatgcttcattcaatattgacatttgtagttgagcggggggtttggtttgctttggtttatattttttcagttgtttgtttttgcttgttatattaagcagaaatcctgcaatgaaaggtactatatttgctagactctagacaagatattgtacataaaagaatttttttgtctttaaatagatacaaatgtctatcaactttaatcaagttgtaacttatattgaagacaatttgatacataataaaaaattatgacaatg

SEQ ID NO: 5320 - DNA, 3371 bp, Homo sapiens
aagatggcagcccaggctttggcgctgctgagagaggtagcgaggctggaagcgccgctggaggagctacgcgcgcttcactccgtgctgcaggcagtgccgctcaacgagcttcgccagcaagcggcggagctgcgcctcggcccgctcttctccctgcttaacgagaaccatagggaaaagactactttgtgtgtatccattctggagagattgctccaagctatggaaccggttcacgtggcccggaacctcagggttgacctgcagaggggactaattcaccctgatgattctgtaaaaatcctcactctttcccagattggaagaattgttgaaaattctgatgctgttactgagattctaaataatgctgaattactaaaacaaattgtttattgcattggtggagagaatctatctgtagcaaaagcggctatcaaatccctgtcaagaatatcactaacccaagctggactggaggctttatttgaaagcaatctgctggatgatttgaaaagtgtaatgaaaacaaatgacattgttcgatacagggtgtatgagctaattatagagatttcttccgtgtcaccagaatctttaaactactgtaccacaagtggattggtaacccagctcctgagagagctgactggtgaggatgtgttggtcagagccacctgtatagaaatggtgacatcactggcatatactcatcatgggcgacaatatcttgctcaagaaggagtaattgaccaaatttctaatataattgttggggcagattcagaccctttctctagcttctatctgccaggattcgtgaagttttttggaaacctggctgtcatggatagtcctcaacagatctgtgagcgttatcctatctttgtggaaaaagtctttgaaatgatagaaagtcaggaccccactatgattggtgtagctgtagacacagttggaatcttgggatccaatgttgaaggaaaacaggttttacagaaaacaggaactcgctttgaacgcttgcttatgagaataggacatcaatcaaagaatgccccagtggagctaaaaattagatgtttggatgcaatttcatctcttctgtacttaccacctgagcagcagactgatgaccttctgaggatgacagaatcctggttttcttctttatctcgggatccactggagctcttccgtggcattagtagtcagcccttccctgaactacactgtgctgccttaaaagtgtttacggccattgcaaaccaaccctgggctcagaaacttatgtttaacagtccaggttttgtagaatatgtggtggaccggtctgtggagcatgacaaagcttcaaaggatgccaaatatgaactagtgaaagcacttgccaattccaagacaattgcagaaatctttgggaacccaaattatttgaggctcagaacttacctgagtgaagggccatactatgtgaaacctgtttccacgacagcagtagaaggagccgaatgatttcttctagagctcatgtagaggaccacgttttgaccaaaacttctcctaaggcatttgactccatctatatttcacaaaagagacttcctttccccaagaattatcatggaatgtcagatgttactttgttaccaacactgttatatttctacattgaaatgcaaagtggaactaggagtttggaatgcattaagagcagacaagcttggtcataatagatccagtgtttttcagattcctttcactgccttaatctttgcaacagggtggaagtttttttcttccctcaaaattttcatggacatgcaatcttatctaaaagcctgcttcagggctgggcgcggtggctaacacctataattcccagcactttgggaggccaagatgggcaaatcacttgagtctaggagttcaagaccagcctggccaatatggcaaaaccctgtctctactaaaaatataaaatcagccaggcatggtggcgcacacctataatctcagctactcaggaggctgaggcacgagaatcgcttgagcctgggaggcagaggttgcagtgagctgagatcttgccactgcacaccagcctgggcaacacagcaagactctgtctcaaaaataaatgaataaaataaaaacctgccaccaaattatttctggattctcttcactatctttttttttctttttggtcctttttccatttctgattccactttcaaagtcttggatatattctttgaaaaatgagtagtatggaatattaagattatgttccttatactcagaatactttttatgagctctcttgtttttttgttactattattcctttgaaaaaaagacaaaatatctaaaaaatgtttatagtgttcatgtaattttttttgctgtttaccaatgaactttgccctgttgtggttttgggggatcagaaggattcctaaactgtcatttcatttattggtaggtcatgattgctgagggttttgctttggatttttcatacctataaagtcaatcttgagttgatcagagaaagggaaacttactcctaataaacagactcagaacagaagggacatatgcataaatcaggataccatctcattaatttacaaaggataatctttcttttcattgacaacacctacacccacctgttttccagtgttcttctctctaaacagcaaagccaaagcactctgcacaccaaatcacctgttcagaggtttatgcatgagcatatttcttttaggccgtggtgaagttgataaaccacccctgctttgtaacaaaattattttaaagtgactggaattatctagtccccagattgatcatctcccctggcaacgtgactctgttttttgtgtgtgtttccatgctgactagtcccctactgttaatatcactactaattaggctataaccaggtctttcctggcctgagaaatattctcttaaaatgacctttgttttaatctcattcatgatgttgattttttttcaatgtggtgcaatatatacaataaaatttgtcataactattttaagtgtacagttcagtatattacatatgttcataagttgtacaaccatcaccaccatccatcttcagaattattttcatcttatacaattgaaactgtattcattaaacaataactgtctattccctcttttccccagcctctggcaaccaccattctgcttcatgacattgattttattcacttaacatcagattttggggggatgccctctctcctatgtatggtctacacattctgattttttttttagattgaataaaatttgtaaatcattattttcatttcataagtaaa

SEQ ID NO: 5321 - DNA, 2756 bp, Homo sapiens
ccgggagcggtcaggcgcgtgaccccgcgtgaccggggtgcgcgagccgagaggccctggaagcgggactctgggaccccattgaaagaaaggcaaccagaaaaggcgaaacgacaacctcgatagtgattggagctgatggaacgagggcggagctaaagtcccagaatactggccaatcagagtttaagattatcagggagcccgggaaggggaaaggggcgaaatggttctatggtcacatgccgcggggtctggtgggaggagcggttgcccagcggcctcttggcgcttcctgtttccggttcccagagtggggcacagcgaggcgctagggggaacgctggcctctgaaactagctctgggaccggggtctgcggccggcccctagctggccccgtctcccatccccagaagggtattcactggggattctgagctttggctactccagtttcccacgacacgatgttccctttctacagctgctggaggactggactgctactactactcctggctgtggcagtgagagaatcctggcagacagaagaaaaaacttgcgacttggtaggagaaaagggtaaagagtcagagaaagagttggctctagtgaagaggctgaaaccactgtttaataaaagctttgagagcactgtgggccagggttcagacacatacatctacatcttcagggtgtgccgggaagctggcaaccacacttctggggcaggcctggtgcaaatcaacaaaagtaatgggaaggagacagtggtagggagactcaacgagactcacatcttcaacggaagtaattggatcatgctgatctataaagggggtgatgaatatgacaaccactgtggcaaggagcagcgtcgtgcagtggtgatgatctcctgcaatcgacacaccctagcggacaattttaaccctgtgtctgaggagcgtggcaaagtccaagattgtttctacctctttgagatggatagcagcctggcctgttcaccagagatctcccacctcagtgtgggttccatcttacttgtcacgtttgcatcactggttgctgtttatgttgttggggggttcctataccagcgactggtagtgggagccaaaggaatggagcagtttccccacttagccttctggcaggatcttggcaacctggtagcagatggctgtgactttgtctgccgttctaaacctcgaaatgtgcctgcagcatatcgtggtgtgggggatgaccagctgggggaggagtcagaagaaagggatgaccatttattaccaatgtagattgcactttatatgtccagcctcttcctcagtcccccaaaccaaagctacacagccagatttctcaagcagtctcaactccagtccctcatctcacccttactattgctcttgctttccagtttgcttttgatttgcatcttctcactagtaaaactgccttccctttgttccttattttctgttttttctctagagaggtacagttgtaagtcagagttaatataatagggcctgtgaaaacagaggcttttgcattgtctcttgacatcagaagttacaataggcatatgggcaaaatggtgtagcaggctcactggccgtttgttttttaaacacattttcacaagtttttgagacactggatttctttaattaaaaaaaaaatgccaagaaacattatttatacagggttgattgctttcatgttgttattctgtaccctatagtagcctccatgagaatctggtatttcttgctgcttggaactactttgcagtgattacttggttgcagtccaagtactctcgtttagtctgagcctggagatgttctagacttgcttctcccacctctgagattaggacaggaaaaatgtgaaatttcccaattacaggattatacggtaccatcacatcatttgtggaaattggggtgactgtatagctgggattgggctaaggactgtggtcttatctgtccacatacagccaaaatgcctatccagaaatccagttcgttggaaaggaaaattggtactcctgtgccacaggggttccagaaaagggaagtcactttaccttgcggtggtgggatcctgatgtctttcatccatttgtagtaaaagctggtaaagcttttcttactcctggttccctaccagtatttctaaacatgtcgcactttctccacaggcatgtggttttgacctttttttcaatcttctagaaagggaacggaagcagaagtgggacatcgagggctctgctgtcctctgcgctgggtgtggaatgctgctgcacctgtcccttctgctggctcagggaagtgtcttcttgcccacatttctgtggggaaaggtttttaatcctctgatgcttccatcttcctgtttaggccatgtgcccagaaacctggactgatctttctttaatagtgaacccctgggccactgaagagtaacatggctccactggacacaaaagagggatggaatcaacaggcagggggccttttataagccttaggaaaagaaaatgaaactatttcatctttggacttttcaatactattggagtgatttttttctttctaaacagggaaaataatgttacaaaagcatcttttttgttatttgtttgcatccctcccccacaccctggtgttttaaaatgaagaaaaaaaaccatcaccttttgtacaaaaactcttaatgattaaaaaacaaacaaaa

SEQ ID NO: 5322 - DNA, 2392 bp, Homo sapiens
aatgctacttgtaaacaaggctagaaagggtggagaatgaaatgagatggggggtggggaaacaaaccctttagttacaatatcttagggaaatgaatctacaataagacaaatttcaaatcaagttgctccactatactgcataagcagtttagaatcttaagcagatgcaaaaagaataaagcaaatgggaggaaaaaaaaggccgataaagtttctggctacaatacaagagacatatcattaccatatgatctaatgtgggtgtcagccggattgtgttcattgagggaaaccttattttttaactgtgctatggagtagaagcaggaggttttcaacctagtcacagagcagcacctaccccctcctcctttccacacctgcaaactcttttacttgggctgaatatttagtgtaattacatctcagctttgagggctcctgtggcaaattcccggattaaaaggttccctggttgtgaaaatacatgagataaatcatgaaggccactatcatcctccttctgcttgcacaagtttcctgggctggaccgtttcaacagagaggcttatttgactttatgctagaagatgaggcttctgggataggcccagaagttcctgatgaccgcgacttcgagccctccctaggcccagtgtgccccttccgctgtcaatgccatcttcgagtggtccagtgttctgatttgggtctggacaaagtgccaaaggatcttccccctgacacaactctgctagacctgcaaaacaacaaaataaccgaaatcaaagatggagactttaagaacctgaagaaccttcacgcattgattcttgtcaacaataaaattagcaaagttagtcctggagcatttacacctttggtgaagttggaacgactttatctgtccaagaatcagctgaaggaattgccagaaaaaatgcccaaaactcttcaggagctgcgtgcccatgagaatgagatcaccaaagtgcgaaaagttactttcaatggactgaaccagatgattgtcatagaactgggcaccaatccgctgaagagctcaggaattgaaaatggggctttccagggaatgaagaagctctcctacatccgcattgctgataccaatatcaccagcattcctcaaggtcttcctccttcccttacggaattacatcttgatggcaacaaaatcagcagagttgatgcagctagcctgaaaggactgaataatttggctaagttgggattgagtttcaacagcatctctgctgttgacaatggctctctggccaacacgcctcatctgagggagcttcacttggacaacaacaagcttaccagagtacctggtgggctggcagagcataagtacatccaggttgtctaccttcataacaacaatatctctgtagttggatcaagtgacttctgcccacctggacacaacaccaaaaaggcttcttattcgggtgtgagtcttttcagcaacccggtccagtactgggagatacagccatccaccttcagatgtgtctacgtgcgctctgccattcaactcggaaactataagtaattctcaagaaagccctcatttttataacctggcaaaatcttgttaatgtcattgctaaaaaataaataaaagctagatactggaaacctaactgcaatgtggatgttttacccacatgacttattatgcataaagccaaatttccagtttaagtaattgcctacaataaaaagaaattttgcctgccattttcagaatcatcttttgaagctttctgttgatgttaactgagctactagagatattcttatttcactaaatgtaaaatttggagtaaatatatatgtcaatatttagtaaagcttttcttttttaatttccaggaaaaaataaaaagagtatgagtcttctgtaattcattgagcagttagctcatttgagataaagtcaaatgccaaacactagctctgtattaatccccatcattactggtaaagcctcatttgaatgtgtgaattcaatacaggctatgtaaaatttttactaatgtcattattttgaaaaaataaatttaaaaatacattcaaaattactattgtatacaagcttaattgttaatattccctaaacacaattttatgaagggagaagacattggtttgttgacaataacagtacatcttttcaagttctcagctatttcttctacctctccctatcttacatttgagtatggtaacttatgtcatctatgttgaatgtaagcttataaagcacaaagcatacatttcctgactggtctagagaactgatgtttcaatttacccctctgctaaataaatattaaaactatcatgtgacttcatgtaa

SEQ ID NO: 5323 - DNA, 3198 bp, Homo sapiens
ccatcctggttcagccactgacagacagctccccaatccagcactctgcctgctccttcttgtatccaaccctccaaaaggcagggacaagggacagaagaccatgtgcaaggcctggaggaagtgggtcagcacaggcctgtgaacaagccaggccagtcttggcggcccaagtggagctcacctctccctcccctctcctctcctccccttgccctcaaaatagctccctgagctgccaggccaagaccctcccattgcaggggaggcggggcgtgctgcccagagccaggctttaaatccccttgaggctggggagctccactccttggctggaggcagtgctgaggccgccgtcccctctaccatcagtccagtccggcccgccctcctgcagccatgtcccggcccctgtcagaccaagagaaaagaaagcaaatcagtgtgcgtggcctggccggcgtggagaacgtgactgagctgaaaaagaacttcaaccggcacctgcatttcacactcgtaaaggaccgcaatgtggccaccccacgagactactactttgctctggcccataccgtgcgcgaccacctcgtggggcgctggatccgcacgcagcagcactactatgagaaggaccccaagaggatctactacctgtctttagagttctatatgggacggacgctacagaacaccatggtgaacctggccttagagaatgcctgtgacgaggccacctaccagctgggcctggacatggaggagctggaggaaattgaggaggatgcggggctgggcaacgggggcctgggccggctggcagcctgctttcttgactccatggcaacactgggcctggccgcctatggctacgggattcgctatgagtttgggatttttaaccagaagatctccgggggctggcagatggaggaggccgatgactggcttcgctacggcaacccctgggagaaggcccggcccgagttcacgctacctgtgcacttctacggccatgtggagcacaccagccagggtgccaagtgggtggacacacaggtggtactggccatgccctacgatacgcccgtgcctggctatcgcaacaatgttgtcaacaccatgcgcctctggtctgccaaggctcccaatgacttcaacctcaaggacttcaatgtcggtggctacatccaggctgtgttggaccgaaacctggcggagaacatctctcgtgtcctgtaccccaatgataatttcttcgaagggaaggagctgcggctgaagcaggagtatttcgtggtggctgccaccctccaggacatcatccgtcgcttcaagtcttccaagttcggctgccgtgatcccgtgcgcacgaacttcgatgccttcccagataaggtggccatccagctcaatgacacccacccctccctggccatccccgagctgatgaggatcctggtggacctggaacggatggactgggacaaggcgtgggatgtgacagtgaggacctgtgcctacaccaaccacacggtgctgcccgaggccctggagcgctggccggtgcacctcttggagacgctgctgccgcggcacctccagatcatctacgagatcaaccagcgcttcctcaaccgggtggcggccgcattcccaggggacgtagaccggctgcggcgcatgtcgctggtggaggagggcgcagtgaagcgcatcaacatggcacacctgtgcatcgcggggtcgcacgccgtcaacggcgtggcgcgcatccactccgagatcctcaagaagaccatcttcaaagacttctatgagctggagcctcataagttccagaataagaccaacggcatcacccctcggcgctggctggttctgtgtaaccccgggctggcagaggtcattgctgagcgcatcggggaggacttcatctctgacctggaccagctgcgcaaactgctctcctttgtggatgatgaagctttcattcgggatgtggccaaagtgaagcaggaaaacaagttgaagtttgctgcctacctagagagggaatacaaagtccacatcaaccccaactcactcttcgacatccaggtgaagcggattcacgaatataaacgacagctcctcaactgcctccatgtcatcaccctgtacaaccgcatcaagagggagcccaataagttttttgtgcctcggactgtgatgattggagggaaggctgcacctgggtaccacatggccaagatgatcatcagactcgtcacagccatcggggatgtggtcaaccatgacccggcagtgggtgaccgcctccgtgtcatcttcctggagaactaccgagtctcactggccgagaaagtgatcccagctgcagacctctctgagcagatctccactgcgggcactgaagcctcaggcaccggcaacatgaagttcatgctcaacggggctctgaccattggcaccatggacggggccaatgtggagatggcagaagaggcgggagaggaaaacttcttcatctttggcatgcgggtggaggatgtggataagcttgaccaaagagggtacaatgcccaggagtactacgatcgcattcctgagcttcggcaggtcattgagcagctgagcagtggcttcttctcccccaaacagcccgacctgttcaaggacattgtcaatatgctcatgcaccatgaccggtttaaagtcttcgcagattatgaagactacattaaatgccaggagaaagtcagcgccttgtacaagaacccaagagagtggacgcggatggtgatccggaacatagccacctctggcaagttctccagtgaccgcaccattgcccagtatgcccgggagatctggggtgtggagccttcccgccagcgcctgccagccccggatgaggccatctgagcctccagaccagaccccaaaccagcccttgagtctgtcacactctcttgggccagccccagcacctcatgcagagggtggggtactggagttagatctctaagcccctcctggaaccctcattttccccactctcaatgtcccagtgtccagcgtgactaaggacacgggcccccttccgtcctcgggctcccggtcccctcctatttatggggtctgaccaactgcacccactccctaataaattcattctccttgggagcctcctta

SEQ ID NO: 5324 - DNA, 2866 bp, Homo sapiens; identical to SEQ ID NO: 415

SEQ ID NO: 5325 - DNA, 981 bp, Homo sapiens
agatgcacaggaggagaagcaggagctgtcgggaagatcagaagccagtcatggatgaccagcgcgaccttatctccaacaatgagcaactgcccatgctgggccggcgccctggggccccggagagcaagtgcagccgcggagccctgtacacaggcttttccatcctggtgactctgctcctcgctggccaggccaccaccgcctacttcctgtaccagcagcagggccggctggacaaactgacagtcacctcccagaacctgcagctggagaacctgcgcatgaagcttcccaagcctcccaagcctgtgagcaagatgcgcatggccaccccgctgctgatgcaggcgctgcccatgggagccctgccccaggggcccatgcagaatgccaccaagtatggcaacatgacagaggaccatgtgatgcacctgctccagaatgctgaccccctgaaggtgtacccgccactgaaggggagcttcccggagaacctgagacaccttaagaacaccatggagaccatagactggaaggtctttgagagctggatgcaccattggctcctgtttgaaatgagcaggcactccttggagcaaaagcccactgacgctccaccgaaagtactgaccaagtgccaggaagaggtcagccacatccctgctgtccacccgggttcattcaggcccaagtgcgacgagaacggcaactatctgccactccagtgctatgggagcatcggctactgctggtgtgtcttccccaacggcacggaggtccccaacaccagaagccgcgggcaccataactgcagtgagtcactggaactggaggacccgtcttctgggctgggtgtgaccaagcaggatctgggcccagtccccatgtgagagcagcagaggcggtcttcaacatcctgccagccccacacagctacagctttcttgctcccttcagcccccagcccctcccccatct

SEQ ID NO: 5326 - DNA, 2572 bp, Homo sapiens
agccccgcgcccaccaccccagctggcgacgtggctccgcggccccggcttcccccggcagctcagcgaccaatgggcgcgcgagcggggccgcccgcagcttcccagcccgaggcccaggcgcgcccctctgctccggctcggggcgggcactggcggagggactggccagtcccctcctccgcgccggccccaaccctgtcgctgccgccgcgctccgagtccccattcccgagctgccgctgttgtcgctcgctcagcgtctccctctcggccgccctctcctcgggacgatggcgcgcggtggccgcggccgccgcctggggttagccctggggctgctgctggcgctggtgctggcgccgcgggttctgcgggccaagcccacggtgcgcaaagagcgcgtggtgcggcccgactcggagctgggcgagcggccccctgaggacaaccagagcttccagtacgaccacgaggccttcctgggcaaggaggactccaagaccttcgaccagctcaccccggacgagagcaaggagaggctagggaagattgttgatcgaatcgacaatgatggggatggctttgtcactactgaggagctgaaaacctggatcaaacgggtgcagaaaagatacatctttgataatgtcgccaaagtctggaaggattatgatagggacaaggatgataaaatttcctgggaagaatacaaacaagccacctatggttactacctaggaaaccccgcagagtttcatgattcttcagatcatcacacctttaaaaagatgctgccacgtgatgagagaagattcaaagctgcagacctcaatggtgacctgacagctactcgggaggagttcactgcctttctgcatcctgaagagtttgaacatatgaaggaaattgtggttttggaaaccctggaggacatcgacaagaacggggatgggtttgtggatcaggatgagtatattgcggatatgttttcccatgaggagaatggccctgagccagactgggttttatcagaacgggagcagtttaacgaattccgggatctgaacaaggacgggaagttagacaaagatgagattcgccactggatcctccctcaagattatgatcatgcacaggctgaggccaggcatctggtatatgaatcagacaaaaacaaggatgagaagctaactaaagaggaaatattggagaactggaacatgtttgtcggaagccaagctaccaattacggggaagatctcacaaaaaatcatgatgagctttgatagacactcaccagaatatggcagactgtcataggcattctgttattgtcttggattgttgctacaattgtctaatttacagcagttgtgatcccacaaaaagcaagtttatacctcagattggggtataaaaattgtttttcgctcagtatttactggaaaatggacatcactagtctttcagtaagatttctctcaaaacacgtgaaaaccttggtaaattgcaattctttctggggatatattggtacaacatgacttaaaacttttttttttctattaaaacttaaaggggaacaaaacttgaaaaagccctgttcttcagaaggtgagtgggttgagggaggcagtaatatgaagtgactgctgtgtattttaactaccagattttttatatttgccactgttaaatagttggaaaggggaaattctgattaagcgaaagtggtatcatcctaggtaagcttatttcagaacaagtctaatatttcagattctttcttttcgactttatactctgagttattacttactgtaagtggtgtatatgaaacctccatgcattttccagtatggatctgctaatatgcacagtaaatccatgtctttgtttgtttttctattaaaaagcaatcaagaaagataatgtgaaaaagaaaggaatttagaggtagggaaaagatgaatgtcagacatttgaagaactatagtaaaatgataaacactaaatatacttgagaaaactttcttaatatgccaatgaggtaggcctgatctttgaaatagtgaataggaatacaatgcatttcctcagtgatcactgattagaatgagttggtgggatccttgggaagccaaacggagcggagttctggatcatgtcccatccagtccagtgaatccacgacccgcagacctgtccccccgcaacagcttataccatggaatgaggacaaggtgatactctgagctgtggactgaactggcagacacaacctgtacagattgaaatttcaccttgtaaggaggaagtgaatgaaataaaggatccccctaaggattttctactgtgtcctgtggtgtttgacttcacagatgctatttgtgacattattcatatagcataaaacagtggggttggatcccatgaataacattataaaggttctggggttttttttcatccaattactagaatgttcagaatagactcatatttactaatttaataaatgtatgtacttaatgcctttacttttctaggtcattttaactataaaatc

SEQ ID NO: 5327 - DNA, 4647 bp, Homo sapiens
gggggataggctcagacacaaggagaggcttggagagagcagacgccttctggattcaagaagacgaggcccattcccctcaggctcacctgttactcggcctcccagaaagatggataggagaaatgactacggatatagggtgcctctatttcagggccctctgcctcccccggggagcctggggcttcccttccctccagatatacagactgagaccacagaagaggacagtgtcctgctgatgcataccctgttggcggcaaccaaggactccctggccatggacccaccagttgtcaaccggcctaagaaaagcaagaccaagaaggcccctataaagactattactaaggctgcacctgctgcccctccagtcccagctgccaatgagattgccaccaacaagcccaaaataacttggcaggctttaaacctgccagtcattacccagatcagccaggctttacctaccactgaggtaaccaatactcaggcttcttcagtcactgctcagcctaagaaagccaacaagatgaagagagttactgccaaggcagcccaaggctcccaatccccaactggccatgagggtggcactatacagctgaagtcacccttgcaggtcctaaagctaccagtcatctcacagaatattcacgctccaattgccaatgagtcagccagttcccaagccttgataacctctatcaagcctaagaaagcttccaaggctaagaaggctgcaaataaggccatagctagtgccaccgaggtctcgctggctgcaactgccacccatacagctaccacccaaggccaaattaccaatgagacagccagtatccacaccacagcagcctccatccgaaccaagaaagcctccaaagccaggaagacaattgctaaggtcataaatactgacactgagcatatagaggctctaaatgtcactgacgcagctaccaggcagattgaggcctcagtagtggctatcaggcccaaaaaatccaagggcaagaaggctgccagcaggggcccaaattctgtctctgagatctctgaggccccacttgccactcagatagtcacaaaccaagccctggcagccaccctgcgggtcaagagagggtctagggctcggaaggctgccactaaggctcgggcaactgaaagccagactccaaatgctgaccaaggggcccaggccaagatagcctctgctcagaccaacgtaagtgcccttgagactcaggttgctgctgctgtccaggccctggcagatgactatctggctcagttgagcctggagcccacaaccaggacccggggcaaaagaaaccgaaagtccaagcatctgaatggggatgagagaagtggcagtaattacaggcggatcccatggggccggaggcctgcaccaccgcgagatgtggccattttacaagaaagggctaataagttggtgaaatacctgttggttaaggaccagacaaagatccccatcaaacgctcagacatgctgagggatgtcatccaagaatatgatgaatatttcccagaaatcattgaacgagcaagctacactctggagaagatgtttcgagtcaatctgaaagaaattgataagcaaagtagcttgtatattctcatcagcactcaggaatcctctgcaggcatactgggaacgaccaaggacacacccaagctgggtctcctcatggtgattctgagtgtcatttttatgaatggcaacaaggccagtgaggctgtcatctgggaggtgctgcgcaagttggggctgcgccctggggtgaggcattcactctttggggaagtgaggaagctcatcacagacgagtttgtgaagcagaagtacctggagtacaagagggtccctaacagcagaccacctgaatatgagttcttctggggcttgcgctcctaccacgagactagcaagatgaaagtcctcaagtttgcatgcagggtgcagaagaaagaccccaaggactgggctgtgcagtaccgcgaggcagtggagatggaagtccaagctgcagctgtggctgtggctgaggctgaagccagggctgaggcaagagcccaaatggggattggagaggaagctgtggctgggccctggaattgggatgacatggatatcgactgcctaacaagggaagagttaggcgatgatgctcaggcctggagcagattttcatttgaaattgaggccagagcccaagaaaatgcagatgccagcaccaacgtcaacttcagcagaggagctagtaccagggctggcttcagcgatggtgctagtattagcttcaatggtgcacccagctccagtggtggcttcagtggtggacctggcattacctttggtgttgcacccagcaccagtgccagcttcagcaatacagccagcattagctttggtggtacactgagcactagctccagcttcagcagcgcagccagcattagctttggttgtgcacacagcaccagcactagtttcagcagtgaagccagcattagctttggtggcatgccttgtaccagtgccagctttagtggtggagtcagctctagttttagtggcccactcagcaccagtgccactttcagtggtggagccagctctggctttggaggcacactcagcaccacggctggctttagtggtgtactcagcactagcaccagctttggcagtgcacccacaacgagcacagtcttcagtagtgcgcttagcaccagcactggctttggaggcatactcagcaccagtgtctgttttggtggctctcccagctccagtggtagctttggtggtacactcagtaccagtatctgcttcggtggctctccctgcaccagcactggctttggaggcacacttagcaccagtgtctcctttggtggctcttccagcaccagtgccaattttggtggtacactaagtaccagcatctgctttgatggctctcccagcactggtgctggctttggtggtgctctcaacaccagtgccagctttggcagtgtgctcaacaccagtactggttttggtggtgctatgagcaccagtgctgactttggcggtacactaagcaccagtgtctgctttggtggctctcctggcaccagtgtcagctttggcagtgcactcaacaccaatgctggttatggtggtgctgtcagcaccaacactgactttggtggtacactaagcaccagcgtctgttttggtggctctcccagcaccagtgctggctttggtggtgcactcaacaccaatgccagctttggctgtgccgtcagcaccagtgccagcttcagtggtgctgtcagcaccagtgcttgcttcagtggtgcaccaatcaccaaccctggctttggcggtgcatttagcaccagtgctggcttcggtggggcacttagtaccgctgctgacttcggtggtactcccagcaacagcattggctttggtgctgctcccagcaccagtgtcagctttggtggtgctcatggcaccagcctctgttttggtggagctcccagcaccagcctctgctttggcagtgcatctaatactaacctatgctttggtggccctcctagcaccagtgcctgctttagtggtgctaccagccctagtttttgtgatggacccagcaccagtaccggtttcagctttggcaatgggttaagcaccaatgctggatttggtggtggactgaacaccagtgctggctttggtggtggcctaggcaccagtgctggcttcagtggtggcctaagcacaagttctggctttgatggtgggctaggtaccagcgctggcttcggtggaggaccaggcaccagcactggttttggtggtggactgggcaccagtgctggcttcagtggcggactgggcaccagtgctggctttggtggtggactggtcactagtgatggctttggtggtggactgggcaccaatgctagtttcggcagcacacttggcaccagtgctggctttagtggtggcctcagcaccagcgatggctttggcagtaggcctaatgccagcttcgacagaggactgagtaccatcattggctttggcagtggttccaacaccagcactggctttactggcgaacccagcaccagcacgggcttcagtagtggacccagttctattgttggcttcagcggtggaccaagcactggtgttggcttctgcagtggaccaagcaccagtggcttcagcggtggaccgagcacaggagctggcttcggcggtggaccaaacactggtgctggctttggtggtggaccgagcaccagtgctggctttggcagtggagccgccagtcttggtgcctgtggcttctcgtatggctagtgaggtttcagatttattccccatgtttacagataccgctaataaattgcagtagtccttcccatggagccaaagtacatccttggaatctttgtccacacagcagtcaaggcagttatggccaatcagctgagggtgtcatgtgatggaaaaatctgtttgctgttcctgctttattgtttgctttctgtgtgctgtcatattttggtatcagagttacattaaatttgcaaaatgaa

SEQ ID NO: 5328 - DNA, 1642 bp, Homo sapiens
ccgcctcgcgccgagactagaagcgctgcgggaagcagggacagtggagagggcgctgcgctcgggctacccaatgcgtggactatctgccgccgctgttcgtgcaatatgctggagctccagaacagctaaacggagtcgccacaccactgtttgtgctggatcgcagcgctgcctttccttatgaagaagacacaaacttggattctcacttgcatttatcttcagctgctcctatttaatcctctcgtcaaaactgaagggatctgcaggaatcgtgtgactaataatgtaaaagacgtcactaaattggtggcaaatcttccaaaagactacatgataaccctcaaatatgtccccgggatggatgttttgccaagtcattgttggataagcgagatggtagtacaattgtcagacagcttgactgatcttctggacaagttttcaaatatttctgaaggcttgagtaattattccatcatagacaaacttgtgaatatagtggatgaccttgtggagtgcgtgaaagaaaactcatctaaggatctaaaaaaatcattcaagagcccagaacccaggctctttactcctgaagaattctttagaatttttaatagatccattgatgccttcaaggactttgtagtggcatctgaaactagtgattgtgtggtttcttcaacattaagtcctgagaaagattccagagtcagtgtcacaaaaccatttatgttaccccctgttgcagccagctcccttaggaatgacagcagtagcagtaataggaaggccaaaaatccccctggagactccagcctacactgggcagccatggcattgccagcattgttttctcttataattggctttgcttttggagccttatactggaagaagagacagccaagtcttacaagggcagttgaaaatatacaaattaatgaagaggataatgagataagtatgttgcaagagaaagagagagagtttcaagaagtgtaattgtggcttgtatcaacactgttactttcgtacattggctggtaacagttcatgtttgcttcataaatgaagcagctttaaacaaattcatattctgtctggagtgacagaccacatctttatctgttcttgctacccatgactttatatggatgattcagaaattggaacagaatgttttactgtgaaactggcactgaattaatcatctataaagaagaacttgcatggagcaggactctattttaaggactgcgggacttgggtctcatttagaacttgcagctgatgttggaagagaaagcacgtgtctcagactgcatgtaccatttgcatggctccagaaatgtctaaatgctgaaaaaacacctagctttattcttcagatacaaactgcagcctgtagttatcctggtctctgcaagtagatttcagcttggatagtgagggtaacaatttttctcaaagggatctggaaaaaatgtttaaaactcagtagtgtcagccactgtacagtgtagaaagcagtgggaactgtgattggatttggcaacatgtcagctttatagttgccgattagtgatatgggtctgatttcgatctcttcctgatgtaaaccatgctcacccatatccca

SEQ ID NO: 5329 - DNA, 3741 bp, Homo sapiens
tggggtgacgaggtcgtgcactgagggtggacgtagaggccaggagtagcaggcggccggggaaaagaggtggagaaaggaaaaaagaggagaaaagtggaggagggcgagtaggggggtggggcagagaggggcgggcccgagtgcgccccccgcccccagccccgctctgccagctccctcccagcccagccggctacatctggcggctgccctcccttgtttccgctgcatccagacttcctcaggcggtggctggaggctgcgcatctggggctttaaacatacaaagggattgccaggacctgcggcggcggcggcggcggcgggggctggggcgcgggggccggaccatgagccgctgagccgggcaaaccccaggccaccgagccagcggaccctcggagcgcagccctgcgccgcggagcaggctccaaccaggcggcgaggcggccacacgcaccgagccagcgacccccgggcgacgcgcggggccagggagcgctacgatggaggcgctaatggcccggggcgcgctcacgggtcccctgagggcgctctgtctcctgggctgcctgctgagccacgccgccgccgcgccgtcgcccatcatcaagttccccggcgatgtcgcccccaaaacggacaaagagttggcagtgcaatacctgaacaccttctatggctgccccaaggagagctgcaacctgtttgtgctgaaggacacactaaagaagatgcagaagttctttggactgccccagacaggtgatcttgaccagaataccatcgagaccatgcggaagccacgctgcggcaacccagatgtggccaactacaacttcttccctcgcaagcccaagtgggacaagaaccagatcacatacaggatcattggctacacacctgatctggacccagagacagtggatgatgcctttgctcgtgccttccaagtctggagcgatgtgaccccactgcggttttctcgaatccatgatggagaggcagacatcatgatcaactttggccgctgggagcatggcgatggatacccctttgacggtaaggacggactcctggctcatgccttcgccccaggcactggtgttgggggagactcccattttgatgacgatgagctatggaccttgggagaaggccaagtggtccgtgtgaagtatgggaacgccgatggggagtactgcaagttccccttcttgttcaatggcaaggagtacaacagctgcactgataccggccgcagcgatggcttcctctggtgctccaccacctacaactttgagaaggatggcaagtacggcttctgtccccatgaagccctgttcaccatgggcggcaacgctgaaggacagccctgcaagtttccattccgcttccagggcacatcctatgacagctgcaccactgagggccgcacggatggctaccgctggtgcggcaccactgaggactacgaccgcgacaagaagtatggcttctgccctgagaccgccatgtccactgttggtgggaactcagaaggtgccccctgtgtcttccccttcactttcctgggcaacaaatatgagagctgcaccagcgccggccgcagtgacggaaagatgtggtgtgcgaccacagccaactacgatgatgaccgcaagtggggcttctgccctgaccaagggtacagcctgttcctcgtggcagcccacgagtttggccacgccatggggctggagcactcccaagaccctggggccctgatggcacccatttacacctacaccaagaacttccgtctgtcccaggatgacatcaagggcattcaggagctctatggggcctctcctgacattgaccttggcaccggccccacccccacgctgggccctgtcactcctgagatctgcaaacaggacattgtatttgatggcatcgctcagatccgtggtgagatcttcttcttcaaggaccggttcatttggcggactgtgacgccacgtgacaagcccatggggcccctgctggtggccacattctggcctgagctcccggaaaagattgatgcggtatacgaggccccacaggaggagaaggctgtgttctttgcagggaatgaatactggatctactcagccagcaccctggagcgagggtaccccaagccactgaccagcctgggactgccccctgatgtccagcgagtggatgccgcctttaactggagcaaaaacaagaagacatacatctttgctggagacaaattctggagatacaatgaggtgaagaagaaaatggatcctggcttccccaagctcatcgcagatgcctggaatgccatccccgataacctggatgccgtcgtggacctgcagggcggcggtcacagctacttcttcaagggtgcctattacctgaagctggagaaccaaagtctgaagagcgtgaagtttggaagcatcaaatccgactggctaggctgctgagctggccctggctcccacaggcccttcctctccactgccttcgatacaccgggcctggagaactagagaaggacccggaggggcctggcagccgtgccttcagctctacagctaatcagcattctcactcctacctggtaatttaagattccagagagtggctcctcccggtgcccaagaatagatgctgactgtactcctcccaggcgccccttccccctccaatcccaccaaccctcagagccacccctaaagagatactttgatattttcaacgcagccctgctttgggctgccctggtgctgccacacttcaggctcttctcctttcacaaccttctgtggctcacagaacccttggagccaatggagactgtctcaagagggcactggtggcccgacagcctggcacagggcagtgggacagggcatggccaggtggccactccagacccctggcttttcactgctggctgccttagaacctttcttacattagcagtttgctttgtatgcactttgtttttttctttgggtcttgttttttttttccacttagaaattgcatttcctgacagaaggactcaggttgtctgaagtcactgcacagtgcatctcagcccacatagtgatggttcccctgttcactctacttagcatgtccctaccgagtctcttctccactggatggaggaaaaccaagccgtggcttcccgctcagccctccctgcccctcccttcaaccattccccatgggaaatgtcaacaagtatgaataaagacacctactgagtggccgtgtttgccatctgttttagcagagcctagacaagggccacagacccagccagaagcggaaacttaaaaagtccgaatctctgctccctgcagggcacaggtgatggtgtctgctggaaaggtcagagcttccaaagtaaacagcaagagaacctcagggagagtaagctctagtccctctgtcctgtagaaagagccctgaagaatcagcaattttgttgctttattgtggcatctgttcgaggtttgcttcctctttaagtctgtttcttcattagcaatcatatcagttttaatgctactactaacaatgaacagtaacaataatatccccctcaattaatagagtgctttctatgtgcaaggcacttttcacgtgtcacctattttaacctttccaaccacataaataaaaaaggccattattagttgaatcttattgatgaagaga

SEQ ID NO: 5330 - DNA, 1652 bp, Homo sapiens
cccggaggagtcacgtagctctgcgacatccgcagcctcatttaccagagggagccagggctgcagcctcatctgtttgcggatcagaacccgagctgtgcttgtggctgcggctgctaactggctgcgcacagggagctgtcaccatgcctcactcgtacccagccctttctgctgagcagaagaaggagttgtctgacattgccctgcggattgtagccccgggcaaaggcattctggctgcggatgagtctgtaggcagcatggccaagcggctgagccaaattggggtggaaaacacagaggagaaccgccggctgtaccgccaggtcctgttcagtgctgatgaccgtgtgaaaaagtgcattggaggcgtcattttcttccatgagaccctctaccagaaagatgataatggtgttcccttcgtccgaaccatccaggataagggcatcgtcgtgggcatcaaggttgacaagggtgtggtgcctctagctgggactgatggagaaaccaccactcaagggctggatgggctctcagaacgctgtgcccaatacaagaaggatggtgctgactttgccaagtggcgctgtgtgctgaaaatcagtgagcgtacaccctctgcacttgccattctggagaacgccaacgtgctggcccgttatgccagtatctgccagcagaatggcattgtgcctattgtggaacctgaaatattgcctgatggagaccacgacctcaaacgttgtcagtatgttacagagaaggtcttggctgctgtgtacaaggccctgagtgaccatcatgtatacctggaggggaccctgctcaagcccaacatggtgaccccgggccatgcctgtcccatcaagtataccccagaggagattgccatggcaactgtcactgccctgcgtcgcactgtgcccccagctgtcccaggagtgaccttcctgtctgggggtcagagcgaagaagaggcatcattcaacctcaatgccatcaaccgctgcccccttccccgaccctgggcgcttaccttctcctatgggcgtgccctgcaagcctctgcactcaatgcctggcgagggcaacgggacaatgctggggctgccactgaggagttcatcaagcgggctgaggtgaatgggcttgcagcccagggcaagtatgaaggcagtggagaagatggtggagcagcagcacagtcactctacattgccaaccatgcctactgagtatccactccataccacagcccttggcccagccatctgcacccacttttgcttgtagtcatggccagggccaaatagctatgcagagcagagatgccttcacctggcaccaacttgtcttcctttctctcttcccttcccctctctcattgctgcacctgggaccataggatgggaggatagggagcccctcatgactgagggcagaagaaattgctagaagtcagaacaggatggctgggtctccccctacctcttccagctcccacaattttcccatgatgaggtagcttctccctgggctctccttcttgcctgccctgtctcctgggatcagagggtagtacagaagccctgactcatgccttgagtacataccatacagcaaataaatggtagcaaaacattcta

SEQ ID NO: 5331 - DNA, 732 bp, Homo sapiens
agactaacccagaaacatccaattctcaaactgaagctcgcactctcgcctccagcatgaaagtctctgccgcccttctgtgcctgctgctcatagcagccaccttcattccccaagggctcgctcagccagatgcaatcaatgccccagtcacctgctgttataacttcaccaataggaagatctcagtgcagaggctcgcgagctatagaagaatcaccagcagcaagtgtcccaaagaagctgtgatcttcaagaccattgtggccaaggagatctgtgctgaccccaagcagaagtgggttcaggattccatggaccacctggacaagcaaacccaaactccgaagacttgaacactcactccacaacccaagaatctgcagctaacttattttcccctagctttccccagacaccctgttttattttattataatgaattttgtttgttgatgtgaaacattatgccttaagtaatgttaattcttatttaagttattgatgttttaagtttatctttcatggtactagtgttttttagatacagagacttggggaaattgcttttcctcttgaaccacagttctacccctgggatgttttgagggtctttgcaagaatcattaatacaaagaattttttttaacattccaatgcattgctaaaatattattgtggaaatgaatattttgtaactattacaccaaataaatatatttttgtacaaaa

SEQ ID NO: 5332 - DNA, 2975 bp, Homo sapiens
tgtgacagcccccgggccgcctgcacttgcagcctccttccccccgagcggagctgcggggccggccgggccggggctggaccccgggaacccggacgcggccgcccgggcccgcgggcggggggatcggcgggggggacccgcggggtgaccggcggcaggagccgccaccatggagttccgccaggaggagtttcggaagctagcgggtcgtgctctcgggaagctgcaccgccttctggagaagcggcaggaaggcgcggagacgctggagctgagtgcggatgggcgcccggtgaccacgcagacccgggacccgccggtggtggactgcacctgcttcggcctccctcgccgctacattatcgccatcatgagtggtctgggcttctgcatcagctttggcatccgctgcaacctgggcgtggccatcgtctccatggtcaataacagcacgacccaccgcgggggccacgtggtggtgcagaaagcccagttcagctgggatccagagactgtcggcctcatacacggctcctttttctggggctacattgtcactcagattccaggaggatttatctgtcaaaaatttgcagccaacagagttttcggctttgctattgtggcaacatccactctaaacatgctgatcccctcagctgcccgcgtccactatggctgtgtcatcttcgtgaggatcctgcaggggttggtagagggggtcacataccccgcctgccatgggatctggagcaaatgggccccacccttagaacggagtcgcctggcgacgacagccttttgtggttcctatgctggggcggtggtcgcgatgcccctcgccggggtccttgtgcagtactcaggatggagctctgttttctacgtctacggcagcttcgggatcttctggtacctgttctggctgctcgtctcctacgagtcccccgcgctgcaccccagcatctcggaggaggagcgcaagtacatcgaggacgccatcggagagagcgcgaaactcatgaaccccctcacgaagtttagcactccctggcggcgcttcttcacgtctatgccagtctatgccatcatcgtggccaacttctgccgcagctggacgttctacctgctgctcatctcccagcccgcctacttcgaagaagtgttcggcttcgagatcagcaaggtaggcctggtgtccgcgctgccccacctggtcatgaccatcatcgtgcccatcggcggccagatcgcggacttcctgcggagccgccgcatcatgtccaccaccaacgtgcgcaagttgatgaactgcggaggcttcggcatggaagccacgctgctgttggtggtcggctactcgcactccaagggcgtggccatctccttcctggtcctagccgtgggcttcagcggcttcgccatctctgggttcaacgtgaaccacctggacatagccccgcgctacgccagcatcctcatgggcatctccaacggcgtgggcacactgtcgggcatggtgtgccccatcatcgtgggggccatgactaagcacaagactcgggaggagtggcagtacgtgttcctaattgcctccctggtgcactatggaggtgtcatcttctacggggtctttgcttctggagagaagcagccgtgggcagagcctgaggagatgagcgaggagaagtgtggcttcgttggccatgaccagctggctggcagtgacgacagcgaaatggaggatgaggctgagcccccgggggcaccccctgcacccccgccctcctatggggccacacacagcacatttcagccccccaggcccccaccccctgtccgggactactgaccatgtgcctcccactgaatggcagtttccaggacctccattccactcatctctggcctgagtgacagtgtcaaggaaccctgctcctctctgtcctgcctcaggcctaagaagcactctcccttgttcccagtgctgtcaaatcctctttccttcccaattgcctctcaggggtagtgaagctgcagactgacagtttcaaggatacccaaattcccctaaaggttccctctccacccgttctgcctcagtggtttcaaatctctcctttcagggctttatttgaatggacagttcgacctcttactctctcttgtggttttgaggcacccacaccccccgctttcctttatctccagggactctcaggctaacctttgagatcactcagctcccatctcctttcagaaaaattcaaggtcctcctctagaagtttcaaatctctcccaactctgttctgcatcttccagattggtttaaccaattactcgtccccgccattccagggattgattctcaccagcgtttctgatggaaaatggcggtttcaagtccccgattccgtgcccacttcacatctcccctaccagcagattctgcgaaagcaccaaatttctcaagaccctcttctccctagcttagcataatgtctggggaaacaaccaaaatcgcaattttaacaatatgcctctctacccccgtgcactttttctgacatggttttcaggtctaaatagtggctgctccagtccatgaactcaaaggtttgaagctaccaccattgaactcccccatggtggtttcatgatgccccctccccaattcctcgcactttattctcctgggtggtttcgaactaccctgtttctcagtggccatttgttgtgtccctcaggggcttaatgactcaaaatctgggatccttcccctctcagacacccctctttcagcttagaatttggggaacctatagagaagtcacagaatcccatgaaagggaatggggcaggagccaggggtgttttttcccagtgcagggttgtgtctttgtgtctctgtctctgtgactgtaaatcctgccctgccccactcccaataaaagctttggtgtataggctc

SEQ ID NO: 5333 - DNA, 3315 bp, Homo sapiens
gttccattcccgggggattggagtagcgttggagtcaccgacgccatcccctcccgcctctggcgtgcatggagcatgcgcttccttcctcacttcctctgcaggagggagcgagagtaaagctacgccctggcgcgcagtctccgcgtcacaggaacttcagcacccacagggcggacagcgctcccctctacctggagacttgactcccgcgcgccccaaccctgcttatcccttgaccgtcgagtgtcagagatcctgcagccgcccagtcccggcccctctcccgccccacacccaccctcctggctcttcctgtttttactcctccttttcattcataacaaaagctacagctccaggagcccagcgccgggctgtgacccaagccgagcgtggaagaatggggttcctcgggaccggcacttggattctggtgttagtgctcccgattcaagctttccccaaacctggaggaagccaagacaaatctctacataatagagaattaagtgcagaaagacctttgaatgaacagattgctgaagcagaagaagacaagattaaaaaaacatatcctccagaaaacaagccaggtcagagcaactattcttttgttgataacttgaacctgctaaaggcaataacagaaaaggaaaaaattgagaaagaaagacaatctataagaagctccccacttgataataagttgaatgtggaagatgttgattcaaccaagaatcgaaaactgatcgatgattatgactctactaagagtggattggatcataaatttcaagatgatccagatggtcttcatcaactagacgggactcctttaaccgctgaagacattgtccataaaatcgctgccaggatttatgaagaaaatgacagagccgtgtttgacaagattgtttctaaactacttaatctcggccttatcacagaaagccaagcacatacactggaagatgaagtagcagaggttttacaaaaattaatctcaaaggaagccaacaattatgaggaggatcccaataagcccacaagctggactgagaatcaggctggaaaaataccagagaaagtgactccaatggcagcaattcaagatggtcttgctaagggagaaaacgatgaaacagtatctaacacattaaccttgacaaatggcttggaaaggagaactaaaacctacagtgaagacaactttgaggaactccaatatttcccaaatttctatgcgctactgaaaagtattgattcagaaaaagaagcaaaagagaaagaaacactgattactatcatgaaaacactgattgactttgtgaagatgatggtgaaatatggaacaatatctccagaagaaggtgtttcctaccttgaaaacttggatgaaatgattgctcttcagaccaaaaacaagctagaaaaaaatgctactgacaatataagcaagcttttcccagcaccatcagagaagagtcatgaagaaacagacagtaccaaggaagaagcagctaagatggaaaaggaatatggaagcttgaaggattccacaaaagatgataactccaacccaggaggaaagacagatgaacccaaaggaaaaacagaagcctatttggaagccatcagaaaaaatattgaatggttgaagaaacatgacaaaaagggaaataaagaagattatgacctttcaaagatgagagacttcatcaataaacaagctgatgcttatgtggagaaaggcatccttgacaaggaagaagccgaggccatcaagcgcatttatagcagcctgtaaaaatggcaaaagatccaggagtctttcaactgtttcagaaaacataatatagcttaaaacacttctaattctgtgattaaaattttttgacccaagggttattagaaagtgctgaatttacagtagttaaccttttacaagtggttaaaacatagctttcttcccgtaaaaactatctgaaagtaaagttgtatgtaagctgagattttgtatacagaatccttatttcctcatagacttatattttataatcagaatatgttgctttgaaaaagcctctaatggactgaccttaaaactcatccttcttccactgtctcatccacataagcactccccgaagaattaagggggttctgttttcaaggcatgccaagtactaaagcaccttgcagagcgtgtctattacaagatgtcatttccaccagcagttcccttaggggagctgaaataaattcacattttctcaaagtctcatagctttggaggagccatctgcttttttggctgctctttttagctggctttttattaggctcagtgacataaaaaggatccaggtaaatgggtataggatttgctggatttactaacaatttccccctgttcttaacacttcctattagtgacttttcagacattgagtttacttataaagagagatatttatgtactctctaagaagacaaatgaggtcataaacactgcataaagcaaggcaaaaatgtatgccacatctcagttatctaaactagattagatccaagccaagttttctcaacagagagcaaagggccaggcagtaaggtagaaatagagataaaaatcattccttccttgtgatccaaagctggtcgagcagctttcctggaggaaaaggttaatgaacttcaggtccctgcaactcagcccccaccacaaacacagccctggaaacatacagtggcgcaaggtcctcttgaaatgttaatggttaatgttcccaaaccagagaatgctttgaaaatgtatcattcagtgtaaattaattacatacatatttttctatatatttgtttcaaactgtaaaaataacataatatgtaatttgtgtattagtgagaggtgaagccagctggacttcctgggtcgagtggggccttggagaacttttctgtcttacaagaggattgtaaaatgcacccatcagtgctctgtaaaacacaccaatcagcgctctgtagctagcaataggtttgtaaaatgcacccatcagcactctgtaaaacgcaccaatcagcactctgtaaaatgcaccaatcagcaggattctaaaagtagacaatcacagggaggattgaaaaaaagggcactctgatagggcaaaaacggaacatgggaggggacaaataagggaataaaatctggccaccccagccagcagcagcaacctgttcaggtcgcctgccgctgtggaagctttgtccttttgctcttcataataaaccttgctactgttcactctt

SEQ ID NO: 5334 - DNA, 612 bp, Homo sapiens
gacagcagccacacctctgcagagagaatggccagcaggaaggcggggacccggggcaaggtggcagccaccaagcaggcccaacgtggttcttccaacgtcttttccatgtttgaacaagcccagatacaggagttcaaagaagccttcagctgtatcgaccagaatcgtgatggcatcatctgcaaggcagacctgagggagacctactcccagctggggaaggtgagtgtcccagaggaggagctggacgccatgctgcaagagggcaagggccccatcaacttcaccgtcttcctcacgctctttggggagaagctcaatgggacagaccccgaggaagccatcctgagtgccttccgcatgtttgaccccagcggcaaaggggtggtgaacaaggatgagttcaagcagcttctcctgacccaggcagacaagttctctccagctgaggtggagcagatgttcgccctgacacccatggacctggcggggaacatcgactacaagtcactgtgctacatcatcacccatggagacgagaaagaggaatgaggggcagggccaggcccacgggggggcacctcaataaactctgttgcaaaattggaa

SEQ ID NO: 5335 - DNA, 853 bp, Homo sapiens
ttttgcagtcctcgcagcctcccgcgacctcaggactgggctgtactcgccccttctcggccgccgtagtttttttttttttttaaagaaaaaacggttacccagcaactagaaaaacaaccggaaccggcggcaccagctcggagagaaaggaggttccataggcagttcttaccaagaagatgtcgattccattctccaacacccactaccgaattccacaaggatttgggaatcttcttgaagggctgacacgcgagattctgagagagcaaccggacaatataccagcttttgcagcagcctattttgagagccttctagagaaaagagagaaaaccaactttgatccagcagaatgggggagtaaggtagaagaccgcttctataacaatcatgcattcgaggagcaagaaccacctgagaaaagtgatcctaaacaagaagagtctcagatatctgggaaggaggaagagacatcagtcaccatcttagactcttctgaggaagataaggaaaaagaagaggttgctgctgtcaaaatccaagctgccttccggggacacatagccagagaggaggcaaagaaaatgaaaacaaatagtcttcaaaatgaggaaaaagaggaaaacaagtgaggacactggttttacctccaggaaacatgaaaaataatccaaatccatcaaccttcttattaatgtcatttcttcctgaggaaggaagatttgatgttgtgaaataacattcgttactgttgtgaaaatctgtcatgagcatttgtttaataagcataccattgaaacatgccacttgaagatttctctgagatcatgagtttgtttacacttgt

SEQ ID NO: 5336 - DNA, 5151 bp, Homo sapiens
ctggagtctcccctggtcgggagcctcagccttctggagactgacaccaccctcttactcagagacgaatcgttttgtcgttgccttcacctccctgaccacaagtgctccggggctctttctgagggaggcagctgttctaggcgggaggctggagtctcctgggcctggacgcaccccggggtgtgagtgatgggtatgcctgaaaggaggggaagtggcgcggctttaatcatctgggctagtccccggcgggcctgggggaacagggaaactggaggcggccttaaagcgtcaggatgagacatcgcaagaggagctgcagatactgagcgtgcgccccgggttctcgccgccttctctccgccgagcagcccttcggccaccctttgcccttaaaaatctgcagactgcgcctcctctccgcgggagcgagacctagcaggcccggggctgggcgtgccctcgcctgccacgctgcgcgctgccctcagccgggccgctggggccgtgcagtgcaccgggcacgccgcgccaggctgggggcaggcaccgagcctccgtgggaggtcccgaggcagcttcgcctgctcgccctggctccagccctcacctgccgcagccttagctgagcagccgccgccactgggcgccccccgctccccacttcgccagcgcccgctcctcggctcggcccggggtagtttgtagggacgcagctctccacgtgcgcgactgcgaggctggacgctacgggctcctggaaaggagacaccagcatttgccacaatgctgtcatccactgactttacatttgcttcctgggagcttgtggtccgcgttgaccatcccaatgaagagcagcagaaagacgtcacactgagagtatctggagaccttcatgttggaggagtgatgctcaagttagtagaacagatcaatatatcccaagactggtcagactttgctctttggtgggaacagaagcattgctggcttctgaaaacccactggaccctggacaaatatggggtccaggcagatgcaaagcttctcttcacccctcagcataaaatgctgcgccttcgtctgccgaatttgaagatggtgaggttgcgagtcagcttctcagctgtggtttttaaagctgtcagtgatatctgcaaaatcctgaatattagaagatcagaagagctttccttgttaaagccgtctggtgactattttaagaagaagaagaaaaaagacaaaaataataaggaacccataattgaagatattctaaacctggagagttctccaacagcttcaggttcatcagtaagtcctggtttatacagtaaaaccatgacccctatatatgaccccatcaatggaacaccagcatcatccaccatgacttggttcagtgacagccctttgacggaacaaaactgcagcatcctcgcattcagccaacccccccagtccccagaagcacttgcggatatgtaccagcctcggtctctggttgataaagccaagctcaatgcaggttggctagactcctcacgctcccttatggaacaaggcatccaagaggatgagcagctgctcttacgatttaaatattattctttcttcgacttgaatcctaaatatgatgctgtccgaataaaccaactctatgagcaagccaggtgggccattctcttagaagaaattgattgcacagaggaagaaatgttgatctttgcagctctacagtaccacattagcaaactgtcgttgtctgctgaaacacaggattttgcaggcgagtccgaggttgatgaaatagaagcggcgctttctaatttggaagtaaccctagaaggtggaaaagcggacagccttttggaggacattactgatatccctaaacttgcagataatctcaaattatttaggcccaagaagttactaccaaaagctttcaaacaatattggtttatctttaaagacacatccatagcatactttaaaaataaggaacttgaacaaggagaaccactagaaaaactaaatcttagaggctgcgaagttgtgcccgatgtaaatgtagcaggaagaaaatttggaatcaagttactaatccctgttgccgatggtatgaatgaaatgtatttgagatgtgaccatgagaatcaatacgcccaatggatggctgcctgcatgttggcatcgaagggcaaaaccatggcagacagctcctaccagccagaggtcctcaacatcctttcatttctgaggatgaaaaacaggaactctgcatctcaggtggcttccagtctcgaaaacatggatatgaacccagaatgttttgtgtcaccacggtgtgcaaaaagacacaaatccaaacagctggccgcccggatcctggaggcgcaccagaacgtggcccagatgcccctggtcgaagccaagctgcggttcatccaggcgtggcagtcactgcctgagtttggcctcacctactaccttgtcagatttaaaggaagcaaaaaagatgacattctgggagtttcatataacaggttgattaaaattgatgcagccaccgggattccagtgacaacatggagattcacaaatatcaaacagtggaatgtaaactgggaaacccggcaggtggtcatcgagtttgaccaaaacgtctttactgctttcacctgcctgagtgcagattgcaagattgtgcacgagtacattggcggctacattttcttgtccacccgctccaaggaccagaatgaaacactcgatgaggacttgttccacaaattgaccggcggtcaggattgaaacaagcacgcgtgctcggctcacaccaacaaggcaagccaaaggcgcccctccccagagggatccctaacgtgcccagcatgtagattctggactaacagacaacatacattcaccgctggtcacccagatcctcattcaaacccactgctggcacatccctttccttactttgccctgtgctaccagccacggaaggagcctctcttgttttttctataaaatgggtaggcaggagaaaagcaggtgccctaagattgctctaaggcccagcatgtggttacagttctctgacttgcagaacctgccaggtgtatggctacaagttatcctcgtgctgatctgtctcattactaagtcaatggagaagacagaaaggtaaaaatcacgtgtagcaagaacaactcttatttcacaaactcaggtatgaaacgaaacgcctgtccttcatggaactgcttttagctcctgtcttttcaaaatggcagagggagttcctacacacactttttccctggaggccaaggtctaggggtagaaaggggaggggtggggctaccaggtagcagttgacaacccaaggtcagaggagtggccctcagtgtcatctgtccacagtgatacctgccaagatgaccactgacccacatctggtcttagtcattggtctcctcagatttctggggccacctgcaagccccattccattcctacagatctctcagccacctgtaagtcctttgtgaagatgtgggtgacacagggggacaggaaaacccatttctcaacccagatccatgtctccactgcttctactctgggttgggattcaggaagacaggcacagtcctctctgttcatagaaacacctgccagtgtcaaggattccagtcaggtgtctatcccaactggtcagggagagaagggcagacccattctcaaagaccaccatgtccaaggtctgacagctccccactggctgcccccacaggggctttaggctggtctgggtcatggggaagcgtccctcttatcgctggtctgtgttctcctggatttggtatctatgttggtacgactcctggccttttatctaaaggactttggcttttgtaaatcacaagccaataatagacttttttctccccctctgttttttgctgtgtcatctctgccttgagactgccttgagacagtgcttgccttgagagagtgagccaattaacagctgcctgaattgtcattttccattttggtttgttagaggtgggaggggtgggttttgagaaggtcaaaagcaataccagaagtaaagggaaatatcagacaatattttattattttttcatagatgttctgccacacaaagaacttggggtgtaaggataaggcaaaagctccaatcccatttttcagttctcctaggatgcacccctcagggagcctggccagagttccgaggcccgtgagcgtcagctgttgctttattttccatcaaagccctctgagaagtgagacctcagcaattccgggagccacatagagacagacttggcaagggaccccctggttctgagccagtagctgccatctggaaattcctcttttagcctctccttagaggtgaatgtgaatgaagcctcccaggcacccgctgaatttctgaggccttgcttaaagctcagaagtggtttaggcatttggaaaatctggttcacatcataaagaacttgatttgaaatgttttctatagaaacaagtgctaagtgtaccgtatatacttgatgttggtcatttctcagtcctatttctcagttctattattttagaacctagtcagttctttaagattataactggtcctacattaaaataatgcttctcgatgtcagattttacctgtttgctgctgagaacatctctgcctaatttaccaaagccagaccttcagttcaacatgcttccttagcttttcatagttgtctgacatttccatgaaaacaaaggaaccaactttgttttaaccaaactttgtttggttacagttttcaggggagcgtttcttccatgacacacagcaacatcccaaagaaataaacaagtgtgacaaaaaaaaaaaaaaacaaacctaaatgctactgttccaaagagcaacttgatggttttttttaatactgagtgcaaaaggtcacccaaattcctatgatgaaattttaaattaatgggcacctttcaacatcatttgcttccttatctacagttgattcagaaatctgcattttttattcttttatatgacttttaagtaaaagatttatatggatttga

SEQ ID NO: 5337 - DNA, 1960 bp, Homo sapiens
gaatctacaataagacaaatttcaaatcaagttgctccactatactgcataagcagtttagaatcttaagcagatgcaaaaagaataaagcaaatgggaggaaaaaaaaggccgataaagtttctggctacaatacaagagacatatcattaccatatgatctaatgtgggtgtcagccggattgtgttcattgagggaaaccttattttttaactgtgctatggagtagaagcaggaggttttcaacctagtcacagagcagcacctaccccctcctcctttccacacctgcaaactcttttacttgggctgaatatttagtgtaattacatctcagctttgagggctcctgtggcaaattcccggattaaaaggttccctggttgtgaaaatacatgagataaatcatgaaggccactatcatcctccttctgcttgcacaagtttcctgggctggaccgtttcaacagagaggcttatttgactttatgctagaagatgaggcttctgggataggcccagaagttcctgatgaccgcgacttcgagccctccctaggcccagtgtgccccttccgctgtcaatgccatcttcgagtggtccagtgttctgatttggaactgggcaccaatccgctgaagagctcaggaattgaaaatggggctttccagggaatgaagaagctctcctacatccgcattgctgataccaatatcaccagcattcctcaaggtcttcctccttcccttacggaattacatcttgatggcaacaaaatcagcagagttgatgcagctagcctgaaaggactgaataatttggctaagttgggattgagtttcaacagcatctctgctgttgacaatggctctctggccaacacgcctcatctgagggagcttcacttggacaacaacaagcttaccagagtacctggtgggctggcagagcataagtacatccaggttgtctaccttcataacaacaatatctctgtagttggatcaagtgacttctgcccacctggacacaacaccaaaaaggcttcttattcgggtgtgagtcttttcagcaacccggtccagtactgggagatacagccatccaccttcagatgtgtctacgtgcgctctgccattcaactcggaaactataagtaattctcaagaaagccctcatttttataacctggcaaaatcttgttaatgtcattgctaaaaaataaataaaagctagatactggaaacctaactgcaatgtggatgttttacccacatgacttattatgcataaagccaaatttccagtttaagtaattgcctacaataaaaagaaattttgcctgccattttcagaatcatcttttgaagctttctgttgatgttaactgagctactagagatattcttatttcactaaatgtaaaatttggagtaaatatatatgtcaatatttagtaaagcttttcttttttaatttccaggaaaaaataaaaagagtatgagtcttctgtaattcattgagcagttagctcatttgagataaagtcaaatgccaaacactagctctgtattaatccccatcattactggtaaagcctcatttgaatgtgtgaattcaatacaggctatgtaaaatttttactaatgtcattattttgaaaaaataaatttaaaaatacattcaaaattactattgtatacaagcttaattgttaatattccctaaacacaattttatgaagggagaagacattggtttgttgacaataacagtacatcttttcaagttctcagctatttcttctacctctccctatcttacatttgagtatggtaacttatgtcatctatgttgaatgtaagcttataaagcacaaagcatacatttcctgactggtctagagaactgatgtttcaatttacccctctgctaaataaatattaaaactatcatgtg

SEQ ID NO: 5338 - DNA, 3190 bp, Homo sapiens
ggcccacagaggagcacagctgtgtttggctgcagggccaagagcgctgtcaagaagacccacacgcccccctccagcagctgaattcctgcagctcagcagccgccgccagagcaggacgaaccgccaatcgcaaggcacctctgagaacttcaggatgcagatgtctccagccctcacctgcctagtcctgggcctggcccttgtctttggtgaagggtctgctgtgcaccatcccccatcctacgtggcccacctggcctcagacttcggggtgagggtgtttcagcaggtggcgcaggcctccaaggaccgcaacgtggttttctcaccctatggggtggcctcggtgttggccatgctccagctgacaacaggaggagaaacccagcagcagattcaagcagctatgggattcaagattgatgacaagggcatggcccccgccctccggcatctgtacaaggagctcatggggccatggaacaaggatgagatcagcaccacagacgcgatcttcgtccagcgggatctgaagctggtccagggcttcatgccccacttcttcaggctgttccggagcacggtcaagcaagtggacttttcagaggtggagagagccagattcatcatcaatgactgggtgaagacacacacaaaaggtatgatcagcaacttgcttgggaaaggagccgtggaccagctgacacggctggtgctggtgaatgccctctacttcaacggccagtggaagactcccttccccgactccagcacccaccgccgcctcttccacaaatcagacggcagcactgtctctgtgcccatgatggctcagaccaacaagttcaactatactgagttcaccacgcccgatggccattactacgacatcctggaactgccctaccacggggacaccctcagcatgttcattgctgccccttatgaaaaagaggtgcctctctctgccctcaccaacattctgagtgcccagctcatcagccactggaaaggcaacatgaccaggctgccccgcctcctggttctgcccaagttctccctggagactgaagtcgacctcaggaagcccctagagaacctgggaatgaccgacatgttcagacagtttcaggctgacttcacgagtctttcagaccaagagcctctccacgtcgcgcaggcgctgcagaaagtgaagatcgaggtgaacgagagtggcacggtggcctcctcatccacagctgtcatagtctcagcccgcatggcccccgaggagatcatcatggacagacccttcctctttgtggtccggcacaaccccacaggaacagtccttttcatgggccaagtgatggaaccctgaccctggggaaagacgccttcatctgggacaaaactggagatgcatcgggaaagaagaaactccgaagaaaagaattttagtgttaatgactctttctgaaggaagagaagacatttgccttttgttaaaagatggtaaaccagatctgtctccaagaccttggcctctccttggaggacctttaggtcaaactccctagtctccacctgagaccctgggagagaagtttgaagcacaactcccttaaggtctccaaaccagacggtgacgcctgcgggaccatctggggcacctgcttccacccgtctctctgcccactcgggtctgcagacctggttcccactgaggccctttgcaggatggaactacggggcttacaggagcttttgtgtgcctggtagaaactatttctgttccagtcacattgccatcactcttgtactgcctgccaccgcggaggaggctggtgacaggccaaaggccagtggaagaaacaccctttcatctcagagtccactgtggcactggccacccctccccagtacaggggtgctgcaggtggcagagtgaatgtcccccatcatgtggcccaactctcctggcctggccatctccctccccagaaacagtgtgcatgggttattttggagtgtaggtgacttgtttactcattgaagcagatttctgcttccttttatttttataggaatagaggaagaaatgtcagatgcgtgcccagctcttcaccccccaatctcttggtggggaggggtgtacctaaatatttatcatatccttgcccttgagtgcttgttagagagaaagagaactactaaggaaaataatattatttaaactcgctcctagtgtttctttgtggtctgtgtcaccgtatctcaggaagtccagccacttgactggcacacacccctccggacatccagcgtgacggagcccacactgccaccttgtggccgcctgagaccctcgcgccccccgcgcccctctttttccccttgatggaaattgaccatacaatttcatcctccttcaggggatcaaaaggacggagtggggggacagagactcagatgaggacagagtggtttccaatgtgttcaatagatttaggagcagaaatgcaaggggctgcatgacctaccaggacagaactttccccaattacagggtgactcacagccgcattggtgactcacttcaatgtgtcatttccggctgctgtgtgtgagcagtggacacgtgaggggggggtgggtgagagagacaggcagctcggattcaactaccttagataatatttctgaaaacctaccagccagagggtagggcacaaagatggatgtaatgcactttgggaggccaaggcgggaggattgcttgagcccaggagttcaagaccagcctgggcaacataccaagacccccgtctctttaaaaatatatatattttaaatatacttaaatatatatttctaatatctttaaatatatatatatattttaaagaccaatttatgggagaattgcacacagatgtgaaatgaatgtaatctaatagaagcctaatcagcccaccatgttctccactgaaaaatcctctttctttggggtttttctttctttcttttttgattttgcactggacggtgacgtcagccatgtacaggatccacaggggtggtgtcaaatgctattgaaattgtgttgaattgtatgctttttcacttttgataaataaacatgtaaaaatgtttcaaaaaaataataaaataaataaatacgaagaatatgtcaggacagtca

SEQ ID NO: 5339 - DNA, 1016 bp, Homo sapiens
tgctgcatggggtcaagcactctggtcggtcccatggagctctgcactgtagcttcccttccacaggccccgcagggcgccccctgcctctgaggatgagtcactgcagcagccgcgccctgaccctgctgagcagcgtgtttggtgcgtgtggcctgctcctggtaggcatcgcggtcagcactgactactggctgtacatggaagaaggcacagtgctaccgcagaaccagaccaccgaggtcaagatggccctgcacgccggcctctggcgagtctgcttctttgcaggtcgggagaaaggtcgctgtgtggcctcagaatattttcttgaaccggagatcaatttggtgacggaaaacacggagaatattctgaagacagtgcgcacggccacccccttccccatggtcagcctcttcctcgtgttcacggccttcgtcatcagcaacatcggccacatccgcccgcagaggaccattctggcttttgtctctggcatcttcttcatactatcgggcctctccttggtggtgggcttggttctttacatctccagcatcaacgacgaggtcatgaacaggcccagcagctctgagcagtattttcattatcgctacgggtggtcttttgccttcgccgcttcctccttcctactcaaagagggggccggcgtgatgtccgtgtacctgttcaccaagcgctacgcggaggaggagatgtaccgtccacacccggccttctaccgcccgcgtctcagcgactgctccgactactcgggccagttcctgcagcccgaggcgtggcgccgcggccggagcccctccgacatctccagcgacgtgtccatccaaatgacgcagaactaccctcccgccatcaagtacccggaccacctgcacatctccacctcgccctgctgaggcccgcccctcggagctccccctgcctcctcctcctcctcgtcttaggggggtctccctgcaatgcagcgcccccttccgtcctcgggactc

SEQ ID NO: 5340 - DNA, 1349 bp, Homo sapiens
gaacaccacccagtgtggagcagcccagccaagcactgtcaggaatcctgtgaagcagctccagctatgtgtgaagaagaggacagcactgccttggtgtgtgacaatggctctgggctctgtaaggccggctttgctggggacgatgctcccagggctgttttcccatccattgtgggacgtcccagacatcagggggtgatggtgggaatgggacaaaaagacagctacgtgggtgacgaagcacagagcaaaagaggaatcctgaccctgaagtacccgatagaacatggcatcatcaccaactgggacgacatggaaaagatctggcaccactctttctacaatgagcttcgtgttgcccctgaagagcatcccaccctgctcacggaggcacccctgaaccccaaggccaaccgggagaaaatgactcaaattatgtttgagactttcaatgtcccagccatgtatgtggctatccaggcggtgctgtctctctatgcctctggacgcacaactggcatcgtgctggactctggagatggtgtcacccacaatgtccccatctatgagggctatgccttgccccatgccatcatgcgtctggatctggctggccgagatctcactgactacctcatgaagatcctgactgagcgtggctattccttcgttactactgctgagcgtgagattgtccgggacatcaaggagaaactgtgttatgtagctctggactttgaaaatgagatggccactgccgcatcctcatcctcccttgagaagagttacgagttgcctgatgggcaagtgatcaccatcggaaatgaacgtttccgctgcccagagaccctgttccagccatccttcatcgggatggagtctgctggcatccatgaaaccacctacaacagcatcatgaagtgtgatattgacatcaggaaggacctctatgctaacaatgtcctatcagggggcaccactatgtaccctggcattgccgaccgaatgcagaaggagatcacggccctagcacccagcaccatgaagatcaagatcattgcccctccggagcgcaaatactctgtctggatcggtggctccatcctggcctctctgtccaccttccagcagatgtggatcagcaaacaggaatacgatgaagccgggccttccattgtccaccgcaaatgcttctaaaacactttcctgctcctctctgtctctagcacacaactgtgaatgtcctgtggaattatgccttcagttcttttccaaatcattcctagccaaagctctgactcgttacctatgtgttttttaataaatctgaaataggctactggtaa

SEQ ID NO: 5341 - DNA, 740 bp, Homo sapiens
gccgccccgcgagaagaagagcgggaagaggcggacagcgaggccaagatttcagctgcgggacggtcaggggagacctccaggcgcagggaaggacggccagggtgacacggaagcatgcgacggctgctgatccctctggccctgtggctgggtgcggtgggcgtgggcgtcgccgagctcacggaagcccagcgccggggcctgcaggtggccctggaggaatttcacaagcacccgcccgtgcagtgggccttccaggagaccagtgtggagagcgccgtggacacgcccttcccagctggaatatttgtgaggctggaatttaagctgcagcagacaagctgccggaagagggactggaagaaacccgagtgcaaagtcaggcccaatgggaggaaacggaaatgcctggcctgcatcaaactgggctctgaggacaaagttctgggccggttggtccactgccccatagagacccaagttctgcgggaggctgaggagcaccaggagacccagtgcctcagggtgcagcgggctggtgaggacccccacagcttctacttccctggacagttcgccttctccaaggccctgccccgcagctaagccagcactgagatgcgtggtgcctccaggaccgctgcgggtggtaaccagtggaagaccccagcccccagggagaggaacccgttctatccccagccatgataataaagctgctctcccagctgcctctc

SEQ ID NO: 5342 - DNA, 2210 bp, Homo sapiens
agctcctaggaagcttcagggcttaaagctccactctacttggactgtactatcaggcccccaaaatggggggagccgacagggaaggactgatttccatttcaaactgcattctggtactttgtactccagcaccattggccgatcaatatttaatgcttggagattctgactctgcgggagtcatgtcaggggaccttgggagccaatctgcttgagcttctgagtgataattattcatgggctcctgcctcttgctctttctctagcacggtcccactctgcagactcagtgccttattcagtcttctctctcgctctctccgctgctgtagccggaccctttgccttcgccactgctcagcgtctgcacatccctacaatggctaaaacagcaatggcctacaaggaaaaaatgaaggagctgtccatgctgtcactgatctgctcttgcttttacccggaacctcgcaacatcaacatctatacttacgatgatatggaagtgaagcaaatcaacaaacgtgcctctggccaggcttttgagctgatcttgaagccaccatctcctatctcagaagccccacgaactttagcttctccaaagaagaaagacctgtccctggaggagatccagaagaaactggaggctgcagaggaaagaagaaagtctcaggaggcccaggtgctgaaacaattggcagagaagagggaacacgagcgagaagtccttcagaaggctttggaggagaacaacaacttcagcaagatggcggaggaaaagctgatcctgaaaatggaacaaattaaggaaaaccgtgaggctaatctagctgctattattgaacgtctgcaggaaaaggagaggcatgctgcggaggtgcgcaggaacaaggaactccaggttgaactgtctggctgaagcaagggagggtctggcacgccccaccaatagtaaatccccctgcctatattataatggatcatgcgatatcaggatggggaatgtatgacatggtttaaaaagaactcattataaaaaaaaaaaaacaaaaaaaatcaaaaattaaaaaaaatcaatgcggtctctttgcagaatgttttgcttgatgtttaaaaaataccttggatcttattttgtaaatacttacatttttgttaaaaaatacaagtattgcattatgcaagttatttcataatcttacatgtcctgtaacaggcttttgatgttgtgtctttccactcaaatgaatttgctaggtctgttctttttgaagctccccatgtctaactccattccaaaagaaaaatgaggtcagtagacagtctatggtgctagaaacccaccattgcctaatgacctagaaggctttgttgtctctgagcttgactaagaccatacctagatcacaggtattatgactccacatgaaccttcacatttgttcgctcataatctacttactgcctaaaaactacaaaaccaggctaagaaataccaccagtcatagcatttacttctgcttctcctggattatgtgctacaaatgtgctttggctttagaaagggatggatgagaagacagacctgagaccaatctgggtagaagcaaaaagttgaaccttttaaagtgctgaacacaaatccaaattcgaatggttcaagcagccgtgaaatcgctcttcataaagtgggcttaattctctagtttaagttcttttgatggaatgaattaattaatgtgtcaggtggcttatttgtggatgccatgattgatgatgttcattttaagctcttacctatagtacaagtacatgatgctactgaatatttttccacttggaaactgtgagctggttgttgcattaaaacacacatacaaacaaaatcaaaaacactgcggactttcactcaagctggtctttcttccccagtgtaaggcaatcctgcctactaacaacaccaacaacaaaacactccatctgtgaagctgacgcagttaagggggctaggcagggcatttgtgccaactaagaatcaccagatacccaccataagtacctatcgcagttttgaagtcgtttctccccaactcccaactcctgaaggttgctgcctgcatatttactcttcattagtgctattttcctgtatgtcattgtgagcaagctgtgattaataaagaattggagttctgtgaactaataaa

SEQ ID NO: 5343 - DNA, 913 bp, Homo sapiens
gactttcagggcctgctgaggaatctgcaggcctggcagaggacaggagggaggcttggggagcctgggaagggccggctgacagcttgatgggccctccctccctccacagtcccacccccagcctggggcctctgggagccttggtcctgagcagccaacacaccagcccagacagctgcaagtcaccatggacgctgaaggcggtgcgggcggccagacaggcggctgacttcactctgaaggtggaagtggaatgcagcagcctgcaggaggccgtgcaggcagctgaggctggtgccgaccttgtcctgctggacaacttcaagccagaggagctgcaccccacggccaccgtgctgaaggcccagttcccgagtgtggctgtggaagccagtgggggcatcaccctggacaacctcccccagttctgcgggccgcacatagacgtcatctccatggggatgctgacccaggcggccccagcccttgatttctccctcaagctgtttgccaaagaggtggctccagtgcccaaaatccactagtcctaaaccggaagaggatgacaccggccatgggttaacgtggctcctcaggaccctctgggtcacacatctttagggtcagtggccaatggggcacatttggcactagcttgagcccaactctggctctgccacctgctgctcctgtgacctgtcagggctgacttcacctctgctcatctcagtttcctaatctgtaaaatgggtctaataaaggatcaaccacatggggttctgcggtgataatgagcacatagtgaggggtcagcaaatgtcagaagttacctgggacagccgggcacgatggctcacacctgtaatcccagcactttgggaggctgaggcgggaagatcacttgagttca

SEQ ID NO: 5344 - DNA, 5462 bp, Homo sapiens
tatatccgtggtttcctgctacctccaaccatgggccttttgggaatactttgttttttaatcttcctggggaaaacctggggacaggagcaaacatatgtcatttcagcaccaaaaatattccgtgttggagcatctgaaaatattgtgattcaagtttatggatacactgaagcatttgatgcaacaatctctattaaaagttatcctgataaaaaatttagttactcctcaggccatgttcatttatcctcagagaataaattccaaaactctgcaatcttaacaatacaaccaaaacaattgcctggaggacaaaacccagtttcttatgtgtatttggaagttgtatcaaagcatttttcaaaatcaaaaagaatgccaataacctatgacaatggatttctcttcattcatacagacaaacctgtttatactccagaccagtcagtaaaagttagagtttattcgttgaatgacgacttgaagccagccaaaagagaaactgtcttaactttcatagatcctgaaggatcagaagttgacatggtagaagaaattgatcatattggaattatctcttttcctgacttcaagattccgtctaatcctagatatggtatgtggacgatcaaggctaaatataaagaggacttttcaacaactggaaccgcatattttgaagttaaagaatatgtcttgccacatttttctgtctcaatcgagccagaatataatttcattggttacaagaactttaagaattttgaaattactataaaagcaagatatttttataataaagtagtcactgaggctgacgtttatatcacatttggaataagagaagacttaaaagatgatcaaaaagaaatgatgcaaacagcaatgcaaaacacaatgttgataaatggaattgctcaagtcacatttgattctgaaacagcagtcaaagaactgtcatactacagtttagaagatttaaacaacaagtacctttatattgctgtaacagtcatagagtctacaggtggattttctgaagaggcagaaatacctggcatcaaatatgtcctctctccctacaaactgaatttggttgctactcctcttttcctgaagcctgggattccatatcccatcaaggtgcaggttaaagattcgcttgaccagttggtaggaggagtcccagtaacactgaatgcacaaacaattgatgtaaaccaagagacatctgacttggatccaagcaaaagtgtaacacgtgttgatgatggagtagcttcctttgtgcttaatctcccatctggagtgacggtgctggagtttaatgtcaaaactgatgctccagatcttccagaagaaaatcaggccagggaaggttaccgagcaatagcatactcatctctcagccaaagttacctttatattgattggactgataaccataaggctttgctagtgggagaacatctgaatattattgttacccccaaaagcccatatattgacaaaataactcactataattacttgattttatccaagggcaaaattatccactttggcacgagggagaaattttcagatgcatcttatcaaagtataaacattccagtaacacagaacatggttccttcatcccgacttctggtctattacatcgtcacaggagaacagacagcagaattagtgtctgattcagtctggttaaatattgaagaaaaatgtggcaaccagctccaggttcatctgtctcctgatgcagatgcatattctccaggccaaactgtgtctcttaatatggcaactggaatggattcctgggtggcattagcagcagtggacagtgctgtgtatggagtccaaagaggagccaaaaagcccttggaaagagtatttcaattcttagagaagagtgatctgggctgtggggcaggtggtggcctcaacaatgccaatgtgttccacctagctggacttaccttcctcactaatgcaaatgcagatgactcccaagaaaatgatgaaccttgtaaagaaattctcaggccaagaagaacgctgcaaaagaagatagaagaaatagctgctaaatataaacattcagtagtgaagaaatgttgttacgatggagcctgcgttaataatgatgaaacctgtgagcagcgagctgcacggattagtttagggccaagatgcatcaaagctttcactgaatgttgtgtcgtcgcaagccagctccgtgctaatatctctcataaagacatgcaattgggaaggctacacatgaagaccctgttaccagtaagcaagccagaaattcggagttattttccagaaagctggttgtgggaagttcatcttgttcccagaagaaaacagttgcagtttgccctacctgattctctaaccacctgggaaattcaaggcgttggcatttcaaacactggtatatgtgttgctgatactgtcaaggcaaaggtgttcaaagatgtcttcctggaaatgaatataccatattctgttgtacgaggagaacagatccaattgaaaggaactgtttacaactataggacttctgggatgcagttctgtgttaaaatgtctgctgtggagggaatctgcacttcggaaagcccagtcattgatcatcagggcacaaagtcctccaaatgtgtgcgccagaaagtagagggctcctccagtcacttggtgacattcactgtgcttcctctggaaattggccttcacaacatcaatttttcactggagacttggtttggaaaagaaatcttagtaaaaacattacgagtggtgccagaaggtgtcaaaagggaaagctattctggtgttactttggatcctaggggtatttatggtaccattagcagacgaaaggagttcccatacaggatacccttagatttggtccccaaaacagaaatcaaaaggattttgagtgtaaaaggactgcttgtaggtgagatcttgtctgcagttctaagtcaggaaggcatcaatatcctaacccacctccccaaagggagtgcagaggcggagctgatgagcgttgtcccagtattctatgtttttcactacctggaaacaggaaatcattggaacatttttcattctgacccattaattgaaaagcagaaactgaagaaaaaattaaaagaagggatgttgagcattatgtcctacagaaatgctgactactcttacagtgtgtggaagggtggaagtgctagcacttggttaacagcttttgctttaagagtacttggacaagtaaataaatacgtagagcagaaccaaaattcaatttgtaattctttattgtggctagttgagaattatcaattagataatggatctttcaaggaaaattcacagtatcaaccaataaaattacagggtaccttgcctgttgaagcccgagagaacagcttatatcttacagcctttactgtgattggaattagaaaggctttcgatatatgccccctggtgaaaatcgacacagctctaattaaagctgacaactttctgcttgaaaatacactgccagcccagagcacctttacattggccatttctgcgtatgctctttccctgggagataaaactcacccacagtttcgttcaattgtttcagctttgaagagagaagctttggttaaaggtaatccacccatttatcgtttttggaaagacaatcttcagcataaagacagctctgtacctaacactggtacggcacgtatggtagaaacaactgcctatgctttactcaccagtctgaacttgaaagatataaattatgttaacccagtcatcaaatggctatcagaagagcagaggtatggaggtggcttttattcaacccaggacacaatcaatgccattgagggcctgacggaatattcactcctggttaaacaactccgcttgagtatggacatcgatgtttcttacaagcataaaggtgccttacataattataaaatgacagacaagaatttccttgggaggccagtagaggtgcttctcaatgatgacctcattgtcagtacaggatttggcagtggcttggctacagtacatgtaacaactgtagttcacaaaaccagtacctctgaggaagtttgcagcttttatttgaaaatcgatactcaggatattgaagcatcccactacagaggctacggaaactctgattacaaacgcatagtagcatgtgccagctacaagcccagcagggaagaatcatcatctggatcctctcatgcggtgatggacatctccttgcctactggaatcagtgcaaatgaagaagacttaaaagcccttgtggaaggggtggatcaactattcactgattaccaaatcaaagatggacatgttattctgcaactgaattcgattccctccagtgatttcctttgtgtacgattccggatatttgaactctttgaagttgggtttctcagtcctgccactttcacagtgtacgaataccacagaccagataaacagtgtaccatgttttatagcacttccaatatcaaaattcagaaagtctgtgaaggagccgcgtgcaagtgtgtagaagctgattgtgggcaaatgcaggaagaattggatctgacaatctctgcagagacaagaaaacaaacagcatgtaaaccagagattgcatatgcttataaagttagcatcacatccatcactgtagaaaatgtttttgtcaagtacaaggcaacccttctggatatctacaaaactggggaagctgttgctgagaaagactctgagattaccttcattaaaaaggtaacctgtactaacgctgagctggtaaaaggaagacagtacttaattatgggtaaagaagccctccagataaaatacaatttcagtttcaggtacatctaccctttagattccttgacctggattgaatactggcctagagacacaacatgttcatcgtgtcaagcatttttagctaatttagatgaatttgccgaagatatctttttaaatggatgctaaaattcctgaagttcagctgcatacagtttgcacttatggactcctgttgttgaagttcgtttttttgttttcttctttttttaaacattcatagctggtcttatttgtaaagctcactttacttagaattagtggcacttgcttttattagagaatgatttcaaatgctgtaactttctgaaataacatggccttggagggcatgaagacagatactcctccaaggttattggacaccggaaacaataaattggaacacctcctcaaacctaccactcaggaatgtttgctggggccgaaagaacagtccattgaaagggagtattacaaaaacatggcctttgcttgaaagaaaataccaaggaacaggaaactgatcattaaagcctgagtttgctttc

SEQ ID NO: 5345 - DNA, 2105 bp, Homo sapiens; identical to SEQ ID NO: 547

SEQ ID NO: 5346 - DNA, 1951 bp, Homo sapiens; identical to SEQ ID NO: 2031

SEQ ID NO: 5347 - DNA, 2977 bp, Homo sapiens
gagtacaatggaccctggcaaagccccgctcccggcccaggtcttctgctctccaggtctgcccctccggctctccctctctccgggtttccccctccccaccatcatttgcatccagccgaaagctgggcccttcccactaatttgcatatcttatatggcctaatggtggcgatcatggcaagttagaagttttctgactcctttcggaggagcctccgggaccccggggagtaacaggtgtctggaggctgaagggtggaggggttcctggatttggggtttgcttgtgaaactcccctccaccctcctctctcgcacccacccaccccctcacccccttctttttccgtccttggaaaatggtgtccaagctcacgtcgctccagcaagaactcctgagcgccctgctgagctccggggtcaccaaggaggtgctggttcaggccttggaggagttgctgccatccccgaacttcggggtgaagctggagacgctgcccctgtcccctggcagcggggccgagcccgacaccaagccggtcttccatactctcaccaacggccacgccaagggccgcttgtccggcgacgagggctccgaggacggcgacgactatgacacacctcccatcctcaaggagctgcaggcgctcaacaccgaggaggcggcggagcagcgggcggaggtggaccggatgctcagtgaggacccttggagggctgctaaaatgatcaagggttacatgcagcaacacaacatcccccagagggaggtggtcgatgtcaccggcctgaaccagtcgcacctctcccagcatctcaacaagggcacccctatgaagacccagaagcgtgccgctctgtacacctggtacgtcagaaagcaacgagagatcctccgacaattcaaccagacagtccagagttctggaaatatgacagacaaaagcagtcaggatcagctgctgtttctctttccagagttcagtcaacagagccatgggcctgggcagtccgatgatgcctgctctgagcccaccaacaagaagatgcgccgcaaccggttcaaatgggggcccgcgtcccagcaaatcttgtaccaggcctacgatcggcaaaagaaccccagcaaggaagagagagaggccttagtggaggaatgcaacagggcagaatgtttgcagcgaggggtgtccccctccaaagcccacggcctgggctccaacttggtcactgaggtccgtgtctacaactggtttgcaaaccgcaggaaggaggaggcattccggcaaaagctggccatggacgcctatagctccaaccagactcacagcctgaaccctctgctctcccacggctccccccaccaccagcccagctcctctcctccaaacaagctgtcaggagtgcgctacagccagcagggaaacaatgagatcacttcctcctcaacaatcagtcaccatggcaacagcgccatggtgaccagccagtcggttttacagcaagtctccccagccagcctggacccaggccacaatctcctctcacctgatggtaaaatgatctcagtctcaggaggaggtttgcccccagtcagcaccttgacgaatatccacagcctctcccaccataatccccagcaatctcaaaacctcatcatgacacccctctctggagtcatggcaattgcacaaagcctcaacacctcccaagcacagagtgtccctgtcatcaacagtgtggccggcagcctggcagccctgcagcccgtccagttctcccagcagctgcacagccctcaccagcagcccctcatgcagcagagcccaggcagccacatggcccagcagcccttcatggcagctgtgactcagctgcagaactcacacatgtacgcacacaagcaggaacccccccagtattcccacacctcccggtttccatctgcaatggtggtcacagataccagcagcatcagtacactcaccaacatgtcttcaagtaaacagtgtcctctacaagcctggtgatgcccacacaccacttacttcgtgcgcaacaacaaggaccctgttttccacaccatcaccctctgggcagctgtcatggaaaagcccagtgacctgaccggcacctgcgagaggtccctgcttacctgacggacgtcctgctggcacctcagacaatccactctcaggaggcgcagcccgaagcccagtttcccttctatgcagtattgccacaatgcctctcccacgatgtcaaggactcctgtctgtcctggaggtgggagacaaggaaccaccgaagaggaagcaagaaagccgtactgtctatgttgtgatccttcatcgaacaaactgatgcgaaaacttgaatctgttactgaaatgaggagagaaggacatgtgctattgaactgagccaaacacactgtaaatatccacagactccctcccctgcccccatcccacatgatcttgagatttcttttaaagaagtaaatttgtccaatggctgtaaactataaactactgtaattaagtgcaatttcccctctgtgtcctctcccctctgccctgtatataatactaaagtgtctattagttttctttgtaaaggtcagagtcaaaatttcaaaagtgatctgtcccctctcccctcatggagaaacatcctaagtgggaagtgaagccccttgtcctctcccgcgggcctggacacttatggggacagcataccttggactgactaccagctaactccagtctcctgacattaagacacacctctggatccctggaggggctgaatgtagtgtgtcagagtaacatgccagcttcctgtgggccaggagctcagccgtgcactccctaagaaaccccagggcagggaaactggctgtttgatagcagaagaaaaagttgcagtctcagaaagccttccattaaaacaatttattttatcacta

SEQ ID NO: 5348 - DNA, 2023 bp, Homo sapiens
caatcatggatcaatagctatgtttggagaaggaatttgtggctgctccagctactgggcattttgtctggtccagttcatgtaatctcccaacaccccatgaagcaaggctttgttaatcctattttactgaaaatgaactaagactcagagagataaagctgttgcccaatgagccttctttctgccctccagatccacggtgctaattccccttccgatgacctaatgattctgagcttggcaaaggtcttatctcccagctcgcccaggcccagtgttccaggaatgtgacctttgctgcagcagccgctggagggggcagaggggatgggctggaggttgagcaaacagagcagcagaaaaggcagttcctcttctccagtgccctccttccctgtctctgcctctccctcccttcctcaggcatcagagcggagacttcagggagaccagagcccagcttgccaggcactgagctagaagccctgccatggcacccctgagaccccttctcatactggccctgctggcatgggttgctctggctgaccaagagtcatgcaagggccgctgcactgagggcttcaacgtggacaagaagtgccagtgtgacgagctctgctcttactaccagagctgctgcacagactatacggctgagtgcaagccccaagtgactcgcggggatgtgttcactatgccggaggatgagtacacggtctatgacgatggcgaggagaaaaacaatgccactgtccatgaacaggtggggggcccctccctgacctctgacctccaggcccagtccaaagggaatcctgagcagacacctgttctgaaacctgaggaagaggcccctgcgcctgaggtgggcgcctctaagcctgaggggatagactcaaggcctgagacccttcatccagggagacctcagcccccagcagaggaggagctgtgcagtgggaagcccttcgacgccttcaccgacctcaagaacggttccctctttgccttccgagggcagtactgctatgaactggacgaaaaggcagtgaggcctgggtaccccaagctcatccgagatgtctggggcatcgagggccccatcgatgccgccttcacccgcatcaactgtcaggggaagacctacctcttcaagggtagtcagtactggcgctttgaggatggtgtcctggaccctgattacccccgaaatatctctgacggcttcgatggcatcccggacaacgtggatgcagccttggccctccctgcccatagctacagtggccgggagcgggtctacttcttcaaggggaaacagtactgggagtaccagttccagcaccagcccagtcaggaggagtgtgaaggcagctccctgtcggctgtgtttgaacactttgccatgatgcagcgggacagctgggaggacatcttcgagcttctcttctggggcagaacctctgctggtaccagacagccccagttcattagccgggactggcacggtgtgccagggcaagtggacgcagccatggctggccgcatctacatctcaggcatggcaccccgcccctccttggccaagaaacaaaggtttaggcatcgcaaccgcaaaggctaccgttcacaacgaggccacagccgtggccgcaaccagaactcccgccggccatcccgcgccacgtggctgtccttgttctccagtgaggagagcaacttgggagccaacaactatgatgactacaggatggactggcttgtgcctgccacctgtgaacccatccagagtgtcttcttcttctctggagacaagtactaccgagtcaatcttcgcacacggcgagtggacactgtggaccctccctacccacgctccatcgctcagtactggctgggctgcccagctcctggccatctgtaggagtcagagcccacatggccgggccctctgtagctccctcctcccatctccttcccccagcccaataaaggtcccttagccccgagtttaaaa

SEQ ID NO: 5349 - DNA, 2083 bp, Homo sapiens
aggattcactcactgcccacggccggctgagcagggacaggagaatgagaggcctccgctggcgttacactcggctgcccagccaggtggaggacaccctgtctggggaggagggtaacgaagaggaagaggaggaggaggcagctccagacccagctgctgctcctgaggatcccacggtgccccagctgacagaagccagccaggttttgagtgcctcagagattcggcagctcagctttcacttcccaccaagagtcaccggccatccctggagtctggtcttctgcacgtcaagggacggtttcagcctgcagagcctgtaccggcggatggagggctgcagcgggccagtgctgctggtgctcagggaccaggacgggcagatatttggagccttctcctcctcggctatccgactcagcaaaggcttctatggtactggcgagacattcctcttctccttctccccacagctgaaggtctttaagtggactggaagcaactctttctttgtgaagggagacttggattcactgatgatgggcagtggcagtggccggtttgggctgtggttggatggagacttgttccgcgggggaagctccccttgcccgaccttcaacaacgaggtgctggcccggcaggagcagttctgcatccaggagctggaggcttggcttctcagctgacagccctgcggcaacagaattctatgattgaagcctctaaatgaattgtgcaggagagggagtttgtaaacaactgactacagacattcacattgggtcatctttaaaaagctggactctgcttttggatgcttctcggaggcgagttggattttggactgaagtactgtcgttccattcctttttttgaggtgttatgagtggggctataacatcgccatcctattaggaagagagagaaaaacaggcaatagagaaaagccagtttccatcatcttatttctgagtgaaagtctcaagtgcgcacatcctcatcttgcatatagattgcttctagctgtcctcaatccagggaaactccaaattacatatgccctgtgcttggggcaaattagaaacactacagtcttacgcaggaagagccttcatgaaaacagccactggcctctgcagagatgactgggagcagcataccactgcccacctctatggcctccttcacacaccttcacggagcacaaactctgtcctgttttcccaggagaaagacgggatgcactgaacccctagcttctctctcgcctggtcccctctgcaataaaaggcccaggtctacaagatggcaaagaaggggaggaagaacagtatgtacctgcagaatttaaatttttctctgcatcaaagctctaacgttggtcccatcagcataggctccagccaaagaagctcctccacccaaaataagggagagatccaaagggaggcgatacaatgacgtgaaaccatagaggtaagaagcaaggcctcctaatacttgactctatgctaaactgttctgaacttgtgggtagatcttctttggttacaagatgatgcacgatcttggagagcctctgttgtaccaggaatacaatgctggtgggaggattcgtgctcctcatctgcttatttgctctcagatccattcttcactcttcctctccctactctgtctcacaggagctactccggtaaattacatttctcagctcccatgcctgttggtttccagttagatttggtcagtgggaggctctggtgggagactggaggtgagaagagggcagagaagtcaggttttttctctccctacctcctctggcacgagcggcagtggcagtgactattctgtggttctagcttttgcaggtggccccagctcctggactcccacctgctcccttggtctctcctatcctagaggtggtagcagcttcctgctgttgaatcactgtcctctatgctcatttagctctgccaaaacttttgtatctcacccccatgttaaattttttctgttgaactacactggatctgacttgatagaactattaaaaatagtttttaaaaaa

SEQ ID NO: 5350 - DNA, 2653 bp, Homo sapiens; identical to SEQ ID NO: 1345

SEQ ID NO: 5351 - DNA, 14121 bp, Homo sapiens
attcccaccgggacctgcggggctgagtgcccttctcggttgctgccgctgaggagcccgcccagccagccagggccgcgaggccgaggccaggccgcagcccaggagccgccccaccgcagctggcgatggacccgccgaggcccgcgctgctggcgctgctggcgctgcctgcgctgctgctgctgctgctggcgggcgccagggccgaagaggaaatgctggaaaatgtcagcctggtctgtccaaaagatgcgacccgattcaagcacctccggaagtacacatacaactatgaggctgagagttccagtggagtccctgggactgctgattcaagaagtgccaccaggatcaactgcaaggttgagctggaggttccccagctctgcagcttcatcctgaagaccagccagtgcaccctgaaagaggtgtatggcttcaaccctgagggcaaagccttgctgaagaaaaccaagaactctgaggagtttgctgcagccatgtccaggtatgagctcaagctggccattccagaagggaagcaggttttcctttacccggagaaagatgaacctacttacatcctgaacatcaagaggggcatcatttctgccctcctggttcccccagagacagaagaagccaagcaagtgttgtttctggataccgtgtatggaaactgctccactcactttaccgtcaagacgaggaagggcaatgtggcaacagaaatatccactgaaagagacctggggcagtgtgatcgcttcaagcccatccgcacaggcatcagcccacttgctctcatcaaaggcatgacccgccccttgtcaactctgatcagcagcagccagtcctgtcagtacacactggacgctaagaggaagcatgtggcagaagccatctgcaaggagcaacacctcttcctgcctttctcctacaagaataagtatgggatggtagcacaagtgacacagactttgaaacttgaagacacaccaaagatcaacagccgcttctttggtgaaggtactaagaagatgggcctcgcatttgagagcaccaaatccacatcacctccaaagcaggccgaagctgttttgaagactctccaggaactgaaaaaactaaccatctctgagcaaaatatccagagagctaatctcttcaataagctggttactgagctgagaggcctcagtgatgaagcagtcacatctctcttgccacagctgattgaggtgtccagccccatcactttacaagccttggttcagtgtggacagcctcagtgctccactcacatcctccagtggctgaaacgtgtgcatgccaacccccttctgatagatgtggtcacctacctggtggccctgatccccgagccctcagcacagcagctgcgagagatcttcaacatggcgagggatcagcgcagccgagccaccttgtatgcgctgagccacgcggtcaacaactatcataagacaaaccctacagggacccaggagctgctggacattgctaattacctgatggaacagattcaagatgactgcactggggatgaagattacacctatttgattctgcgggtcattggaaatatgggccaaaccatggagcagttaactccagaactcaagtcttcaatcctgaaatgtgtccaaagtacaaagccatcactgatgatccagaaagctgccatccaggctctgcggaaaatggagcctaaagacaaggaccaggaggttcttcttcagactttccttgatgatgcttctccgggagataagcgactggctgcctatcttatgttgatgaggagtccttcacaggcagatattaacaaaattgtccaaattctaccatgggaacagaatgagcaagtgaagaactttgtggcttcccatattgccaatatcttgaactcagaagaattggatatccaagatctgaaaaagttagtgaaagaagctctgaaagaatctcaacttccaactgtcatggacttcagaaaattctctcggaactatcaactctacaaatctgtttctcttccatcacttgacccagcctcagccaaaatagaagggaatcttatatttgatccaaataactaccttcctaaagaaagcatgctgaaaactaccctcactgcctttggatttgcttcagctgacctcatcgagattggcttggaaggaaaaggctttgagccaacattggaagctctttttgggaagcaaggatttttcccagacagtgtcaacaaagctttgtactgggttaatggtcaagttcctgatggtgtctctaaggtcttagtggaccactttggctataccaaagatgataaacatgagcaggatatggtaaatggaataatgctcagtgttgagaagctgattaaagatttgaaatccaaagaagtcccggaagccagagcctacctccgcatcttgggagaggagcttggttttgccagtctccatgacctccagctcctgggaaagctgcttctgatgggtgcccgcactctgcaggggatcccccagatgattggagaggtcatcaggaagggctcaaagaatgacttttttcttcactacatcttcatggagaatgcctttgaactccccactggagctggattacagttgcaaatatcttcatctggagtcattgctcccggagccaaggctggagtaaaactggaagtagccaacatgcaggctgaactggtggcaaaaccctccgtgtctgtggagtttgtgacaaatatgggcatcatcattccggacttcgctaggagtggggtccagatgaacaccaacttcttccacgagtcgggtctggaggctcatgttgccctaaaagctgggaagctgaagtttatcattccttccccaaagagaccagtcaagctgctcagtggaggcaacacattacatttggtctctaccaccaaaacggaggtgatcccacctctcattgagaacaggcagtcctggtcagtttgcaagcaagtctttcctggcctgaattactgcacctcaggcgcttactccaacgccagctccacagactccgcctcctactatccgctgaccggggacaccagattagagctggaactgaggcctacaggagagattgagcagtattctgtcagcgcaacctatgagctccagagagaggacagagccttggtggataccctgaagtttgtaactcaagcagaaggtgcgaagcagactgaggctaccatgacattcaaatataatcggcagagtatgaccttgtccagtgaagtccaaattccggattttgatgttgacctcggaacaatcctcagagttaatgatgaatctactgagggcaaaacgtcttacagactcaccctggacattcagaacaagaaaattactgaggtcgccctcatgggccacctaagttgtgacacaaaggaagaaagaaaaatcaagggtgttatttccataccccgtttgcaagcagaagccagaagtgagatcctcgcccactggtcgcctgccaaactgcttctccaaatggactcatctgctacagcttatggctccacagtttccaagagggtggcatggcattatgatgaagagaagattgaatttgaatggaacacaggcaccaatgtagataccaaaaaaatgacttccaatttccctgtggatctctccgattatcctaagagcttgcatatgtatgctaatagactcctggatcacagagtccctcaaacagacatgactttccggcacgtgggttccaaattaatagttgcaatgagctcatggcttcagaaggcatctgggagtcttccttatacccagactttgcaagaccacctcaatagcctgaaggagttcaacctccagaacatgggattgccagacttccacatcccagaaaacctcttcttaaaaagcgatggccgggtcaaatataccttgaacaagaacagtttgaaaattgagattcctttgccttttggtggcaaatcctccagagatctaaagatgttagagactgttaggacaccagccctccacttcaagtctgtgggattccatctgccatctcgagagttccaagtccctacttttaccattcccaagttgtatcaactgcaagtgcctctcctgggtgttctagacctctccacgaatgtctacagcaacttgtacaactggtccgcctcctacagtggtggcaacaccagcacagaccatttcagccttcgggctcgttaccacatgaaggctgactctgtggttgacctgctttcctacaatgtgcaaggatctggagaaacaacatatgaccacaagaatacgttcacactatcatatgatgggtctctacgccacaaatttctagattcgaatatcaaattcagtcatgtagaaaaacttggaaacaacccagtctcaaaaggtttactaatattcgatgcatctagttcctggggaccacagatgtctgcttcagttcatttggactccaaaaagaaacagcatttgtttgtcaaagaagtcaagattgatgggcagttcagagtctcttcgttctatgctaaaggcacatatggcctgtcttgtcagagggatcctaacactggccggctcaatggagagtccaacctgaggtttaactcctcctacctccaaggcaccaaccagataacaggaagatatgaagatggaaccctctccctcacctccacctctgatctgcaaagtggcatcattaaaaatactgcttccctaaagtatgagaactacgagctgactttaaaatctgacaccaatgggaagtataagaactttgccacttctaacaagatggatatgaccttctctaagcaaaatgcactgctgcgttctgaatatcaggctgattacgagtcattgaggttcttcagcctgctttctggatcactaaattcccatggtcttgagttaaatgctgacatcttaggcactgacaaaattaatagtggtgctcacaaggcgacactaaggattggccaagatggaatatctaccagtgcaacgaccaacttgaagtgtagtctcctggtgctggagaatgagctgaatgcagagcttggcctctctggggcatctatgaaattaacaacaaatggccgcttcagggaacacaatgcaaaattcagtctggatgggaaagccgccctcacagagctatcactgggaagtgcttatcaggccatgattctgggtgtcgacagcaaaaacattttcaacttcaaggtcagtcaagaaggacttaagctctcaaatgacatgatgggctcatatgctgaaatgaaatttgaccacacaaacagtctgaacattgcaggcttatcactggacttctcttcaaaacttgacaacatttacagctctgacaagttttataagcaaactgttaatttacagctacagccctattctctggtaactactttaaacagtgacctgaaatacaatgctctggatctcaccaacaatgggaaactacggctagaacccctgaagctgcatgtggctggtaacctaaaaggagcctaccaaaataatgaaataaaacacatctatgccatctcttctgctgccttatcagcaagctataaagcagacactgttgctaaggttcagggtgtggagtttagccatcggctcaacacagacatcgctgggctggcttcagccattgacatgagcacaaactataattcagactcactgcatttcagcaatgtcttccgttctgtaatggccccgtttaccatgaccatcgatgcacatacaaatggcaatgggaaactcgctctctggggagaacatactgggcagctgtatagcaaattcctgttgaaagcagaacctctggcatttactttctctcatgattacaaaggctccacaagtcatcatctcgtgtctaggaaaagcatcagtgcagctcttgaacacaaagtcagtgccctgcttactccagctgagcagacaggcacctggaaactcaagacccaatttaacaacaatgaatacagccaggacttggatgcttacaacactaaagataaaattggcgtggagcttactggacgaactctggctgacctaactctactagactccccaattaaagtgccacttttactcagtgagcccatcaatatcattgatgctttagagatgagagatgccgttgagaagccccaagaatttacaattgttgcttttgtaaagtatgataaaaaccaagatgttcactccattaacctcccattttttgagaccttgcaagaatattttgagaggaatcgacaaaccattatagttgtactggaaaacgtacagagaaacctgaagcacatcaatattgatcaatttgtaagaaaatacagagcagccctgggaaaactcccacagcaagctaatgattatctgaattcattcaattgggagagacaagtttcacatgccaaggagaaactgactgctctcacaaaaaagtatagaattacagaaaatgatatacaaattgcattagatgatgccaaaatcaactttaatgaaaaactatctcaactgcagacatatatgatacaatttgatcagtatattaaagatagttatgatttacatgatttgaaaatagctattgctaatattattgatgaaatcattgaaaaattaaaaagtcttgatgagcactatcatatccgtgtaaatttagtaaaaacaatccatgatctacatttgtttattgaaaatattgattttaacaaaagtggaagtagtactgcatcctggattcaaaatgtggatactaagtaccaaatcagaatccagatacaagaaaaactgcagcagcttaagagacacatacagaatatagacatccagcacctagctggaaagttaaaacaacacattgaggctattgatgttagagtgcttttagatcaattgggaactacaatttcatttgaaagaataaatgacattcttgagcatgtcaaacactttgttataaatcttattggggattttgaagtagctgagaaaatcaatgccttcagagccaaagtccatgagttaatcgagaggtatgaagtagaccaacaaatccaggttttaatggataaattagtagagttggcccaccaatacaagttgaaggagactattcagaagctaagcaatgtcctacaacaagttaagataaaagattactttgagaaattggttggatttattgatgatgctgtcaagaagcttaatgaattatcttttaaaacattcattgaagatgttaacaaattccttgacatgttgataaagaaattaaagtcatttgattaccaccagtttgtagatgaaaccaatgacaaaatccgtgaggtgactcagagactcaatggtgaaattcaggctctggaactaccacaaaaagctgaagcattaaaactgtttttagaggaaaccaaggccacagttgcagtgtatctggaaagcctacaggacaccaaaataaccttaatcatcaattggttacaggaggctttaagttcagcatctttggctcacatgaaggccaaattccgagagaccctagaagatacacgagaccgaatgtatcaaatggacattcagcaggaacttcaacgatacctgtctctggtaggccaggtttatagcacacttgtcacctacatttctgattggtggactcttgctgctaagaaccttactgactttgcagagcaatattctatccaagattgggctaaacgtatgaaagcattggtagagcaagggttcactgttcctgaaatcaagaccatccttgggaccatgcctgcctttgaagtcagtcttcaggctcttcagaaagctaccttccagacacctgattttatagtccccctaacagatttgaggattccatcagttcagataaacttcaaagacttaaaaaatataaaaatcccatccaggttttccacaccagaatttaccatccttaacaccttccacattccttcctttacaattgactttgtagaaatgaaagtaaagatcatcagaaccattgaccagatgctgaacagtgagctgcagtggcccgttccagatatatatctcagggatctgaaggtggaggacattcctctagcgagaatcaccctgccagacttccgtttaccagaaatcgcaattccagaattcataatcccaactctcaaccttaatgattttcaagttcctgaccttcacataccagaattccagcttccccacatctcacacacaattgaagtacctacttttggcaagctatacagtattctgaaaatccaatctcctcttttcacattagatgcaaatgctgacatagggaatggaaccacctcagcaaacgaagcaggtatcgcagcttccatcactgccaaaggagagtccaaattagaagttctcaattttgattttcaagcaaatgcacaactctcaaaccctaagattaatccgctggctctgaaggagtcagtgaagttctccagcaagtacctgagaacggagcatgggagtgaaatgctgttttttggaaatgctattgagggaaaatcaaacacagtggcaagtttacacacagaaaaaaatacactggagcttagtaatggagtgattgtcaagataaacaatcagcttaccctggatagcaacactaaatacttccacaaattgaacatccccaaactggacttctctagtcaggctgacctgcgcaacgagatcaagacactgttgaaagctggccacatagcatggacttcttctggaaaagggtcatggaaatgggcctgccccagattctcagatgagggaacacatgaatcacaaattagtttcaccatagaaggacccctcacttcctttggactgtccaataagatcaatagcaaacacctaagagtaaaccaaaacttggtttatgaatctggctccctcaacttttctaaacttgaaattcaatcacaagtcgattcccagcatgtgggccacagtgttctaactgctaaaggcatggcactgtttggagaagggaaggcagagtttactgggaggcatgatgctcatttaaatggaaaggttattggaactttgaaaaattctcttttcttttcagcccagccatttgagatcacggcatccacaaacaatgaagggaatttgaaagttcgttttccattaaggttaacagggaagatagacttcctgaataactatgcactgtttctgagtcccagtgcccagcaagcaagttggcaagtaagtgctaggttcaatcagtataagtacaaccaaaatttctctgctggaaacaacgagaacattatggaggcccatgtaggaataaatggagaagcaaatctggatttcttaaacattcctttaacaattcctgaaatgcgtctaccttacacaataatcacaactcctccactgaaagatttctctctatgggaaaaaacaggcttgaaggaattcttgaaaacgacaaagcaatcatttgatttaagtgtaaaagctcagtataagaaaaacaaacacaggcattccatcacaaatcctttggctgtgctttgtgagtttatcagtcagagcatcaaatcctttgacaggcattttgaaaaaaacagaaacaatgcattagattttgtcaccaaatcctataatgaaacaaaaattaagtttgataagtacaaagctgaaaaatctcacgacgagctccccaggacctttcaaattcctggatacactgttccagttgtcaatgttgaagtgtctccattcaccatagagatgtcggcattcggctatgtgttcccaaaagcagtcagcatgcctagtttctccatcctaggttctgacgtccgtgtgccttcatacacattaatcctgccatcattagagctgccagtccttcatgtccctagaaatctcaagctttctcttccagatttcaaggaattgtgtaccataagccatatttttattcctgccatgggcaatattacctatgatttctcctttaaatcaagtgtcatcacactgaataccaatgctgaactttttaaccagtcagatattgttgctcatctcctttcttcatcttcatctgtcattgatgcactgcagtacaaattagagggcaccacaagattgacaagaaaaaggggattgaagttagccacagctctgtctctgagcaacaaatttgtggagggtagtcataacagtactgtgagcttaaccacgaaaaatatggaagtgtcagtggcaacaaccacaaaagcccaaattccaattttgagaatgaatttcaagcaagaacttaatggaaataccaagtcaaaacctactgtctcttcctccatggaatttaagtatgatttcaattcttcaatgctgtactctaccgctaaaggagcagttgaccacaagcttagcttggaaagcctcacctcttacttttccattgagtcatctaccaaaggagatgtcaagggttcggttctttctcgggaatattcaggaactattgctagtgaggccaacacttacttgaattccaagagcacacggtcttcagtgaagctgcagggcacttccaaaattgatgatatctggaaccttgaagtaaaagaaaattttgctggagaagccacactccaacgcatatattccctctgggagcacagtacgaaaaaccacttacagctagagggcctctttttcaccaacggagaacatacaagcaaagccaccctggaactctctccatggcaaatgtcagctcttgttcaggtccatgcaagtcagcccagttccttccatgatttccctgaccttggccaggaagtggccctgaatgctaacactaagaaccagaagatcagatggaaaaatgaagtccggattcattctgggtctttccagagccaggtcgagctttccaatgaccaagaaaaggcacaccttgacattgcaggatccttagaaggacacctaaggttcctcaaaaatatcatcctaccagtctatgacaagagcttatgggatttcctaaagctggatgtaaccaccagcattggtaggagacagcatcttcgtgtttcaactgcctttgtgtacaccaaaaaccccaatggctattcattctccatccctgtaaaagttttggctgataaattcattattcctgggctgaaactaaatgatctaaattcagttcttgtcatgcctacgttccatgtcccatttacagatcttcaggttccatcgtgcaaacttgacttcagagaaatacaaatctataagaagctgagaacttcatcatttgccctcaacctaccaacactccccgaggtaaaattccctgaagttgatgtgttaacaaaatattctcaaccagaagactccttgattcccttttttgagataaccgtgcctgaatctcagttaactgtgtcccagttcacgcttccaaaaagtgtttcagatggcattgctgctttggatctaaatgcagtagccaacaagatcgcagactttgagttgcccaccatcatcgtgcctgagcagaccattgagattccctccattaagttctctgtacctgctggaattgtcattccttcctttcaagcactgactgcacgctttgaggtagactctcccgtgtataatgccacttggagtgccagtttgaaaaacaaagcagattatgttgaaacagtcctggattccacatgcagctcaaccgtacagttcctagaatatgaactaaatgttttgggaacacacaaaatcgaagatggtacgttagcctctaagactaaaggaacatttgcacaccgtgacttcagtgcagaatatgaagaagatggcaaatatgaaggacttcaggaatgggaaggaaaagcgcacctcaatatcaaaagcccagcgttcaccgatctccatctgcgctaccagaaagacaagaaaggcatctccacctcagcagcctccccagccgtaggcaccgtgggcatggatatggatgaagatgacgacttttctaaatggaacttctactacagccctcagtcctctccagataaaaaactcaccatattcaaaactgagttgagggtccgggaatctgatgaggaaactcagatcaaagttaattgggaagaagaggcagcttctggcttgctaacctctctgaaagacaacgtgcccaaggccacaggggtcctttatgattatgtcaacaagtaccactgggaacacacagggctcaccctgagagaagtgtcttcaaagctgagaagaaatctgcagaacaatgctgagtgggtttatcaaggggccattaggcaaattgatgatatcgacgtgaggttccagaaagcagccagtggcaccactgggacctaccaagagtggaaggacaaggcccagaatctgtaccaggaactgttgactcaggaaggccaagccagtttccagggactcaaggataacgtgtttgatggcttggtacgagttactcaagaattccatatgaaagtcaagcatctgattgactcactcattgattttctgaacttccccagattccagtttccggggaaacctgggatatacactagggaggaactttgcactatgttcataagggaggtagggacggtactgtcccaggtatattcgaaagtccataatggttcagaaatactgttttcctatttccaagacctagtgattacacttcctttcgagttaaggaaacataaactaatagatgtaatctcgatgtatagggaactgttgaaagatttatcaaaagaagcccaagaggtatttaaagccattcagtctctcaagaccacagaggtgctacgtaatcttcaggaccttttacaattcattttccaactaatagaagataacattaaacagctgaaagagatgaaatttacttatcttattaattatatccaagatgagatcaacacaatcttcagtgattatatcccatatgtttttaaattgttgaaagaaaacctatgccttaatcttcataagttcaatgaatttattcaaaacgagcttcaggaagcttctcaagagttacagcagatccatcaatacattatggcccttcgtgaagaatattttgatccaagtatagttggctggacagtgaaatattatgaacttgaagaaaagatagtcagtctgatcaagaacctgttagttgctcttaaggacttccattctgaatatattgtcagtgcctctaactttacttcccaactctcaagtcaagttgagcaatttctgcacagaaatattcaggaatatcttagcatccttaccgatccagatggaaaagggaaagagaagattgcagagctttctgccactgctcaggaaataattaaaagccaggccattgcgacgaagaaaataatttctgattaccaccagcagtttagatataaactgcaagatttttcagaccaactctctgattactatgaaaaatttattgctgaatccaaaagattgattgacctgtccattcaaaactaccacacatttctgatatacatcacggagttactgaaaaagctgcaatcaaccacagtcatgaacccctacatgaagcttgctccaggagaacttactatcatcctctaattttttaaaagaaatcttcatttattcttcttttccaattgaactttcacatagcacagaaaaaattcaaactgcctatattgataaaaccatacagtgagccagccttgcagtaggcagtagactataagcagaagcacatatgaactggacctgcaccaaagctggcaccagggctcggaaggtctctgaactcagaaggatggcattttttgcaagttaaagaaaatcaggatctgagttattttgctaaacttgggggaggaggaacaaataaatggagtctttattgtgtatcata

SEQ ID NO: 5352 - DNA, 1422 bp, Homo sapiens
agtcacatttcagccactgctctgagaatttgtgagcagcccctaacaggctgttacttcactacaactgacgatatgatcatcttaatttacttatttctcttgctatgggaagacactcaaggatggggattcaaggatggaatttttcataactccatatggcttgaacgagcagccggtgtgtaccacagagaagcacggtctggcaaatacaagctcacctacgcagaagctaaggcggtgtgtgaatttgaaggcggccatctcgcaacttacaagcagctagaggcagccagaaaaattggatttcatgtctgtgctgctggatggatggctaagggcagagttggataccccattgtgaagccagggcccaactgtggatttggaaaaactggcattattgattatggaatccgtctcaataggagtgaaagatgggatgcctattgctacaacccacacgcaaaggagtgtggtggcgtctttacagatccaaagcaaatttttaaatctccaggcttcccaaatgagtacgaagataaccaaatctgctactggcacattagactcaagtatggtcagcgtattcacctgagttttttagattttgaccttgaagatgacccaggttgcttggctgattatgttgaaatatatgacagttacgatgatgtccatggctttgtgggaagatactgtggagatgagcttccagatgacatcatcagtacaggaaatgtcatgaccttgaagtttctaagtgatgcttcagtgacagctggaggtttccaaatcaaatatgttgcaatggatcctgtatccaaatccagtcaaggaaaaaatacaagtactacttctactggaaataaaaactttttagctggaagatttagccacttataaaaaaaaaaaaaaggatgatcaaaacacacagtgtttatgttggaatcttttggaactcctttgatctcactgttattattaacatttatttattatttttctaaatgtgaaagcaatacataatttagggaaaattggaaaatataggaaactttaaacgagaaaatgaaacctctcataatcccactgcatagaaataacaagcgttaacattttcatatttttttctttcagtcatttttctatttgtggtatatgtatatatgtacctatatgtatttgcatttgaaattttggaatcctgctctatgtacagttttgtattatactttttaaatcttgaactttataaacattttctgaaatcattgattattctacaaaaacatgattttaaacagctgtaaaatattctatgatatgaatgttttatgcattatttaagcctgtctctattgttggaatttcaggtcattttcataaatattgttgcaataaatatccttgaacaca

SEQ ID NO: 5353 - DNA, 3135 bp, Homo sapiens
ccggccagcgggcgggctccccagccaggccgctgcacctgtcaggggaacaagctggaggagcaggaccctagacctctgcagcccataccaggtctcatggaggggaacaagctggaggagcaggactctagccctccacagtccactccagggctcatgaaggggaacaagcgtgaggagcaggggctgggccccgaacctgcggcgccccagcagcccacggcggaggaggaggccctgatcgagttccaccgctcctaccgagagctcttcgagttcttctgcaacaacaccaccatccacggcgccatccgcctggtgtgctcccagcacaaccgcatgaagacggccttctgggcagtgctgtggctctgcacctttggcatgatgtactggcaattcggcctgcttttcggagagtacttcagctaccccgtcagcctcaacatcaacctcaactcggacaagctcgtcttccccgcagtgaccatctgcaccctcaatccctacaggtacccggaaattaaagaggagctggaggagctggaccgcatcacagagcagacgctctttgacctgtacaaatacagctccttcaccactctcgtggccggctcccgcagccgtcgcgacctgcgggggactctgccgcaccccttgcagcgcctgagggtcccgcccccgcctcacggggcccgtcgagcccgtagcgtggcctccagcttgcgggacaacaacccccaggtggactggaaggactggaagatcggcttccagctgtgcaaccagaacaaatcggactgcttctaccagacatactcatcaggggtggatgcggtgagggagtggtaccgcttccactacatcaacatcctgtcgaggctgccagagactctgccatccctggaggaggacacgctgggcaacttcatcttcgcctgccgcttcaaccaggtctcctgcaaccaggcgaattactctcacttccaccacccgatgtatggaaactgctatactttcaatgacaagaacaactccaacctctggatgtcttccatgcctggaatcaacaacggtctgtccctgatgctgcgcgcagagcagaatgacttcattcccctgctgtccacagtgactggggcccgggtaatggtgcacgggcaggatgaacctgcctttatggatgatggtggctttaacttgcggcctggcgtggagacctccatcagcatgaggaaggaaaccctggacagacttgggggcgattatggcgactgcaccaagaatggcagtgatgttcctgttgagaacctttacccttcaaagtacacacagcaggtgtgtattcactcctgcttccaggagagcatgatcaaggagtgtggctgtgcctacatcttctatccgcggccccagaacgtggagtactgtgactacagaaagcacagttcctgggggtactgctactataagctccaggttgacttctcctcagaccacctgggctgtttcaccaagtgccggaagccatgcagcgtgaccagctaccagctctctgctggttactcacgatggccctcggtgacatcccaggaatgggtcttccagatgctatcgcgacagaacaattacaccgtcaacaacaagagaaatggagtggccaaagtcaacatcttcttcaaggagctgaactacaaaaccaattctgagtctccctctgtcacgatggtcaccctcctgtccaacctgggcagccagtggagcctgtggttcggctcctcggtgttgtctgtggtggagatggctgagctcgtctttgacctgctggtcatcatgttcctcatgctgctccgaaggttccgaagccgatactggtctccaggccgagggggcaggggtgctcaggaggtagcctccaccctggcatcctcccctccttcccacttctgcccccaccccatgtctctgtccttgtcccagccaggccctgctccctctccagccttgacagcccctccccctgcctatgccaccctgggcccccgcccatctccagggggctctgcaggggccagttcctccacctgtcctctgggggggccctgagagggaaggagaggtttctcacaccaaggcagatgctcctctggtgggagggtgctggccctggcaagattgaaggatgtgcagggcttcctctcagagccgcccaaactgccgttgatgtgtggaggggaagcaagatgggtaagggctcaggaagttgctccaagaacagtagctgatgaagctgcccagaagtgccttggctccagccctgtaccccttggtactgcctctgaacactctggtttccccacccaactgcggctaagtctctttttcccttggatcagccaagcgaaacttggagctttgacaaggaactttcctaagaaaccgctgataaccaggacaaaacacaaccaagggtacacgcaggcatgcacgggtttcctgcccagcgacggcttaagccagcccccgactggcctggccacactgctctccagtagcacagatgtctgctcctcctcttgaacttgggtgggaaaccccacccaaaagccccctttgttacttaggcaattccccttccctgactcccgagggctagggctagagcagacccgggtaagtaaaggcagacccagggctcctctagcctcatacccgtgccctcacagagccatgccccggcacctctgccctgtgtctttcatacctctacatgtctgcttgagatatttcctcagcctgaaagtttccccaaccatctgccagagaactcctatgcatcccttagaaccctgctcagacaccattacttttgtgaacgcttctgccacatcttgtcttccccaaaattgatcactccgccttctcctgggctcccgtagcacactataacatctgctggagtgttgctgttgcaccatactttcttgtacatttgtgtctcccttcccaactagactgtaagtgccttgcggtcagggactgaatcttgcccgtttatgtatgctccatgtctagcccatcatcctgcttggagcaagtaggcaggagctcaataaatgtttgttgcatgaa

SEQ ID NO: 5354 - DNA, 8062 bp, Homo sapiens
acagcgctctcgacacggagcacccttctagcttcttcgtctccaggactgacgctcaggctcctctctcgccttagcccaacttgctttcccgcctcgcaaactccggtttccctccactcccaactcttttcactacacgtttcccctcctctatctcccacgccacgaaccccgatccccagactcctctctcccgccctcctccttcctctctcctcccttcaactcttcatccgcttccacctcagactctgcgcgcacccaattcagtcgcccgctcccgttcggctcctcgaagccatggcgggacctgggggctggagggacagggaggtcacggatctgggccacctgccggatccaactggaatattctcactagataaaaccattggccttggtacttatggcagaatctatttgggacttcatgagaagactggtgcatttacagctgttaaagtgatgaacgctcgtaagacccctttacctgaaataggaaggcgagtgagagtgaataaatatcaaaaatctgttgggtggagatacagtgatgaggaagaggatctcaggactgaactcaaccttctgaggaagtactctttccacaaaaacattgtgtccttctatggagcatttttcaagctgagtccccctggtcagcggcaccaactttggatggtgatggagttatgtgcagcaggttcggtcactgatgtagtgagaatgaccagtaatcagagtttaaaagaagattggattgcttatatctgccgagaaatccttcagggcttagctcaccttcacgcacaccgagtaattcaccgggacatcaaaggtcagaatgtgctgctgactcataatgctgaagtaaaactggttgattttggagtgagtgcccaggtgagcagaactaatggaagaaggaatagtttcattgggacaccatactggatggcacctgaggtgattgactgtgatgaggacccaagacgctcctatgattacagaagtgatgtgtggtctgtgggaattactgccattgaaatggctgaaggagcccctcctctgtgtaaccttcaacccttggaagctctcttcgttattttgcgggaatctgctcccacagtcaaatccagcggatggtcccgtaagttccacaatttcatggaaaagtgtacgataaaaaatttcctgtttcgtcctacttctgcaaacatgcttcaacacccatttgttcgggatataaaaaatgaacgacatgttgttgagtcattaacaaggcatcttactggaatcattaaaaaaagacagaaaaaaggaatacctttgatctttgaaagagaagaagctattaaggaacagtacaccgtgagaagattcagaggaccctcttgcactcacgagcttctgagattgccaaccagcagcagatgcagaccacttagagtcctgcatggggaaccctctcagccaaggtggctacctgatcgagaagagccacaggtccaggcacttcagcagctacagggagcagccagggtattcatgccactgcaggctctggacagtgcacctaagcctctaaaggggcaggctcaggcacctcaacgactacaaggggcagctcgggtgttcatgccactacaggctcaggtgaaggctaaagcctctaaacctctacaaatgcagattaaggcacctccacgactacggagggcagccagggtgctcatgccactacaggcacaggttagggcacctaggcttctgcaggtacagtcccaggtatccaaaaagcagcaggcccagacccagacatcagaaccacaagatttggaccaggtaccagaggaatttcagggtcaagatcaggtacccgaacaacaaaggcagggccaggcccctgaacaacagcagaggcacaaccaggtgcctgaacaagagctggagcagaaccaggcacctgaacagccagaggtacaggaacaggctgccgagcctgcacaggcagagactgaggcagaggaacctgagtcattacgagtaaatgcccaggtatttctgcccctgctatcacaagatcaccatgtgctgttgccactacatttggatactcaggtgctcattccagtagaggggcaaactgaaggatcacctcaggcacaggcttggacactagaacccccacaggcaattggctcagttcaagcactgatagagggactatcaagagacttgcttcgggcaccaaactcaaataactcaaagccacttggtccgttgcaaaccctgatggaaaatctgtcatcaaataggttttactcacaaccagaacaggcacgggagaaaaaatcaaaagtttctactctgaggcaagcactggcaaaaagactatcaccaaagaggttcagggcaaagtcatcatggagacctgaaaagcttgaactctcggatttagaagcccgcaggcaaaggcgccaacgcagatgggaagatatctttaatcagcatgaggaagaattgagacaagttgataaagacaaagaagatgaatcatcagacaatgatgaagtatttcattcgattcaggctgaagtccagatagagccattgaagccatacatttcaaatcctaaaaaaattgaggttcaagagagatctccttctgtgcctaacaaccaggatcatgcacatcatgtcaagttctcttcaagcgttcctcagcggtctcttttggaacaagctcagaagcccattgacatcagacaaaggagttcgcaaaatcgtcaaaattggctggcagcatcagaatcttcttctgaggaagaaagtcctgtgactggaaggaggtctcagtcatcaccaccttattctactattgatcagaagttgctggttgacatccatgttccagatggatttaaagtaggaaaaatatcaccccctgtatacttgacaaacgaatgggtaggctataatgcactctctgaaatcttccggaatgattggttaactccggcacctgtcattcagccacctgaagaggatggtgattatgttgaactctatgatgccagtgctgatactgatggtgatgatgatgatgagtctaatgatacttttgaagatacctatgatcatgccaatggcaatgatgacttggataaccaggttgatcaggctaatgatgtttgtaaagaccatgatgatgacaacaataagtttgttgatgatgtaaataataattattatgaggcgcctagttgtccaagggcaagctatggcagagatggaagctgcaagcaagatggttatgatggaagtcgtggaaaagaggaagcctacagaggctatggaagccatacagccaatagaagccatggaggaagtgcagccagtgaggacaatgcagccattggagatcaggaagaacatgcagccaatataggcagtgaaagaagaggcagtgagggtgatggaggtaagggagtcgttcgaaccagtgaagagagtggagcccttggactcaatggagaagaaaattgctcagagacagatggtccaggattgaagagacctgcgtctcaggactttgaatatctacaggaggagccaggtggtggaaatgaggcctcaaatgccattgactcaggtgctgcaccgtcagcacctgatcatgagagtgacaataaggacatatcagaatcatcaacacaatcagatttttctgccaatcactcatctccttccaaaggttctgggatgtctgctgatgctaactttgccagtgccatcttatacgctggattcgtagaagtacctgaggaatcacctaagcaaccctctgaagtcaatgttaacccactctatgtctctcctgcatgtaaaaaaccactaatccacatgtatgaaaaggagttcacttctgagatctgctgtggttctttgtggggagtcaatttgctgttgggaacccgatctaatctatatctgatggacagaagtggaaaggctgacattactaaacttataaggcgaagaccattccgccagattcaagtcttagagccactcaatttgctgattaccatctcaggtcataagaacagacttcgggtgtatcatctgacctggttgaggaacaagattttgaataatgatccagaaagtaaaagaaggcaagaagaaatgctgaagacagaggaagcctgcaaagctattgataagttaacaggctgtgaacacttcagtgtcctccaacatgaagaaacaacatatattgcaattgctttgaaatcatcaattcacctttatgcatgggcaccaaagtcctttgatgaaagcactgctattaaagtatgcattgatcaatcagcagactctgaaggagactacatgtcctatcaagcctatatacgaatactggcaaaaatacaggcagctgatccagtgaaccggtttaagagaccagatgagctccttcatttgctgaagctcaaggtatttccaacacttgatcataagccagtgacagttgacctggctattggttctgaaaaaagactaaagattttcttcagctcagcagatggatatcacctcatcgatgcagaatctgaggttatgtctgatgtgaccctgccaaagaatcccctggaaatcattataccacagaatatcatcattttacctgattgcttgggaattggcatgatgctcaccttcaatgctgaagccctctctgtggaagcaaatgaacaactcttcaagaagatccttgaaatgtggaaagacataccatcttctatagcttttgaatgtacacagcgaaccacaggatggggccaaaaggccattgaagtgcgctctttgcaatccagggttctggaaagtgagctgaagcgcaggtcaattaagaagctgagattcctgtgcacccggggtgacaagctgttctttacctctaccctgcgcaatcaccacagccgggtttacttcatgacacttggaaaacttgaagagctccaaagcaattatgatgtctaaaagtttccagtgatttattaccacattataaacatcatgtataggcagtctgcatcttcagatttcagagattaaatgagtattcagttttatttttagtaaagattaaatccaaaactttacttttaatgtagcacagaatagttttaatgagaaatgcagctttatgtataaaattaactatagcaagctctaggtactccaatggtgtacaatgtcttttgcacaaactttgtaacttttgttactgtgaattcaaacattactctttggacagtttggacagtatctgtattcagattttacaacatggagtaaagaaacctgttatgaattagattacaagcagccttcaaaagaattggcactgggataagatttttcagaaaaagaaaaacatcggcaaactgtgtgtgatttttccaaagctatataaagaaccaaaggtttagtcaagaaacaaaaatcttaaagattattataacccagactaaggttgaacaacctgcatgcccagagaaaactatggcgacaaaggggaaaaggccaccactcgttttctcactgattcatgccaattaagcctacagttaaagaccagttttgttcttttcacccatttttaagctggttttctcctgataagaagaaaggaagaaagccccagacgcttggtttttctcagaacccccaaaagatgtgcaatagctgttgttacaaaccaccaaataatacagttgtgagcctgaatacaggactgaactcctatacacgtgtactgtagaatgagtattttttaataccttaaggtaggcgtcaaattctactccccaaagcagagatagattgatttatcaaaattattatctggccaacagtgtgactatcagacagcatcaaatatttgcccaatccaagattagactacacaaaagcttccttccagtattaaacaaaaagaattaaacataactatgaaaaaactttgctaatatctgtgtttttcagatttcattttttgtaaaatcagaaattaatctaaacatattcagtgataagttcatgtgtaacgacttaatgttaaaggttaaaaaaaagatttcacaaaatatacaactttcaccatatatataagcctgcaaaattagagtagtgaaagtcatgctagtccatcacccaaatatgttatagacgccatagacaggtgatgtttggtcacctatggtaactgctacctgatgaagagcataatttctgcatatccatcctcaataccatggtaaattctggggcaatagagaagcaacagaactgccacaaagtatacctcaatataattcctctagttctgcttctaaaatctgaggacagtgctagtgggaaaataattttcaaactacctggttaaccaaaatacaaaagcagctgactatgtgtgatttcataatagcacatttcttgacacttagtgctagaaatgaagatttggattttcctaacaacttacatcaagaatgtagtgtagctcattattgagaatttaggaaagcctgaatccattaattaaggaaataaatgtgactcacatttcttttactgtgacacaataatgtgatcctaaaactggcttatccttgagtgtttacaactcaaacaactttttgaatgcagtagttttttttttttaaaaacaaacttttatgtcaaattttttttcttagaagtagtcttcattattataaatttgtacaccaaaaggccatggggaactttgtgcaagtacctcatcgctgagcaaatggagcttgctatgttttaatttcagaaaatttcctcatatacgtagtgtgtagaatcaagtcttttaataattcattttttcttcataatatttactcaaagttaagcttaaaaataagttttatcttaaaatcatatttgaagacagtaagacagtaaactattttaggaagtcaacccccattgcactctgtggcagttattctggtaaaaataggcaaaagtgacctgaatctacaatgatgtcccaaagtaaccaagtaagagagattgtaaatgataaaccgagctttaaaggataaagtgttaataaagaaaggaagctgggcacatgtcaaaaagggagatcgaaatgttaggtaatcatttagaaaggacagaaaatatttaaagtggctcataggtaatgaatatttctgacttagatgtaaatccatctggaatctttacatcctttgccagctgaaacaagaaagtgaagggacaatgatatttcatggtcagtttattttgtaagagacagaagaaattatatctatacattaccttgtagcagcagtacctggaagccccagcccgtcacagaagtgtggaggggggctcctgactagacaatttccctagcccttgtgatttgaagcatgaaagttctggcaggttatgagcagcactagggataaagtatggttttattttggtgtaatttaggtttttcaacaaagcccttgtctaaaataaaaggcattattggaaatatttgaaaactagaaaatgatggataaaagggctgataagaaaatttctgactgtcagtagaagtgagataagatcctcagaggaaacagtaagaagggataatcattaagatagtaaaacaggcaaagcagaatcacatgtgcacacacacatacacatgtaaacattggaatgcataagttttaatattttagcgctatcagtttctaaatgcattaattactaactgccctctcccaagattcatttagttcaaacagtatccgtaaactaggaataatgccacatgcattcaatgggatcttttaagtactcttcagtttgttccaagaaatgtgcctactgaaatcaaattaatttgtattcaatgtgtacttcaagactgctaattgtttcatctgaaagcctacaatgaatcattgttcaaccttgaaaaataaaattttgtaaaaca

SEQ ID NO: 5355 - DNA, 4412 bp, Homo sapiens
gcgcggaggcgggggcgcgctggcggccgaggcggcggcggcggcggcgaaggcaggcgggccgggcgcgggccccgccgccgggatgccgaggagccggggcggccgcgccgcgccggggccgccgccgccgccgccgccgccgggccaggccccgcgctggagccgctggcgggtccctgggcggctgctgctgctgctgctgcccgcgctctgctgcctcccgggcgccgcgcgggcggcggcggcggcggcgggggcagggaaccgggcagcggtggcggtggcggtggcgcgggcggacgaggcggaggcgcccttcgccgggcagaactggttaaagtcctatggctatctgcttccctatgactcacgggcatctgcgctgcactcagcgaaggccttgcagtcggcagtctccactatgcagcagttttacgggatcccggtcaccggtgtgttggatcagacaacgatcgagtggatgaagaaaccccgatgtggtgtccctgatcacccccacttaagccgtaggcggagaaacaagcgctatgccctgactggacagaagtggaggcaaaaacacatcacctacagcattcacaactataccccaaaagtgggtgagctagacacgcggaaagctattcgccaggctttcgatgtgtggcagaaggtgaccccactgacctttgaagaggtgccataccatgagatcaaaagtgaccggaaggaggcagacatcatgatcttttttgcttctggtttccatggcgacagctccccatttgatggagaagggggattcctggcccatgcctacttccctggcccagggattggaggagacacccactttgactccgatgagccatggacgctaggaaatgccaaccatgacgggaacgacctcttcctggtggctgtgcatgagctgggccacgcgctgggactggagcactccagcgaccccagcgccatcatggcgcccttctaccagtacatggagacgcacaacttcaagctgccccaggacgatctccagggcatccagaagatctatggacccccagccgagcctctggagcccacaaggccactccctacactccccgtccgcaggatccactcaccatcggagaggaaacacgagcgccagcccaggccccctcggccgcccctcggggaccggccatccacaccaggcaccaaacccaacatctgtgacggcaacttcaacacagtggccctcttccggggcgagatgtttgtctttaaggatcgctggttctggcgtctgcgcaataaccgagtgcaggagggctaccccatgcagatcgagcagttctggaagggcctgcctgcccgcatcgacgcagcctatgaaagggccgatgggagatttgtcttcttcaaaggtgacaagtattgggtgtttaaggaggtgacggtggagcctgggtacccccacagcctgggggagctgggcagctgtttgccccgtgaaggcattgacacagctctgcgctgggaacctgtgggcaagacctactttttcaaaggcgagcggtactggcgctacagcgaggagcggcgggccacggaccctggctaccctaagcccatcaccgtgtggaagggcatcccacaggctccccaaggagccttcatcagcaaggaaggatattacacctatttctacaagggccgggactactggaagtttgacaaccagaaactgagcgtggagccaggctacccgcgcaacatcctgcgtgactggatgggctgcaaccagaaggaggtggagcggcggaaggagcggcggctgccccaggacgacgtggacatcatggtgaccatcaacgatgtgccgggctccgtgaacgccgtggccgtggtcatcccctgcatcctgtccctctgcatcctggtgctggtctacaccatcttccagttcaagaacaagacaggccctcagcctgtcacctactataagcggccagtccaggaatgggtgtgagcagcccagagccctctctatccacttggtctggccagccaggcccttcctcaccagggtctgaggggcagctctggccagtgctcaccagggccagcagggccctaggctggggtcgtacagctgaagtggtgggtgcattggcctaggctgagcgtggggcagggaattatgggggctgtgccccagggtgggtgtctggcacccagctgccagccttctgtcctgggcaaactactccctacttaagggaataggccaggctccatccggaggcagggaccatgccaggaggagcccctgtggtcacggcatcctgtggtgtccatgaggtaccacagctccactcctggctggaacccagcaccctctgtgggaagccagcactagctctcatcccccatccgggagataccaccagtcctggtccccttttgccaacacctgctggtcagatgtccccctacccccaccccactgtcctccaaggctacaggacccctgcttctgacacagtgagcaacaagcctgggtttccctgctggcagacggcagatccctcaggaaacctgctccacttgtcagggtctcttcggagacccaggatttagggtcacatgctgcaggcagggctgtggcccagctgggtctgacaaggacccagctgtcacatcgtgaatatttaaatgtcctgtcactactgtcccattttgcaaaggctgcttgaggctttaggtgaactagaggtgactgtcttggtgatgaggccagcatagcggccctcccccaggcgacaaggaccaaggtgctgctaaggccactctagcgcccagacaccccagtagctgagctctgctcctatggctacagagctggggcagaagctgaccccatttctggaggaagatccgagtttgtgaccgtcctccactcccctctattgtcactgtccccagctttgctccagtctgtcacttgcagcctggagctcagcctcaccagttaggtgaggcagagatggctgcagggccaacactggcagagcctgggagtccttcggaaggggaccagggcgtctgaagtgctcagtgcccccactactctgaggccgactccagctactctgaggccgactcaatctctcggctggaagcagtgttttcccagagcttggcccttgctgacctcgctcactgggcccatcttcccacactgctcttagaaggacacccctaccggtagcagccccaagctgagggggctccctttttgaccttcactggcccgcccttcactgtctccagcaggagttcctagggcttggcctgccttgctccacagtacggcggaggcagccctgcttgtcactgaggagccctagacaaggccaatgggttcatcaatgcccactggctctctgccaaagccaaaaaggtgtcaggcagtctccagcgtgctggccgggtctcggatgccacccctgctcactgagcctgcatgggccttgcccccgaccctgtggtctctgggattggggtcggcttaccctgtagcacagacagggactcctgctgccctgggagctgtctcaagcaaaatctcttgtcccagaggtgcccatgtgggtccgctgtgtcccctgtcatcatccttgttttttctcattttggccaagggcaggctccctgggacaggcagggaacaactgcggagatattagtgattcataggtttgtacagtgttttatactttgcaaagcactttattagctcacacctgtccactcacatgaaactcgtgttaggccctgggaggccgacggtaactctcaccgtgccctcagatgaagcacagagaggttgttacttgcccgggccatccagtgggctggctgggtcttgtgtccccatctgtggacccctctagggtctgagatgagatgagaagtgtctcctgtatccacctcttcctggcctcccttcccccacttcctggtccctgtccactcctcaggttggtgctctcacttcttgaaagctctaggcacccccgcctcccgccaggctccccattggctcctggcaggccagctgagaatgaacaggagatggaggcaggcagcccaggctgcagaggtgagggatgtggggccaggcccagagggctcagcctagaggcttccaatctcagattctcctgcctgtggtcatctgtttgtccatcaccccaggacagggcagacagaggggcaaagcactgggggccccagagcctagcttcccctcagcctgggggacatcacagcatttcagtgtcagtcacattttaaactgatcagcctttgtataatgttttttaaatcatttctaaataaaacagaaatacaga

SEQ ID NO: 5356 - DNA, 3115 bp, Homo sapiens
atggtttacagcaggtcactaatgttggaaaaagtacagagtccagggaaagacttgcttgtaactttatgaattctggatttttttttttcctttgctttttcttaactttcactaagggttactgtagtctgatgtgtccttcccaaggccacgaaatttgacaagctgcacttttcttttgctcaatgatttctgctttaagccaaagaactgcctataatttcactaagaatgtcttctaattcagatactggggatttacaagagtctttaaagcacggacttacacctattgtgtctcaatttaaaatggtgaattactcctatgatgaagatctggaagagctttgtcccgtgtgtggagataaagtgtctgggtaccattatgggctcctcacctgtgaaagctgcaagggattttttaagcgaacagtccaaaataataaaaggtacacatgtatagaaaaccagaactgccaaattgacaaaacacagagaaagcgttgtccttactgtcgttttcaaaaatgtctaagtgttggaatgaagctagaagctgtaagggccgaccgaatgcgtggaggaaggaataagtttgggccaatgtacaagagagacagggccctgaagcaacagaaaaaagccctcatccgagccaatggacttaagctagaagccatgtctcaggtgatccaagctatgccctctgacctgaccatttcctctgcaattcaaaacatccactctgcctccaaaggcctacctctgaaccatgctgccttgcctcctacagactatgacagaagtccctttgtaacatcccccattagcatgacaatgccccctcacggcagcctgcaaggttaccaaacatatggccactttcctagccgggccatcaagtctgagtacccagacccctataccagctcacccgagtccataatgggctattcatatatggatagttaccagacgagctctccagcaagcatcccacatctgatactggaacttttgaagtgtgagccagatgagcctcaagtccaggctaaaatcatggcctatttgcagcaagagcaggctaaccgaagcaagcacgaaaagctgagcacctttgggcttatgtgcaaaatggcagatcaaactctcttctccattgtcgagtgggccaggagtagtatcttcttcagagaacttaaggttgatgaccaaatgaagctgcttcagaactgctggagtgagctcttaatcctcgaccacatttaccgacaagtggtacatggaaaggaaggatccatcttcctggttactgggcaacaagtggactattccataatagcatcacaagccggagccaccctcaacaacctcatgagtcatgcacaggagttagtggcaaaacttcgttctctccagtttgatcaacgagagttcgtatgtctgaaattcttggtgctctttagtttagatgtcaaaaaccttgaaaacttccagctggtagaaggtgtccaggaacaagtcaatgccgccctgctggactacacaatgtgtaactacccgcagcagacagagaaatttggacagctacttcttcgactacccgaaatccgggccatcagtatgcaggctgaagaatacctctactacaagcacctgaacggggatgtgccctataataaccttctcattgaaatgttgcatgccaaaagagcataagttacaacccctaggagctctgctttcaaaacaaaaagagattgggggagtggggagggggaagaagaacaggaagaaaaaaagtactctgaactgctccaagtaacgctaattaaaaacttgctttaaagatattgaatttaaaaaggcataataatcaaatacttaatagcaaataaatgatgtatcagggtatttgtattgcaaactgtgaatcaaaggcttcacagccccagaggattccatataaaagacattgtaatggagtggattgaactcacagatggataccaacacggtcagaagaaaaacggacagaacggttcttgtatatttaaactgatctccactatgaagaaatttaggaactaatcttattaattaggcttatacagcgggggatttgagcttacaggattcctccatggtaaagctgaactgaaacaattctcaagaatgcatcagctgtacctacaatagcccctccctcttcctttgaaggccccagcacctctgccctgtggtcaccgaatctgtactaaggacctgtgttcagccacacccagtggtagctccaccaaatcatgaacagcctaattttgagtgtctgtgtcttagacctgcaaacagctaataggaaattctattaatatgttagcttgccattttaaatatgttctgagggttgttttgtctcgtgttcatgatgttaagaaaatgcaggcagtatccctcatcttatgtaagtgttaattaatattaagggaaatgactacaaactttcaaagcaaatgctccatagctaaagcaacttagaccttatttctgctactgttgctgaaatgtggctttggcattgttggatttcataaaaaatttctggcaggaagtcttgttagtatacatcagtctttttcatcatccaagtttgtagttcatttaaaaatacaacattaaacacattttgctaggatgtcaaatagtcacagttctaagtagttggaaacaaaattgacgcatgttaatctatgcaaagagaaaggaaaggatgaggtgatgtattgactcaaggttcattcttgctgcaattgaacatcctcaagagttgggatggaaatggtgatttttacatgtgtcctggaaagatattaaagtaattcaaatcttccccaaaggggaaaggaagagagtgatactgacctttttaagtcatagaccaaagtctgctgtagaacaaatatgggaggacaaagaatcgcaaattcttcaaatgactattatcagtattattaacatgcgatgccacaggtatgaaagtcttgccttatttcacaattttaaaaggtagctgtgcagatgtggatcaacatttgtttaaaataaagtattaata

SEQ ID NO: 5357 - DNA, 796 bp, Homo sapiens
gaacttcgttatccgcgatgcgtttcctggcagctacattcctgctcctggcgctcagcaccgctgcccaggccgaaccggtgcagttcaaggactgcggttctgtggatggagttataaaggaagtgaatgtgagcccatgccccacccaaccctgccagctgagcaaaggacagtcttacagcgtcaatgtcaccttcaccagcaatattcagtctaaaagcagcaaggccgtggtgcatggcatcctgatgggcgtcccagttccctttcccattcctgagcctgatggttgtaagagtggaattaactgccctatccaaaaagacaagacctatagctacctgaataaactaccagtgaaaagcgaatatccctctataaaactggtggtggagtggcaacttcaggatgacaaaaaccaaagtctcttctgctgggaaatcccagtttctcatctctaagtgcctcattgagttcggtgcatctggccaatgagtctgctgagactcttgacagcacctccagctctgctgcttcaacaacagtgacttgctctccaatggtatccagtgattcgttgaagaggaggtgctctgtagcagaaactgagctccgggtggctggttctcagtggttgtctcatgtctctttttctgtcttaggtggtttcattaaatgcagcacttggttagcagatgtttaattttttttttaacaacattaacttgtggcctctttctacacctggaaatttactcttgaataaataaaaactcgtttgtcttgtcttctg

SEQ ID NO: 5358 - DNA, 5132 bp, Homo sapiens
agataaaaagccagctccagcaggcgctgctcactcctccccatcctctccctctgtccctctgtccctctgaccctgcactgtcccagcaccatgggacccacctcaggtcccagcctgctgctcctgctactaacccacctccccctggctctggggagtcccatgtactctatcatcacccccaacatcttgcggctggagagcgaggagaccatggtgctggaggcccacgacgcgcaaggggatgttccagtcactgttactgtccacgacttcccaggcaaaaaactagtgctgtccagtgagaagactgtgctgacccctgccaccaaccacatgggcaacgtcaccttcacgatcccagccaacagggagttcaagtcagaaaaggggcgcaacaagttcgtgaccgtgcaggccaccttcgggacccaagtggtggagaaggtggtgctggtcagcctgcagagcgggtacctcttcatccagacagacaagaccatctacacccctggctccacagttctctatcggatcttcaccgtcaaccacaagctgctacccgtgggccggacggtcatggtcaacattgagaacccggaaggcatcccggtcaagcaggactccttgtcttctcagaaccagcttggcgtcttgcccttgtcttgggacattccggaactcgtcaacatgggccagtggaagatccgagcctactatgaaaactcaccacagcaggtcttctccactgagtttgaggtgaaggagtacgtgctgcccagtttcgaggtcatagtggagcctacagagaaattctactacatctataacgagaagggcctggaggtcaccatcaccgccaggttcctctacgggaagaaagtggagggaactgcctttgtcatcttcgggatccaggatggcgaacagaggatttccctgcctgaatccctcaagcgcattccgattgaggatggctcgggggaggttgtgctgagccggaaggtactgctggacggggtgcagaacccccgagcagaagacctggtggggaagtctttgtacgtgtctgccaccgtcatcttgcactcaggcagtgacatggtgcaggcagagcgcagcgggatccccatcgtgacctctccctaccagatccacttcaccaagacacccaagtacttcaaaccaggaatgccctttgacctcatggtgttcgtgacgaaccctgatggctctccagcctaccgagtccccgtggcagtccagggcgaggacactgtgcagtctctaacccagggagatggcgtggccaaactcagcatcaacacacaccccagccagaagcccttgagcatcacggtgcgcacgaagaagcaggagctctcggaggcagagcaggctaccaggaccatgcaggctctgccctacagcaccgtgggcaactccaacaattacctgcatctctcagtgctacgtacagagctcagacccggggagaccctcaacgtcaacttcctcctgcgaatggaccgcgcccacgaggccaagatccgctactacacctacctgatcatgaacaagggcaggctgttgaaggcgggacgccaggtgcgagagcccggccaggacctggtggtgctgcccctgtccatcaccaccgacttcatcccttccttccgcctggtggcgtactacacgctgatcggtgccagcggccagagggaggtggtggccgactccgtgtgggtggacgtcaaggactcctgcgtgggctcgctggtggtaaaaagcggccagtcagaagaccggcagcctgtacctgggcagcagatgaccctgaagatagagggtgaccacggggcccgggtggtactggtggccgtggacaagggcgtgttcgtgctgaataagaagaacaaactgacgcagagtaagatctgggacgtggtggagaaggcagacatcggctgcaccccgggcagtgggaaggattacgccggtgtcttctccgacgcagggctgaccttcacgagcagcagtggccagcagaccgcccagagggcagaacttcagtgcccgcagccagccgcccgccgacgccgttccgtgcagctcacggagaagcgaatggacaaagtcggcaagtaccccaaggagctgcgcaagtgctgcgaggacggcatgcgggagaaccccatgaggttctcgtgccagcgccggacccgtttcatctccctgggcgaggcgtgcaagaaggtcttcctggactgctgcaactacatcacagagctgcggcggcagcacgcgcgggccagccacctgggcctggccaggagtaacctggatgaggacatcattgcagaagagaacatcgtttcccgaagtgagttcccagagagctggctgtggaacgttgaggacttgaaagagccaccgaaaaatggaatctctacgaagctcatgaatatatttttgaaagactccatcaccacgtgggagattctggctgtgagcatgtcggacaagaaagggatctgtgtggcagaccccttcgaggtcacagtaatgcaggacttcttcatcgacctgcggctaccctactctgttgttcgaaacgagcaggtggaaatccgagccgttctctacaattaccggcagaaccaagagctcaaggtgagggtggaactactccacaatccagccttctgcagcctggccaccaccaagaggcgtcaccagcagaccgtaaccatcccccccaagtcctcgttgtccgttccatatgtcatcgtgccgctaaagaccggcctgcaggaagtggaagtcaaggctgctgtctaccatcatttcatcagtgacggtgtcaggaagtccctgaaggtcgtgccggaaggaatcagaatgaacaaaactgtggctgttcgcaccctggatccagaacgcctgggccgtgaaggagtgcagaaagaggacatcccacctgcagacctcagtgaccaagtcccggacaccgagtctgagaccagaattctcctgcaagggaccccagtggcccagatgacagaggatgccgtcgacgcggaacggctgaagcacctcattgtgaccccctcgggctgcggggaacagaacatgatcggcatgacgcccacggtcatcgctgtgcattacctggatgaaacggagcagtgggagaagttcggcctagagaagcggcagggggccttggagctcatcaagaaggggtacacccagcagctggccttcagacaacccagctctgcctttgcggccttcgtgaaacgggcacccagcacctggctgaccgcctacgtggtcaaggtcttctctctggctgtcaacctcatcgccatcgactcccaagtcctctgcggggctgttaaatggctgatcctggagaagcagaagcccgacggggtcttccaggaggatgcgcccgtgatacaccaagaaatgattggtggattacggaacaacaacgagaaagacatggccctcacggcctttgttctcatctcgctgcaggaggctaaagatatttgcgaggagcaggtcaacagcctgccaggcagcatcactaaagcaggagacttccttgaagccaactacatgaacctacagagatcctacactgtggccattgctggctatgctctggcccagatgggcaggctgaaggggcctcttcttaacaaatttctgaccacagccaaagataagaaccgctgggaggaccctggtaagcagctctacaacgtggaggccacatcctatgccctcttggccctactgcagctaaaagactttgactttgtgcctcccgtcgtgcgttggctcaatgaacagagatactacggtggtggctatggctctacccaggccaccttcatggtgttccaagccttggctcaataccaaaaggacgcccctgaccaccaggaactgaaccttgatgtgtccctccaactgcccagccgcagctccaagatcacccaccgtatccactgggaatctgccagcctcctgcgatcagaagagaccaaggaaaatgagggtttcacagtcacagctgaaggaaaaggccaaggcaccttgtcggtggtgacaatgtaccatgctaaggccaaagatcaactcacctgtaataaattcgacctcaaggtcaccataaaaccagcaccggaaacagaaaagaggcctcaggatgccaagaacactatgatccttgagatctgtaccaggtaccggggagaccaggatgccactatgtctatattggacatatccatgatgactggctttgctccagacacagatgacctgaagcagctggccaatggtgttgacagatacatctccaagtatgagctggacaaagccttctccgataggaacaccctcatcatctacctggacaaggtctcacactctgaggatgactgtctagctttcaaagttcaccaatactttaatgtagagcttatccagcctggagcagtcaaggtctacgcctattacaacctggaggaaagctgtacccggttctaccatccggaaaaggaggatggaaagctgaacaagctctgccgtgatgaactgtgccgctgtgctgaggagaattgcttcatacaaaagtcggatgacaaggtcaccctggaagaacggctggacaaggcctgtgagccaggagtggactatgtgtacaagacccgactggtcaaggttcagctgtccaatgactttgacgagtacatcatggccattgagcagaccatcaagtcaggctcggatgaggtgcaggttggacagcagcgcacgttcatcagccccatcaagtgcagagaagccctgaagctggaggagaagaaacactacctcatgtggggtctctcctccgatttctggggagagaagcccaacctcagctacatcatcgggaaggacacttgggtggagcactggcccgaggaggacgaatgccaagacgaagagaaccagaaacaatgccaggacctcggcgccttcaccgagagcatggttgtctttgggtgccccaactgaccacacccccattcccccactccagataaagcttcagttatatctca

SEQ ID NO: 5359 - DNA, 6046 bp, Homo sapiens; identical to SEQ ID NO: 1381

SEQ ID NO: 5360 - DNA, 6215 bp, Homo sapiens
ggggaaaagagctaggaaagagctgcaaagcagtgtgggctttttcccttttttgctccttttcattacccctcctccgttttcacccttctccggacttcgcgtagaacctgcgaatttcgaagaggaggtggcaaagtgggagaaaagaggtgttagggtttggggtttttttgtttttgtttttgttttttaatttcttgatttcaacattttctcccaccctctcggctgcagccaacgcctcttacctgttctgcggcgccgcgcaccgctggcagctgagggttagaaagcggggtgtattttagattttaagcaaaaattttaaagataaatccatttttctctcccacccccaacgccatctccactgcatccgatctcattatttcggtggttgcttgggggtgaacaattttgtggctttttttcccctataattctgacccgctcaggcttgagggtttctccggcctccgctcactgcgtgcacctggcgctgccctgcttcccccaacctgttgcaaggctttaattcttgcaactgggacctgctcgcaggcaccccagccctccacctctctctacatttttgcaagtgtctgggggagggcacctgctctacctgccagaaattttaaaacaaaaacaaaaacaaaaaaatctccgggggccctcttggcccctttatccctgcactctcgctctcctgccccaccccgaggtaaagggggcgactaagagaagatggtgttgctcaccgcggtcctcctgctgctggccgcctatgcggggccggcccagagcctgggctccttcgtgcactgcgagccctgcgacgagaaagccctctccatgtgcccccccagccccctgggctgcgagctggtcaaggagccgggctgcggctgctgcatgacctgcgccctggccgaggggcagtcgtgcggcgtctacaccgagcgctgcgcccaggggctgcgctgcctcccccggcaggacgaggagaagccgctgcacgccctgctgcacggccgcggggtttgcctcaacgaaaagagctaccgcgagcaagtcaagatcgagagagactcccgtgagcacgaggagcccaccacctctgagatggccgaggagacctactcccccaagatcttccggcccaaacacacccgcatctccgagctgaaggctgaagcagtgaagaaggaccgcagaaagaagctgacccagtccaagtttgtcgggggagccgagaacactgcccacccccggatcatctctgcacctgagatgagacaggagtctgagcagggcccctgccgcagacacatggaggcttccctgcaggagctcaaagccagcccacgcatggtgccccgtgctgtgtacctgcccaattgtgaccgcaaaggattctacaagagaaagcagtgcaaaccttcccgtggccgcaaacgtggcatctgctggtgcgtggacaagtacgggatgaagctgccaggcatggagtacgttgacggggactttcagtgccacaccttcgacagcagcaacgttgagtgatgcgtccccccccaacctttccctcaccccctcccacccccagccccgactccagccagcgcctccctccaccccaggacgccactcatttcatctcatttaagggaaaaatatatatctatctatttgaggaaactgaggacctcggaatctctagcaagggctcaacttcgaaaatggcaacaacagagatgcaaaaagctaaaaagacaccccccccctttaaatggttttctttttgaggcaagttggatgaacagagaagggaagagaggaagaacgagaggaagagaagggaaggaagtgtttgtgtagaagagagagaaagacgaatagagttaggaaaaggaagacaagcaggtgggcaggaaggacatgcaccgagaccaggcaggggcccaactttcacgtccagccctggcctggggtcgggagaggtgggcgctagaagatgcagcccaggatgtggcaatcaatgacactattggggtttcccaggatggattggtcagggggagaaaggaaaaggcaaaacactccaggacctctcccggatctgtctcctcctctagccagcagtatggacagctggacccctgaacttcctctcctcttacctgggcagagtgttgtctctccccaaatttataaaaactaaaatgcattccattcctctgaaagcaaaacaaattcataattgagtgatattaaatagagaggttttcggaagcagatctgtgaatatgaaatacatgtgcatatttcattccccaggcagacattttttagaaatcaatacatgccccaatattggaaagacttgttcttccacggtgactacagtacatgctgaagcgtgccgtttcagccctcatttaattcaatttgtaagtagcgcagcagcctctgtgggggaggataggctgaaaaaaaaaagtgggctcgtatttatctacaggactccatatagtcatatataggcatataaatctattctttttctttgtttttttctttcttcctttctttcaaaggtttgcattaacttttcaaagtagttcctataggggcattgaggagcttcctcattctgggaaaactgagaaaacccatattctcctaatacaacccgtaatagcatttttgcctgcctcgaggcagagtttcccgtgagcaataaactcagcttttttgtggggcacagtactggatttgacagtgattccccacgtgtgttcatctgcacccaccgagccaggcagaggccagccctccgtggtgcacacagcacgcgcctcagtccatcccattttagtctttaaaccctcaggaagtcacagtctccggacaccacaccacatgagcccaacaggtccacgatggatccaccagtcccaccccagccttttcctttcatctgaacagaatgtgcatttttggaagcctccctcactctccatgctggcagagcaggagggagactgaagtaagagatggcagagggagatggtggcaaaaaggtttagatgcaggagaacagtaagatggatggttccggccagagtcgatgtggggaggaacagagggctgaagggagagggggctgactgttccattctagctttggcacaaagcagcagaaagggggaaaagccaatagaaatttccttagcttccccaccatatgtattttctaggatttgagaggaaagagaggaaaatgggggaatgggttgcaaaatagaaatgagcttaatccaggccgcagagccagggaaggtgagtaactttaggagggtgctagactttagaagccagataggaagaatcagtctaaactggccatgctttggaagggacaagactatgtgctccgctgcccaccttcagcctgcaatgagggactgaggcccacgagtctttccagctcttcctccattctggccagtccctgcatcctccctggggtggaggatggaaggaaagctgggacaagcagggaacgcatgattcagggatgctgtcactcggcagccagattccgaaactcccattctccaatgacttcctcaaccaatgggtggccttgtgactgttctttaaggctgaagatatccaggaaagggggcttggacactggccaaggagaccccttcgtgctgtggacacagctctcttcactctttgctcatggcatgacacagcggagaccgcctccaacaacgaatttggggctacgaagaggaatagcgaaaaagcaaatctgtttcaactgatgggaaccctatagctatagaacttgggggctatctcctatgcccctggacaggacagttggctggggacaggagaagtgctcaatcttcatgagacaaaggggcccgatagggccagcagccacaaggccttgacctgccgagtcagcatgccccatctctctgcacagctgtcccctaaacccaactcacgtttctgtatgtcttaggccagtatcccaaacctcttccacgtcactgttctttccacccattctccctttgcatcttgagcagttatccaactaggatctgccaagtggatactggggtgccactcccctgagaaaagactgagccaggaactacaagctccccccacattcctcccagcctggacctaattcttgagaggggctctctcttcacggactgtgtctggactttgagcaggcttctgccccttgcgttggctctttgctgccagccatcaggtgggggattagagcctggtgtaagtgcgccagactcttccggtttccaaagttcgtgcctgcgaacccaaacctgtgagtctcttctgcatgcaggagtttctcctgggcagctggtcactccccagagaagctgggccttcatggacacatggaactaagcctcccaaatgggagttctggctgagcccagggtggggagatcctgggaagggaggcactggaggaagacggcacctcttcccccatggcagggtgtgagggaggcaggtttggaatggtgcgagtatggcaatctaagcaggggtctggtctctttgactccaggctggcctttggccgactgtctgctcacccagagaccttggactccggactatccatggctccgaatctaagtgctgcccactcccatgctcacacccacagaaggtcttcccatcccctttagattcgtgcctcactccaccagtgaggaagatgcctctgtctttcccacgactgccaggagatagggaagcccagccaggactgaccctccttcctccagcctgccctgacccacctggcaaagcagggcacatggggaggaagagactggaacctttctttgacagccaggcctagacagacaggcctggggacactggccccatgaggggaggaaggcaggcgcacgaggtccagggaggcccttttctgatcatgccccttctctcccaccccatctccccaccaccacctctgtggcctccatggtacccccacagggctggcctcccctagagggtgggcctcaaccacctgctcccgccacgcaccggttagtgagacagggctgccacggcaaccgccaagcccccctcaaggtgggacagtaccccggacccatccactcactcctgagagggctccggcccagaatgggaacctcagagaagagctctaaggagaagaaaccccatagcgtcagagaggatatgtctggcttccaagagaaaggaggctccgttttgcaaagtggaggagggacgagggacaggggtttcaccagccagcaacctgggccttgtactgtctgtgtttttaaaaccactaaagtgcaagaattacattgcactgtttctccactttttattttctcttaggcttttgtttctatttcaaacatactttcttggttttctaatggagtatatagtttagtcatttcacagactctggcctcctctcctgaaatccttttggatggggaaagggaaggtggggagggtccgaggggaaggggaccccagcttccctgtgcccgctcaccccactccaccagtccccggtcgccagccggagtctcctctctaccgccactgtcacaccgtagcccacatggatagcacagttgtcagacaagattccttcagattccgagttgcctaccggttgttttcgttgttgttgttgttgtttttctttttctttttttttttgaagacagcaataaccacagtacatattactgtagttctctatagttttacatacattcataccataactctgttctctcctcttttttgttttcaactttaaaaacaaaaataaacgatgataatctttactggtgaaaaggatggaaaaataaatcaacaaatgcaaccagtttgtgagaaaaaaaaaaaaaagccgaaaaaaaaaaaaaaaacacctgaatgcggaagagctcggctcccgtttagcattttgtacttaaggaaataaaaaaccaacaaaggatctcacattttcttaaaaagtgaagattgctgtatactatttattcaacttataatttatgttactccttgatctttgtcttttgtcatgacaaagcatttatttaataaagttatgcattcagtta

SEQ ID NO: 5361 - DNA, 4284 bp, Homo sapiens
tttttaatattgtattttactgtggattatctctttggaccgcgccggacttggcctcaggaaatcaaccaatgctgcggaaggcggctggtgcacaacgctctgctctacagaagggggtcccccaccctcttttccaattttttttttttggccttcctctccttccctccctcttcctccctctctctctctctctctccactacccccctctttcttccccactcggctcctctcccccctcgcgcccacagcgtttggtgttgattcgagcgggaagaggggggtgggtgggatcggtgggggagaccatgacctccagctacgggcacgttctggagcggcaaccggcgctgggcggccgcttggacagcccgggcaacctcgacaccctgcaggcgaaaaagaacttctccgtcagtcacctgctagacctggaggaagccggggacatggtggcggcacaggcggatgagaacgtgggcgaggctggccggagcctgctggagtcgccgggactcaccagcggcagcgacaccccgcagcaggacaatgaccagctgaactcagaagaaaaaaagaagagaaagcagcgaaggaataggacaaccttcaatagcagccagctgcaggctttggagcgtgtctttgagcggacacactatcctgatgcttttgtgcgagaagaccttgcccgccgggtgaacctcaccgaggcgagagtgcaggtgtggtttcagaaccgaagagccaagttccgcaggaatgagagagccatgctagccaataaaaacgcttccctcctcaaatcctactcaggagacgtgactgctgtggagcagcccatcgtacctcgtcctgctccgagacccaccgattatctctcctgggggacagcgtctccgtacagcgccatggctacttattctgccacatgtgccaacaatagccctgcacagggcatcaacatggccaacagcattgccaacctgagactgaaggccaaggaatatagtttacagaggaaccaggtgccaacagtcaactgaggaaaaaaaataattaaacaggcctaagaagaaatcaaaaaccataagacacctatcctgctctgttatttcttcatctgctggggggaaaaagtaaattacaaacaaacaaacaaagcagaactaaaatattgggaccatggcagagaaaagcaggagaggagcaaaatgaaaattagttaacaaatgttcctcctccctctgggataccaccaccacttgtttctgtgtgtgtttattttgtttttctttcattcatgctttgcttaatgtactccaggcttcttcagataggttcagcccacccacccccatgattgtatgaagttttaaaaaaaactacagcagccaaagaaactatatatatatatatatatatatatatccagaatgattgcctctactgtcctcattgacttgtttgaaccttagtgccttaccctgtcctcttcccagttctctttatagaagctctaggagctttcgaaaagccaaagtctttctgaagaatctgtgctggacagacataattccctttctcattgtctccatctttgttggtcatggtaaggtttttccatcagcctctgaaaaaatagttgtgcacaacatctgctcactggactgtctgatccaatgtaattggctgcgtctggctaattctaagcactaaagtctacatctaagctatagatttaagcttgaagctacagattatatcactatcaccaccacccctcaccctatgcaatcaatcaatcaatcatcttaagttaaagatatttgttgtctttgaatgatttgctgtcacagactatttggtagaagaaatatttttcacctgagagaggaagagaaatttctctagtaacacaaagagtgagttctaaaaggcatgcccacatctctttcgtgccttaaggatagtgagatgcacacttatatatatactgtatatatttatatatttatatatatatttcatatatatatataatattgcaagcttaagtttgcaatttcccaaacaatacaaaaagcaaattacacaccctcaccactgttcttatctctatagtgatgaaacattaattagggatcttgctgcttttctttttctacacgaagttttcattaaagccacagaataattgatagggcagctgtttgagaacaggtcccattttcacattagggctttaaatgaattagaaactatttgaggctataaaaatgtccttgagtttggagcctgagctctggtgaaatgctgatacatctgatctatcatgggaattgcagttagagagagtaaggaataccatttagtcatctatccgttcttcacttagcaggaatatgaaagaaaggcacatgtttaagaggaatacctaaaggtttttctaaattccaacatttaaaaggcaattgtgggctatttttattttttaatattttgaaataaagtttagtgtctagggctgggagccaggactgatcttccatttctttttctttgttcccagccatgcttttgtaacttgccaggtggacttgaccaactacattaccatgctgtgcctcagtttacccatttgtaaaatgggattaataatacttacctacctcacaggggtgttgtgaggctctattcatttgctcctttattctttcctgtattctctgtatgtccagcactttgtagccatgggaggaaagggactataaaagtgtacaatgttaatggaatgatacggtacctgaaagccttgttttctagtaagaaaatgctaccttgctgtacatacttataaccttgtatttggaaatgagaaataggtttatattttcagatctctcaaaaatcacatcatttgaccaaagaataatttaagacacatagaacagatttttttaatttatattttcatcctgaccagcttagttctaataatttttagttgtgagtgattaaaaaactttggatcaattttggtcaaacatgccaactttgtagtctgagtgacaggcaaggatttttgggtttaagatgcacttttagcacacatttgtatttcccttggcatatcagattgagctaatggtgatgttatttcaatctaacagccaccaatctgaaattgtatttcaaatgttgattctgtagttctttaaataataatgaagctcatcttatacattttgctttcaccaattgattccttcttcttttagcccactattaaaacatttcttactgaatggttcatgtaggcttgctgaacagcacgcattacttgcttcctgaagagttcccccattcatccatttgtcccattagttgctgtggattatcaagttttgaaggaactgtacatcccaacagactgaaacattctaagtgaaatgagtataatccaagtaactggtgaactttggaggtttggagcttgaagagaatggctaagaagatttgaattatagggagggaacagaaatcatacatgaaaaggttttactgagaaggggaaaaccttagatagagggacatgtgaaacaaaatcatttgaaattttgattcagacatccatttccagtggcaaacagcaaagcctgaacccataaacccaaatgataggtgaagttgggtggttttatccaatgtctcaagcaagcaatgtctgggaatatcatagagtaacaagtgctggtcagccaaagaaacattcactgctggtgaaccaataccataagcatgtattatctaagcacttgatcaagaaatatacatgttgtacaagctctcaattttgttcatttattatcaaatttttaaaatacaagtttggtatgtgatttggaaaagatgccttctggatcttaagccagttgtcagtggaggtcctcagggctgcaaatgtcaagacataaccctgttcctcaccatcatgataccagatacaggtgaatacataggaactatctgcctgtgtcctcaatctcccttcaaacaagatgctgatttgtagggtacttggcaggttaaattaaaccagaagaggtgacttaataaaaaagggaatgacatttagggtataaagatctcataagaaatgtaatatgtaaattatatcttgctttatgttgtaaaatatacattgtttgcgctagaatagaaatgatttcttttcaataaaaagaaagaaggactctaccatgtcttttgttatata

SEQ ID NO: 5362 - DNA, 957 bp, Homo sapiens
agacaaggttcatatttgtatgggttacttattctctctttgttgactaagtcaataatcagaatcagcaggtttgcagtcagattggcagggataagcagcctagctcaggagaagtgagtataaaagccccaggctgggagcagccatcacagaagtccactcattcttggcaggatggcttctcatcgtctgctcctcctctgccttgctggactggtatttgtgtctgaggctggccctacgggcaccggtgaatccaagtgtcctctgatggtcaaagttctagatgctgtccgaggcagtcctgccatcaatgtggccgtgcatgtgttcagaaaggctgctgatgacacctgggagccatttgcctctgggaaaaccagtgagtctggagagctgcatgggctcacaactgaggaggaatttgtagaagggatatacaaagtggaaatagacaccaaatcttactggaaggcacttggcatctccccattccatgagcatgcagaggtggtattcacagccaacgactccggcccccgccgctacaccattgccgccctgctgagcccctactcctattccaccacggctgtcgtcaccaatcccaaggaatgagggacttctcctccagtggacctgaaggacgagggatgggatttcatgtaaccaagagtattccatttttactaaagcagtgttttcacctcatatgctatgttagaagtccaggcagagacaataaaacattcctgtgaaaggcacttttcattccactttaacttgattttttaaattcccttattgtcccttccaaaaaaaagagaatcaaaattttacaaagaatcaaaggaattctagaaagtatctgggcagaacgctaggagagatccaaatttccattgtcttgcaagcaaagcacgtattaaatatgatctgcagccattaaaaaga

SEQ ID NO: 5363 - DNA, 1998 bp, Homo sapiens
gccagccccgccagccccgccagccccgcgatggcttgggccgcgctcctcggcctcctggccgcactgttgctgctgctgctactgagccgccgccgcacgcggcgacctggtgagcctcccctggacctgggcagcatcccctggttggggtatgccttggactttggaaaagatgctgccagcttcctcacgaggatgaaggagaagcacggtgacatctttactatactggttgggggcaggtatgtcaccgttctcctggacccacactcctacgacgcggtggtgtgggagcctcgcaccaggctcgacttccatgcctatgccatcttcctcatggagaggatttttgatgtgcagcttccacattacagccccagtgatgaaaaggccaggatgaaactgactcttctccacagagagctccaggcactcacagaagccatgtataccaacctccatgcagtgctgttgggcgatgctacagaagcaggcagtggctggcacgagatgggtctcctcgacttctcctacagcttcctgctcagagccggctacctgactctttacggaattgaggcgctgccacgcacccatgaaagccaggcccaggaccgcgtccactcagctgatgtcttccacacctttcgccagctcgaccggctgctccccaaactggcccgtggctccctgtcagtgggggacaaggaccacatgtgcagtgtcaaaagtcgcctgtggaagctgctatccccagccaggctggccaggcgggcccaccggagcaaatggctggagagttacctgctgcacctggaggagatgggtgtgtcagaggagatgcaggcacgggccctggtgctgcagctgtgggccacacaggggaatatgggtcccgctgccttctggctcctgctcttccttctcaagaatcctgaagccctggctgctgtccgcggagagctcgagagtatcctttggcaagcggagcagcctgtctcgcagacgaccactctcccacagaaggttctagacagcacacctgtgcttgatagcgtgctgagtgagagcctcaggcttacagctgcccccttcatcacccgcgaggttgtggtggacctggccatgcccatggcagacgggcgagaattcaacctgcgacgtggtgaccgcctcctcctcttccccttcctgagcccccagagagacccagaaatctacacagacccagaggtatttaaatacaaccgattcctgaaccctgacggatcagagaagaaagacttttacaaggatgggaaacggctgaagaattacaacatgccctggggggcggggcacaatcactgcctggggaggagttatgcggtcaacagcatcaaacaatttgtgttccttgtgctggtgcacttggacttggagctgatcaacgcagatgtggagatccctgagtttgacctcagcaggtacggcttcggtctgatgcagccggaacacgacgtgcccgtccgctaccgcatccgcccatgacacagggagcagatggatccacgtgctcgcctctgcccagcctgccccagcctgccccagcctcccagctttctgtgtgcacagttggcccgggtgcaggtgctagcattaccacttccctgcttttctcccagaaggctgggtccaggggagggaaaagctaagagggtgaacaaagaaaagacattgaaagctctatggattatccactgcaaagttttctttccaaaatcaggctttgtctgctcccaattcacctcgttactctcacctcgtgatatccacaaatgctattcagataaggcagaactaggagtcttcactgctctgcccccaactcccggaggtgtcaccttcctagttcttatgagctagcatggcccgggccttatccagtcaaagcggatgctggccacagaaaggccactcaggatgtcctttgtgtccattgatgtcattcagcag

SEQ ID NO: 5364 - DNA, 6348 bp, Homo sapiens
cgttattggctgcgggaagaacctcgccgggacctaacccgaagctccgccccctcgcggttaccctggatacccgtcaggctcgggctgcagagaaggaggatcagggcaagtggcttcagagatgcagccctcactgcttaacgtcctagttattgtccttgaaacccgagccatctcaccgctcgcccccaaccctgggctctggctgtttaaaagctggagaggaagtgaaagcgtcaagtacagttgatagaagtccagatcctgaggaaatctccagctaaatgctcaaaatataaaatactgagctgagatttgcgaagagcagcagcatggatggattttatgaccagcaagtgccttacatggtcaccaatagtcagcgtgggagaaattgtaacgagaaaccaacaaatgtcaggaaaagaaaattcattaacagagatctggctcatgattcagaagaactctttcaagatctaagtcaattacaggaaacatggcttgcagaagtggcttttcatggcctgccactgaaaatcaagaaagaaccccacagtccatgttcagaaatcagctctgcctgcagtcaagaacagccctttaaattcagctatggagaaaagtgcctgtacaatgtcagtgcctatgatcagaagccacaagtgggaatgaggccctccaacccccccacaccatccagcacgccagtgtccccactgcatcatgcatctccaaactcaactcatacaccgaaacctgaccgggccttcccagctcacctccctccatcgcagtccataccagatagcagctaccccatggaccacagatttcgccgccagctttctgaaccctgtaactcctttcctcctttgccgacgatgccaagggaaggacgtcctatgtaccaacgccagatgtctgagccaaacatccccttcccaccacaaggctttaagcaggagtaccacgacccagtgtatgaacacaacaccatggttggcagtgcggccagccaaagctttccccctcctctgatgattaaacaggaacccagagattttgcatatgactcagaagtgcctagctgccactccatttatatgaggcaagaaggcttcctggctcatcccagcagaacagaaggctgtatgtttgaaaagggccccaggcagttttatgatgacacctgtgttgtcccagaaaaattcgatggagacatcaaacaagagccaggaatgtatcgggaaggacccacataccaacggcgaggatcacttcagctctggcagtttttggtagctcttctggatgacccttcaaattctcattttattgcctggactggtcgaggcatggaatttaaactgattgagcctgaagaggtggcccgacgttggggcattcagaaaaacaggccagctatgaactatgataaacttagccgttcactccgctattactatgagaaaggaattatgcaaaaggtggctggagagagatatgtctacaagtttgtgtgtgatccagaagcccttttctccatggcctttccagataatcagcgtccactgctgaagacagacatggaacgtcacatcaacgaggaggacacagtgcctctttctcactttgatgagagcatggcctacatgccggaagggggctgctgcaacccccacccctacaacgaaggctacgtgtattaacacaagtgacagtcaagcagggcgtttttgcgcttttccttttttctgcaagatacagagaattgctgaatctttgttttatttctgttgtttgtattttatttttaaataataatacacaaaaaggggcttttcctgttgcattattctatggtctgccatggactgtgcactttatttgagggtgggtgggagtaatctaaacatttattctgtgtaacaggaagctaatgggtgaatgggcagagggatttggggattactttttacttaggcttgggatggggtcctacaagttttgagtatgatgaaactatatcatgtctgtttgatttcataacaacataagataatgtttattttatcggggtatctatggtacagttaatttcacgttgtgtaaatatccacttggagactatttgccttgggcattttcccctgtcatttatgagtctctgcaggtgtacaaaaaaaccccaatctactgtaaatggcagtttaattgttagaaatgactgtttttgcaccacttgtaaaaaggtatttagcgattgcatttgctgtttgttgttttattttgctttatatatgacttgcagaggataaccataaaatgggtaattctctctgaagttgaataatcaccatgactgtaaatgaggggcacaattttggactctggcgccaaactgagtcataggccagtagcattacgtgtatctggtgccaccttgctgtttagatacaaatcataccgtcttttaaatattttgaagcccatttcagttaaataatgacatgtcatggtcctttggaatcttcatttaaatgttaaatctggaatcaaaatgaagcaaaaaatatctgtctccttttcactttcttcagtacataaatacattatttaatcaataagaattaactgtactaaatcatgtattatgctgttctagttacagcaaacactctttaagaaaaatatccaatacactaaataggtactatagtaatttttagacatggtacccattgatatgcatttaaaccttttactgctgtgttatgttgataacatatataaatattagataatgctaatgcttctgctgctgtcttttctgtaatattctctttcatgctgaatttactatgaccatttataagcagtgcagttaactacagatagcatttcaggacaaaatagatgactcaaaccatttattgcttaaaaaatagcttacgccatgctatgctataagcagcttttatgcacattgacaaatgaagagtaagcttcagcttgctaaaggaaactgtggaaccttttgtaacttttggtgatatggaaaattatttacaaaccgtcaaagaatatgaggaagttgctgtatgacatagtgctggcactgatattatccatcatctctttttggacacttctgtaaatgtgattggattgtttgaaagaagatttaaagtttcaaagttttttgttctgtttttgctttgcatttggagaaaatattgaaagcagggtatgttgtttcattcaccttgaaaaaaccatgagtaaatggggatatagaatctctgaatagctcgctaaaagattcaagcaagggacatgaattttgttccatctatcaataatatccagaagaacaacttttttaaagagtctatagcaaaaagcaaaaaaaaaaaaaaattctaaacacaaagtcaaaataaacctattgtaaaagcatttcgtgatgagcatgaaaaagattgtttaaagatgatccccccagctacccattttccaaaactacacagatcacagctcatttctctaagtggagcagttatcaagaaacccaaacaccaaaattgctactcttcacatttaatcctacaaaaagtactccaatttcaaaatatgtatgtaacctgcgatttcaatgattgttgttcatatacatcatgtattattttggcccattttgggcctaaaaaagaaaactatgccttaaaaatcagaaccttttctccccactatgcttatgtggccatctacagcacttagaataaaaacagatgttaaaatattcagtgaaagttttattggaaaaaggaattgagatatataattgagatttggtgaaattgaaggagaaaatttaagtgagtctttaaaatatattctgaatgaaaactgtattgaggattcatttttgttccttttttttctttttctcttttctcctttttcttctttttaatagtctagttttagtcagtcagtgaggaagaattgggccatgctaacgttatcacaagagaacaatggcagaaatggtattagttatataatatttaaggacaaactatatgttttgctgttttaacgtagtgactcactgaactaaatacataattgaccaacattaagtgtatttccaatacagaagggttgaaaatattacattataaactcttttgaaaaatgtatctaaaattttttaagttctgttttgattccactttttggttgagtttttatgtttttgttttcaggtagattaataaatctggcagctgatttctgcaagattcttgtgttttgaatttctcattgaattggctactcaaacatagaaatcatttgttaatgatgtaatgtcttctctcagcttttatcttcactgctgtttgctgtctcttgatgatgacatgttaatacccaatagattaattgcaacaaacacttatactcaaataactaagtaaaaataatttttcttgttatgtccatgaaaagtgcttcagaataaaaatccacaagactgacagtgcagaacatttttctcaaatcatgggcggatcttggaggtctagtttcccgtagatgctgtaaccaattaccacaacttcagtaatttacacaaatttatcttatagttctggaggcagaagttcaaaagaagccttaagagactaaaaccaagatgtccttaggtctggttccttctggaggctccaggggagattcttccagctttcacttctagagtctgctgacattccttggctcctggctacatcacttcaatctctgcttccatggtcacatactcttctactatagtcaaatttccttcctgcctcttataaggatgcttgtgattacatttaggggatgctcagataatccaggacaatctctccatctcaagatccttaacttaatgacgtgtgccaagtccctttggctagataattattcataggtcccagggattaggacatggatgtaaggggtgagggcagggctgttattcagaacaccgcacggaggaggaagactgtgtagcaaagactctaattgatttactcaggaacagtggagttctgctgagggatctaggatttgaaagtactagagtttgcttttatttaccactgagatattttccccttattctgcataaataattttgaaaactttctatattaaatttcaactattccactaaaatgtctggtaatcacatcaagcctttagattattcaaatccttccccagcccccaggaaaacactaagtcatgaaacagaaaaacagaaggtatgataataatagtaataacagttaaatcagtggtctaatccagattttattttttaatacatttcttttggtgttaatatgggttactatgtgatcttatcatttgctagtgattattacttattaggtaagaacaatgtgtaaaatatgtctattactcaaaagaacaattgcaaaatgagtcaacttatctttatataaccaggaaagaaatatattgccagaagctacagaattttgccagatgatagggatttctaaaatgagccactttgtctatcatgcagccttttcagagcttgtaatgagaaaacattacagaggagaaggtcatttggatgtttgttacttggaatcctagaaaacaaaaactaaaatttaaaaataagaagtgagtaagctattttccatttgcgatttggtatggagaagagaggaaatagaattattaaaaaaatacaaattgggtaaaagtgatggtggaaaaaatataaagaaggcaaatgtacatattaagcaattctactaagaattggaaaaatcaagtttcaaaaagatggtaatagttgggcatgatactagaaaatttcacccagtttattcagagctcaactagtacttttaggacttctttttttatatacatgagactcactttgacatacttaaaaaaaaaacagtttatggaaagtacagtttaagaggagaatttgattagactaagtggatatctttatagaaatattaatgatttcagaattttcagttacaagtgtatataccgtggctattgtttatggattcatatgtaaggtagggtcttttttgcatatagactccagtattagttactttcattctaaaattatatttatgcttctatggggaagaaaatttttaattcacttggttgtattaaaattatacttacggtttgagaaaacatgctatgaaaatcatgattatagcaaattaaatatgctcaaaatttaaatctaaaataaaagcccagaaactg

SEQ ID NO: 5365 - DNA, 714 bp, Homo sapiens
atttaagtcaagggccggctggcaaccccagcaagctgtcctgtgagccgccagcatggatgacatctacaaggctgcggtagagcagctgacagaagagcagaaaaatgagttcaaggcagccttcgacatcttcgtgctgggcgctgaggatggctgcatcagcaccaaggagctgggcaaggtgatgaggatgctgggccagaaccccacccctgaggagctgcaggagatgatcgatgaggtggacgaggacggcagcggcacggtggactttgatgagttcctggtcatgatggttcggtgcatgaaggacgacagcaaagggaaatctgaggaggagctgtctgacctcttccgcatgtttgacaaaaatgctgatggctacatcgacctggatgagctgaagataatgctgcaggctacaggcgagaccatcacggaggacgacatcgaggagctcatgaaggacggagacaagaacaacgacggccgcatcgactatgatgagttcctggagttcatgaagggtgtggagtagatgctgaccttcacccagagctgcctatgcccagcctccaactccagctgagtcctggggttggggagggggtcggggtcccaggacctgagcctggccatgtcctcaaccccaaatcccccgactccctccccagatctgtcctgggggatgcaaataaagcctgctctccc

SEQ ID NO: 5366 - DNA, 786 bp, Homo sapiens
aagcagcattcccaagtcccgctttcacccgcgcgctaacggctcaggttcgagtacaggacaggagggaggggagctgtgcacacggcggaggcgcacggcgtgggcacccagcacccggtacactgtgtcctcccgctgcacccagccccttccgcgccgaggcgtccccgaggcgcaagtgggccgccttcagggaactgaccgcccgcggcccgtgtgcagagccgggtgcgcccggcccagtgcgcgcggccgggtgtttcgcctggagccgcaagtgactcagcgcggggcgtgtgcaggcagcgcccggccggggcggggcttttgcactcgtcccggctctttctagctataaacactgcttgccgcgctgcactccaccacgcctcctccaagtcccagcgaacccgcgtgcaacctgtcccgactctagccgcctcttcagctcgccatggatcccaactgctcctgcgccgccggtgactcctgcacctgcgccggctcctgcaaatgcaaagagtgcaaatgcacctcctgcaagaaaagctgctgctcctgctgccctgtgggctgtgccaagtgtgcccagggctgcatctgcaaaggggcgtcggacaagtgcagctgctgcgcctgatgctgggacagccccgctcccagatgtaaagaacgcgacttccacaaacctggattttttatgtacaaccctgaccgtgaccgtttgctatattcctttttctatgaaataatgtgaatgataataaaacagctttgacttga

SEQ ID NO: 5367 - DNA, 972 bp, Homo sapiens
gatctggaagagctttgtcccgtgtgtggagataaagtgtctgggtaccattatgggctcctcacctgtgaaagctgcaagggattttttaagcgaacagtccaaaataataaaaggtacacatgtatagaaaaccagaactgccaaattgacaaaacacagagaaagcgttgtccttactgtcgttttcaaaaatgtctaagtgttggaatgaagctagaagctgtaagggccgaccgaatgcgtggaggaaggaataagtttgggccaatgtacaagagagacagggccctgaagcaacagaaaaaagccctcatccgagccaatggacttaagctagaagccatgtctcaggtgatccaagctatgccctctgacctgaccatttcctctgcaattcaaaacatccactctgcctccaaaggcctacctctgaaccatgctgccttgcctcctacagactatgacagaagtccctttgtaacatcccccattagcatgacaatgccccctcacggcagcctgcaaggttaccaaacatatggccactttcctagccgggccatcaagtctgagtacccagacccctataccagctcacccgagtccataatgggctattcatatatggatagttaccagacgagctctccagcaagcatcccacatctgatactggaacttttgaagtgtgagccagatgagcctcaagtccaggctaaaatcatggcctatttgcagcaagagcaggctaaccgaagcaagcacgaaaagctgagcacctttgggcttatgtgcaaaatggcagatcaaactctcttctccattgtcgagtgggccaggagtagtatcttcttcagagaacttaagggtctcactctgtcgcccagtctggagtgcagtggctcttggctcatggcaacctccacctcctgcattcaagtgattcgcctgcctcagcctcccgagtag

SEQ ID NO: 5368 - DNA, 3850 bp, Homo sapiens
gaggaggccgggcgcgcccggaaaagtggtttgcctgacggcgagaggcagaggtgccctcggtgatagaggaaacatggccgagtatacgcggctgcacaacgccttggcgctaatccgcctccgaaacccgccggtcaacgcgatcagtacgactttactccgtgacataaaagaaggactacagaaagctgtaatagaccatacaataaaagccattgtgatttgtggagcagagggcaaattttctgcaggtgctgatattcgtggcttcagtgctcctaggacatttggccttacactgggacatgtagtagatgaaatacagagaaatgagaagcccgtggtggcagcaatccaaggcatggctttcggagggggactagagctggccctgggctgtcactataggattgcccacgcagaggctcaagttggcttaccagaagttacactgggacttctccctggtgcaagaggaacccagcttctccccagactcactggagttcctgctgcacttgacttaattacctcaggaagacgtattttagcagatgaagcactcaagctgggcattctagataaagttgtaaactcagacccggttgaagaagcaatcagatttgctcagagagtttcagatcaacctctagaatcccgtagactctgcaacaagccaattcagagcttgcccaacatggacagcatttttagtgaggccctcttgaagatgcggaggcagcaccctgggtgtcttgcacaggaggcttgtgtccgtgcagtccaggctgctgtgcagtatccctatgaagtgggcatcaagaaggaggaggagctgtttctatatcttttgcaatcagggcaggctagagccctgcaatatgctttcttcgctgaaaggaaagcaaataagtggtcaactccctccggagcatcgtggaaaacagcatcagcgcggcctgtctcctcagttggtgttgttggcttgggaacaatgggccgaggcattgtcatttcttttgcaagggccaggattcctgtgattgctgtagactcggacaaaaaccagctagcaactgcaaacaagatgataacctctgtcttggaaaaagaagcctccaaaatgcaacagagcggccacccttggtcaggaccaaaacccaggttaacttcatctgtgaaggagcttggtggtgtagatttagtcattgaagcagtatttgaggaaatgagcctgaagaagcaggtctttgctgaactctcagctgtgtgcaaaccagaagcatttttgtgcactaatacttcagccctggatgttgatgagattgcttcttccactgatcgtcctcacttggtcattggcacccacttcttttcgccagctcatgtcatgaagttgttagaggttattcccagccaatactcttcccccactaccattgccactgttatgaacttatcaaaaaagattaaaaagattggagtcgttgtaggcaactgttttggatttgtggggaatcgaatgttgaatccttactacaatcaggcatatttcttgttagaagaaggcagcaaaccagaggaggtagatcaggtgctggaagagtttggttttaaaatgggaccttttagagtgtctgatcttgctgggttggatgtgggctggaaatctagaaaggggcaaggtcttactggacctacattgcttccaggaactcctgcccgaaaaaggggtaataggaggtactgcccaattcctgatgtgctctgtgaattaggacgatttggccagaagacaggtaagggttggtatcaatatgacaagccattgggtaggattcacaaacctgatccctggctttccaaattcctatcacggtatagaaaaacccatcacattgaaccacgtaccattagccaggatgagatccttgaacgctgcttatattcacttatcaatgaagcattccgtatcttgggagaagggatagctgctagcccagagcacattgatgttgtctatttacatggatatggatggccaaggcacaagggcgggcccatgttctatgcttccacagttgggttgcccacagttctagagaaattgcagaaatattacaggcagaaccctgatattccccaactggagccaagtgactatctaaaaaaactggcttctcagggaaaccctcccctgaaagaatggcaaagcttggcaggctcccctagcagtaaattgtgattcagtcttccagattatgcctcacatgctagcatcaggtaatgctgactgaatttcagtgaaattaaatcaaaaatccaaagtaagattgttctgaaatacaaagcaaaataaataatcattagaatcttctgtgtaacgactctaatggtcaaatctttaggaatgtgcttcctatgcctctgaatctgtccttatcagataaattcaatgcatgaacttgtgtgaatataataccataatagctaatgaaagaggctcaggcataagttgagattctcaaatgcttttatcattggataaatgtgtcatcaattaataaatgataaatgcagctaagtcatacattcattttgactcctttcaatgtcacacacatagtattgatcagaaatcttatgaatcatacatacactcaacaaacattaaagttgtaggaaaaagacagttggaaattggtaagggaactgagtacttcaaaccagcacagggaacttaggttagtgtggcaagcctttcctcttctggtctttcctcttctgtttatggagaaataatagaaagtagtaagtcgttaacttagtgtaagaagggtcttagagaacatctaaccttctaggatttcccaattctgtgatagagtaatgacaccagttttcctgtcatgacaagcctctgtgatgttacatatggaaatggttgaatcttgaaaaatctaaaattgttgcaaaacatattttgtatgattttgttgtaagagttcttctctttttactttttgccttgtgtagttaaaaattaaggggctggtcaatacaaaaacttgtacacaaatatttatagcagaattattcataatggccaaaagctgaatacaacccaaatgtctatgaactaatgaatagataaaccaaatctggtatatccatacaatggactatattattcagccataaaaagaaataaagggccaggcacagtggctcacacctgtaatcccagcactttgggaggctgaggcaggaggattgtttgaggccagaaatttgagaccagcctgggcaacatagcaaaaccctgtctctacaaaaaatactttccgtacattagtggttgcctaaggctagaattgggggtgatgaatggggagtacaggattcatctaatgggtacaggatttctttatggttcatgaaaatggtctaaacttattgtggtaatggtcacataacaatatattaaaaaccattgagttgtatattttaagtgggtgaattatatggtatgtgaattatatctcaataaagttgttagtaaataaatggggctgaagatgttatccttcattgtggtgtaaatgaactttcacaatattttcacctgtgaacccaaataaaatgattaaagttctgatggaaaaatcttgaatggagtataagttttccgttgttaaaaagcaaacaaaaaaccaacaaaaaatccaagtgtgccttgaattgtacagagcacaattattatgtttgaaatgtgtactacttaattttatataatttggtttgtgaaattaaagacatcaataaaaatgattcctgaaagtagtaa

SEQ ID NO: 5369 - DNA, 2767 bp, Homo sapiens
ccagcagcaggaggcgcgcgaggcaccacggcctggcggccgagagtcagggaggaacctcatttacataacggccgcccctctgtctcctggcgggggccggagtcccgcccctcgtccaacttgaaatctgttgggtcacgggccagtcactccgacctaggcaagcctgtggtggagctggaagagtttgtgagggcggtcccgggagcggattgggtctgggagttcccagaggcggctataagaaccgggaactgggcgcggggagctgagttgctggtagtgcccgtggtgcttggttcgaggtggccgttagttgactccgcggagttcatctccctggttttcccgtcctaacgtcgctcgcctttcagtcaggatgtctgcccgtggcccggctatcggcatcgacctgggcaccacctattcgtgcgtcggggtcttccaacatggcaaggtggagatcatcgccaacgaccagggcaatcgcaccacccccagctacgtggccttcacggacaccgagcgcctcatcggcgacgccgccaagaaccaggtggccatgaaccccaccaacaccatcttcgacgccaagaggctgattggacggaaattcgaggatgccacagtgcagtcggatatgaaacactggccgttccgggtggtgagcgagggaggcaagcccaaagtgcaagtagagtacaagggggagaccaagaccttcttcccagaggagatatcctccatggtcctcacgaagatgaaggagatcgcggaagcctacctggggggcaaggtgcacagcgcggtcataacggtcccggcctatttcaacgactcgcagcgccaggccaccaaggacgcaggcaccatcacggggctcaatgtgctgcgcatcatcaacgagcccacggcggcggccatcgcctacggcctggacaagaagggctgcgcgggcggcgagaagaacgtgctcatctttgacctgggcggtggcactttcgacgtgtccatcctgaccatcgaggatggcatcttcgaggtgaagtccacggccggcgacacccacctgggcggtgaggacttcgacaaccgcatggtgagccacctggcggaggagttcaagcgcaagcacaagaaggacattgggcccaacaagcgcgccgtgaggcggctgcgcaccgcttgcgagcgcgccaagcgcaccctgagctcgtccacgcaggcgagcatcgagatcgactcgctctacgagggcgtggacttctatacgtccatcacgcgcgcccgcttcgaggagctcaatgccgacctctttcgcgggaccctggagccggtggagaaggcgctgcgcgacgccaagctggacaagggccagatccaggagatcgtgctggtgggcggctccactcgtatccccaagatccagaagctgctgcaggatttcttcaacggcaaggagctgaacaagagcatcaaccccgacgaggcggtggcctatggcgccgcggtgcaggcggccatcctcatcggcgacaaatcagagaatgtgcaggacctgctgctactcgacgtgaccccgttgtcgctgggcatcgagacagctggcggtgtcatgaccccactcatcaagaggaacaccacgatccccaccaagcagacgcagaccttcaccacctactcggacaaccagagcagcgtactggtgcaggtatacgagggcgaacgggccatgaccaaggacaataacctgctgggcaagttcgacctgaccgggattccccctgcgcctcgcggggtcccccaaatcgaggttaccttcgacattgacgccaatggcatccttaacgttaccgccgccgacaagagcaccggtaaggaaaacaaaatcaccatcaccaatgacaaaggtcgtctgagcaaggacgacattgaccggatggtgcaggaggcggagcggtacaaatcggaagatgaggcgaatcgcgaccgagtcgcggccaaaaacgccctggagtcctatacctacaacatcaagcagacggtggaagacgagaaactgaggggcaagattagcgagcaggacaaaaacaagatcctcgacaagtgtcaggaggtgatcaactggctcgaccgaaaccagatggcagagaaagatgagtatgaacacaagcagaaagagctcgaaagagtttgcaaccccatcatcagcaaactttaccaaggtggtcctggcggcggcagcggcggcggcggttcaggagcctccgggggacccaccatcgaagaagtggactaagcttgcactcaagtcagcgtaaacctctttgcctttctctctctctctttttttttgtttgtttctttgaaatgtccttgtgccaagtacgagatctattgttggaagtctttggtatatgcaaatgaaaggagaggtgcaacaacttagtttaattataaaagttccaaagtttgttttttaaaaacattattcgaggtttctctttaatgcattttgcgtgtttgctgacttgagcatttttgattagttcgtgcatggagatttgtttgagatgagaaaccttaagtttgcacacctgttctgtagaagcttggaaacagtaaaatatataggagcttaaattgtttatttttatgtactactttaaaactaaactgaacattgcagtaatgttaaggacaggtatactttttgcaaacaaatgcataaatgcaaatgtaaagtaaagctgaaattgatctc

SEQ ID NO: 5370 - DNA, 1565 bp, Homo sapiens
ggatgtctgcagcagcatttaaattctgggagggcttggttgtcagcagcagcaggaggaggcagagcacagcatcgtcgggaccagactcgtctcaggccagttgcagccttctcagccaaacgccgaccaaggaaaactcactaccatgagaattgcagtgatttgcttttgcctcctaggcatcacctgtgccataccagttaaacaggctgattctggaagttctgaggaaaagcagctttacaacaaatacccagatgctgtggccacatggctaaaccctgacccatctcagaagcagaatctcctagccccacagacccttccaagtaagtccaacgaaagccatgaccacatggatgatatggatgatgaagatgatgatgaccatgtggacagccaggactccattgactcgaacgactctgatgatgtagatgacactgatgattctcaccagtctgatgagtctcaccattctgatgaatctgatgaactggtcactgattttcccacggacctgccagcaaccgaagttttcactccagttgtccccacagtagacacatatgatggccgaggtgatagtgtggtttatggactgaggtcaaaatctaagaagtttcgcagacctgacatccagtaccctgatgctacagacgaggacatcacctcacacatggaaagcgaggagttgaatggtgcatacaaggccatccccgttgcccaggacctgaacgcgccttctgattgggacagccgtgggaaggacagttatgaaacgagtcagctggatgaccagagtgctgaaacccacagccacaagcagtccagattatataagcggaaagccaatgatgagagcaatgagcattccgatgtgattgatagtcaggaactttccaaagtcagccgtgaattccacagccatgaatttcacagccatgaagatatgctggttgtagaccccaaaagtaaggaagaagataaacacctgaaatttcgtatttctcatgaattagatagtgcatcttctgaggtcaattaaaaggagaaaaaatacaatttctcactttgcatttagtcaaaagaaaaaatgctttatagcaaaatgaaagagaacatgaaatgcttctttctcagtttattggttgaatgtgtatctatttgagtctggaaataactaatgtgtttgataattagtttagtttgtggcttcatggaaactccctgtaaactaaaagcttcagggttatgtctatgttcattctatagaagaaatgcaaactatcactgtattttaatatttgttattctctcatgaatagaaatttatgtagaagcaaacaaaatacttttacccacttaaaaagagaatataacattttatgtcactataatcttttgttttttaagttagtgtatattttgttgtgattatctttttgtggtgtgaataaatcttttatcttgaatgtaataagaatttggtggtgtcaattgcttatttgttttcccacggttgtccagcaattaataaaacataaccttttttactgcct

SEQ ID NO: 5371 - DNA, 2101 bp, Homo sapiens
ttcattataaatctagagactccaggattttaacgttctgctggactgagctggttgcctcatgttattatgcaggcaactcactttatcccaatttcttgatacttttccttctggaggtcctatttctctaacatcttccagaaaagtcttaaagctgccttaaccttttttccagtccacctcttaaattttttcctcctcttcctctatactaacatgagtgtggatccagcttgtccccaaagcttgccttgctttgaagcatccgactgtaaagaatcttcacctatgcctgtgatttgtgggcctgaagaaaactatccatccttgcaaatgtcttctgctgagatgcctcacacggagactgtctctcctcttccttcctccatggatctgcttattcaggacagccctgattcttccaccagtcccaaaggcaaacaacccacttctgcagagaagagtgtcgcaaaaaaggaagacaaggtcccggtcaagaaacagaagaccagaactgtgttctcttccacccagctgtgtgtactcaatgatagatttcagagacagaaatacctcagcctccagcagatgcaagaactctccaacatcctgaacctcagctacaaacaggtgaagacctggttccagaaccagagaatgaaatctaagaggtggcagaaaaacaactggccgaagaatagcaatggtgtgacgcagaaggcctcagcacctacctaccccagcctttactcttcctaccaccagggatgcctggtgaacccgactgggaaccttccaatgtggagcaaccagacctggaacaattcaacctggagcaaccagacccagaacatccagtcctggagcaaccactcctggaacactcagacctggtgcacccaatcctggaacaatcaggcctggaacagtcccttctataactgtggagaggaatctctgcagtcctgcatgcagttccagccaaattctcctgccagtgacttggaggctgccttggaagctgctggggaaggccttaatgtaatacagcagaccactaggtattttagtactccacaaaccatggatttattcctaaactactccatgaacatgcaacctgaagacgtgtgaagatgagtgaaactgatattactcaatttcagtctggacactggctgaatccttcctctcccctcctcccatccctcataggatttttcttgtttggaaaccacgtgttctggtttccatgatgcccatccagtcaatctcatggagggtggagtatggttggagcctaatcagcgaggtttctttttttttttttttcctattggatcttcctggagaaaatactttttttttttttttttttgaaacggagtcttgctctgtcgcccaggctggagtgcagtggcgcggtcttggctcactgcaagctccgtctcccgggttcacgccattctcctgcctcagcctcccgagcagctgggactacaggcgcccgccacctcgcccggctaatattttgtatttttagtagagacggggtttcactgtgttagccaggatggtctcgatctcctgaccttgtgatccacccgcctcggcctccctaacagctgggatttacaggcgtgagccaccgcgccctgcctagaaaagacattttaataaccttggctgccgtctctggctatagataagtagatctaatactagtttggatatctttagggtttagaatctaacctcaagaataagaaatacaagtacaaattggtgatgaagatgtattcgtattgtttgggattgggaggctttgcttattttttaaaaactattgaggtaaagggttaagctgtaacatacttaattgatttcttaccgtttttggctctgttttgctatatcccctaatttgttggttgtgctaatctttgtagaaagaggtctcgtatttgctgcatcgtaatgacatgagtactgctttagttggtttaagttcaaatgaatgaaacaactatttttcctttagttgattttaccctgatttcaccgagtgtttcaatgagtaaatatacagcttaaacat

SEQ ID NO: 5372 - DNA, 694 bp, Homo sapiens
cccgtaggagcctctctccctactgctgctacacaagaccctgagactgacctgcaggacgaaaccatgaagagcctgatccttcttgccatcctggccgccttagcggtagtaactttgtgttatggagagtggcagaaagaagaaaacttcggctttgatatcgtttcagttctctctctgaactggcatcgtgcccaggaatcacatgaaagcatggaatcttatgaacttaatcccttcattaacaggagaaatgcaaataccttcatatcccctcagcagagatggagagctaaagtccaagagaggatccgagaacgctctaagcctgtccacgagctcaatagggaagcctgtgatgactacagactttgcgaacgctacgccatggtttatggatacaatgctgcctataatcgctacttcaggaagcgccgagggaccaaatgagactgagggaagaaaaaaaatctctttttttctggaggctggcacctgattttgtatccccctgtagcagcattacagaaatacataggcttatatacaatgcttctttcctgtatattctcttgtctggctgcacccctttttcccgcccccagattgataagtaatgaaagtgcactgcagtgagggtcaaaggagagtcaacatatgtgattgttccataataaacttctggtgtgat

SEQ ID NO: 5373 - DNA, 1852 bp, Homo sapiens
gaggaggggcggcgggtggcgggctcgactgcccccagccgaggggcagccccggggccgggcccggcgcgcacccggccagcgcgccctcgccagctgcgctctgagttctgggccagctccccagaggcctaggcgccgccgccgcgagggcgcggggcagacaaaggaggcagacaaaggcgggcgcagcccagcagccgtgcgggcaccgggcgaggcaggcccactcctcccgtaatatcatctctgagggcccttacaggacttccagaccgagtccacgcccctgggggacttgggagcagtaaaatgtagtggcaggaggcacctcggccatcgcccaccccaccagctgggagactcgggcaggttattcacccttctgcacctcgcttgacttatctgtataaagagaacagtcacagtaactgcctcatggagttactcccaggactgagataatccacggacacacttagcccagtgcccagcactcggctggagctccaaaaagccctcttccggcgcctgctaaagcgagagaaatgccctcgggggaagatatgtagcgatccaatggaacgtggagatcaacgttgtgttttcttcgcgcccacccgaagttgaagggaggtggcgcggcgggtctcagcccctcccggacgccgaggcccggcccccgcccctcggagacccgcccccgcatgcggaaccgccctctgcgaggcccggtttgggccgtgcgggaatgggcgtggcctgggcggggcgggcgctaggacccaccggagcgccgtgaacgtcaccgagcggcgccgaggccccgggttgagcgggaggcgcgatcggtccggtcggtggctccccgcggcggggccgggcccgatctcgggcgggaaccgagcgcagagccggtagcgggaaggatgaccacgctcacacgacaagacctcaactttggccaagtggtggccgatgtgctctgcgagttcctggaggtggctgtgcatctcatcctctacgtgcgcgaggtctaccccgtgggcatcttccagaaacgcaagaagtacaacgtgccggtccagatgtcctgccacccggagctgaatcagtatatccaggacacgctgcactgcgtcaagccactcctggagaagaatgatgtggagaaagtggtggtggtgattttggataaagagcaccgcccagtggagaaattcgtctttgagatcacccagcctccactgctgtccatcagctcagactcgctgttgtctcatgtggagcagctgctccgggccttcatcctgaagatcagcgtgtgcgatgccgtcctggaccacaaccccccaggctgtaccttcacagtcctggtgcacacgagagaagccgccactcgcaacatggagaagatccaggtcatcaaggatttcccctggatcctggcggatgagcaggatgtccacatgcatgacccccggctgataccactaaaaaccatgacgtcggacattttaaagatgcagctttacgtggaagagcgcgctcataaaggcagctgagggggcacctgccaccccactgatgcccaaactgtcagactttgggggatccccgcctagggcagtgctgcatggctgccctgattccaagtgctcttatcgcctctgtgtgtggatcgcccgccccagcccggggccgctcaggtctgcttggaggatgcctcccccaggagggcagtgagggatgccgcaacctcgacttctcagcctcctggggttccgccggccaacactgtctgtctcaaatactgtgctgtgagttgtttcaataaaggggccccaagggc

SEQ ID NO: 5374 - DNA, 2423 bp, Homo sapiens; identical to SEQ ID NO: 1443

SEQ ID NO: 5375 - DNA, 1227 bp, Homo sapiens
cacaatggacaatggcaactgcccacacactcccatggaggggaaggggatgagtgcagggaaccccgaccccacccgggagacctgcaagcctgcagacactcccctcccgcccccactgaacccttgacccctgccctgcagcccccgcagcttgctgtttgcccactctatttgcccagccccagggacagagctgatccttgaactcttaagttccacattgccaggaccagtgagcagcaacagggccggggctgggcttatcagcctcccagcccagaccctggctgcagacataaataggccctgcaagagctggctgcttagagactgcgagaaggaggtcccccacggcccttcaggatgaaagctgcggtgctgaccttggccgtgctcttcctgacggggagccaggctcggcatttctggcagcaagatgaacccccccagagcccctgggatcgagtgaaggacctggccactgtgtacgtggatgtgctcaaagacagcggcagagactatgtgtcccagtttgaaggctccgccttgggaaaacagctaaacctaaagctccttgacaactgggacagcgtgacctccaccttcagcaagctgcgcgaacagctcggccctgtgacccaggagttctgggataacctggaaaaggagacagagggcctgaggcaggagatgagcaaggatctggaggaggtgaaggccaaggtgcagccctacctggacgacttccagaagaagtggcaggaggagatggagctctaccgccagaaggtggagccgctgcgcgcagagctccaagagggcgcgcgccagaagctgcacgagctgcaagagaagctgagcccactgggcgaggagatgcgcgaccgcgcgcgcgcccatgtggacgcgctgcgcacgcatctggccccctacagcgacgagctgcgccagcgcttggccgcgcgccttgaggctctcaaggagaacggcggcgccagactggccgagtaccacgccaaggccaccgagcatctgagcacgctcagcgagaaggccaagcccgcgctcgaggacctccgccaaggcctgctgcccgtgctggagagcttcaaggtcagcttcctgagcgctctcgaggagtacactaagaagctcaacacccagtgaggcgcccgccgccgccccccttcccggtgctcagaataaacgtttccaaagtgggaa

SEQ ID NO: 5376 - DNA, 3138 bp, Homo sapiens
gcgcgcagaacttggggagccgccgccgccatccgccgccgcagccagcttccgccgccgcaggaccggcccctgccccagcctccgcagccgcggcgcgtccacgcccgcccgcgcccagggcgagtcggggtcgccgcctgcacgcttctcagtgttccccgcgccccgcatgtaacccggccaggcccccgcaactgtgtcccctgcagctccagccccgggctgcacccccccgccccgacaccagctctccagcctgctcgtccaggatggccgcggccaaggccgagatgcagctgatgtccccgctgcagatctctgacccgttcggatcctttcctcactcgcccaccatggacaactaccctaagctggaggagatgatgctgctgagcaacggggctccccagttcctcggcgccgccggggccccagagggcagcggcagcaacagcagcagcagcagcagcgggggcggtggaggcggcgggggcggcagcaacagcagcagcagcagcagcaccttcaaccctcaggcggacacgggcgagcagccctacgagcacctgaccgcagagtcttttcctgacatctctctgaacaacgagaaggtgctggtggagaccagttaccccagccaaaccactcgactgccccccatcacctatactggccgcttttccctggagcctgcacccaacagtggcaacaccttgtggcccgagcccctcttcagcttggtcagtggcctagtgagcatgaccaacccaccggcctcctcgtcctcagcaccatctccagcggcctcctccgcctccgcctcccagagcccacccctgagctgcgcagtgccatccaacgacagcagtcccatttactcagcggcacccaccttccccacgccgaacactgacattttccctgagccacaaagccaggccttcccgggctcggcagggacagcgctccagtacccgcctcctgcctaccctgccgccaagggtggcttccaggttcccatgatccccgactacctgtttccacagcagcagggggatctgggcctgggcaccccagaccagaagcccttccagggcctggagagccgcacccagcagccttcgctaacccctctgtctactattaaggcctttgccactcagtcgggctcccaggacctgaaggccctcaataccagctaccagtcccagctcatcaaacccagccgcatgcgcaagtaccccaaccggcccagcaagacgcccccccacgaacgcccttacgcttgcccagtggagtcctgtgatcgccgcttctcccgctccgacgagctcacccgccacatccgcatccacacaggccagaagcccttccagtgccgcatctgcatgcgcaacttcagccgcagcgaccacctcaccacccacatccgcacccacacaggcgaaaagcccttcgcctgcgacatctgtggaagaaagtttgccaggagcgatgaacgcaagaggcataccaagatccacttgcggcagaaggacaagaaagcagacaaaagtgttgtggcctcttcggccacctcctctctctcttcctacccgtccccggttgctacctcttacccgtccccggttactacctcttatccatccccggccaccacctcatacccatcccctgtgcccacctccttctcctctcccggctcctcgacctacccatcccctgtgcacagtggcttcccctccccgtcggtggccaccacgtactcctctgttccccctgctttcccggcccaggtcagcagcttcccttcctcagctgtcaccaactccttcagcgcctccacagggctttcggacatgacagcaaccttttctcccaggacaattgaaatttgctaaagggaaaggggaaagaaagggaaaagggagaaaaagaaacacaagagacttaaaggacaggaggaggagatggccataggagaggagggttcctcttaggtcagatggaggttctcagagccaagtcctccctctctactggagtggaaggtctattggccaacaatcctttctgcccacttccccttccccaattactattccctttgacttcagctgcctgaaacagccatgtccaagttcttcacctctatccaaagaacttgatttgcatggattttggataaatcatttcagtatcatctccatcatatgcctgaccccttgctcccttcaatgctagaaaatcgagttggcaaaatggggtttgggcccctcagagccctgccctgcacccttgtacagtgtctgtgccatggatttcgtttttcttggggtactcttgatgtgaagataatttgcatattctattgtattatttggagttaggtcctcacttgggggaaaaaaaaaaaagaaaagccaagcaaaccaatggtgatcctctattttgtgatgatgctgtgacaataagtttgaacctttttttttgaaacagcagtcccagtattctcagagcatgtgtcagagtgttgttccgttaacctttttgtaaatactgcttgaccgtactctcacatgtggcaaaatatggtttggtttttctttttttttttttttgaaagtgttttttcttcgtccttttggtttaaaaagtttcacgtcttggtgccttttgtgtgatgcgccttgctgatggcttgacatgtgcaattgtgagggacatgctcacctctagccttaaggggggcagggagtgatgatttgggggaggctttgggagcaaaataaggaagagggctgagctgagcttcggttctccagaatgtaagaaaacaaaatctaaaacaaaatctgaactctcaaaagtctatttttttaactgaaaatgtaaatttataaatatattcaggagttggaatgttgtagttacctactgagtaggcggcgatttttgtatgttatgaacatgcagttcattattttgtggttctattttactttgtacttgtgtttgcttaaacaaagtgactgtttggcttataaacacattgaatgcgctttattgcccatgggatatgtggtgtatatccttccaaaaaattaaaacgaaaataaagtagctgcgattggg

SEQ ID NO: 5377 - DNA, 781 bp, Homo sapiens; identical to SEQ ID NO: 773

SEQ ID NO: 5378 - DNA, 1553 bp, Homo sapiens
tgaggacatatctaaattttctagttttatagaaggcttttatccacaagaatcaagatcttccctctctgagcaggaatcctttgtgcattgaagactttagattcctctctgcggtagacgtgcacttataagtatttgatggggtggattcgtggtcggaggtctcgacacagctgggagatgagtgaatttcataattataacttggatctgaagaagagtgatttttcaacacgatggcaaaagcaaagatgtccagtagtcaaaagcaaatgtagagaaaatgcatctccattttttttctgctgcttcatcgctgtagccatgggaatccgtttcattattatggtaacaatatggagtgctgtattcctaaactcattattcaaccaagaagttcaaattcccttgaccgaaagttactgtggcccatgtcctaaaaactggatatgttacaaaaataactgctaccaattttttgatgagagtaaaaactggtatgagagccaggcttcttgtatgtctcaaaatgccagccttctgaaagtatacagcaaagaggaccaggatttacttaaactggtgaagtcatatcattggatgggactagtacacattccaacaaatggatcttggcagtgggaagatggctccattctctcacccaacctactaacaataattgaaatgcagaagggagactgtgcactctatgcctcgagctttaaaggctatatagaaaactgttcaactccaaatacgtacatctgcatgcaaaggactgtgtaaagatgatcaaccatctcaataaaagccaggaacagagaagagattacaccagcggtaacactgccaactgagactaaaggaaacaaacaaaaacaggacaaaatgaccaaagactgtcagatttcttagactccacaggaccaaaccatagaacaatttcactgcaaacatgcatgattctccaagacaaaagaagagagatcctaaaggcaattcagatatccccaaggctgcctctcccaccacaagcccagagtggatgggctgggggaggggtgctgttttaatttctaaaggtaggaccaacacccaggggatcagtgaaggaagagaaggccagcagatcactgagagtgcaaccccaccctccacaggaaattgcctcatgggcagggccacagcagagagacacagcatgggcagtgccttccctgcctgtgggggtcatgctgccacttttaatgggtcctccacccaacggggtcagggaggtggtgctgccccagtgggccatgattatcttaaaggcattattctccagccttaagtaagatcttaggacgtttcctttgctatgatttgtacttgcttgagtcccatgactgtttctcttcctctctttcttccttttggaatagtaatatccatcctatgtttgtcccactattgtattttggaagcacataacttgtttggtttcacaggttcacagttaagaaggaattttgcctctgaataaatagaatcttgagtctcatgca

SEQ ID NO: 5379 - DNA, 2904 bp, Homo sapiens
agtgggctctgcggataactcagacgccattaagctggggaatccaaactctaaaagaaggacgcattttaggtaagatctagtggctagatcttcagggtgggcttcgttcttgtggaaatcagtcaagaaagatcggattcgcggttatttatgcaaatcatctgggtggattgtgtacggagttaaactgcgccttctggaccgggtctgaacaatggagactgcgctagcaaaaacgccacagaaaaggcaagttatgtttcttgctatattgttgcttttgtgggaggctggctctgaggcagttaggtattccataccagaagaaacagaaagtggctattctgtggccaacctggcaaaagacctgggtcttggggtgggggaactggccactcggggcgcgcgaatgcattacaaaggaaacaaagagctcttgcagcttgatataaagaccggcaatttgcttctatatgaaaaactagaccgggaggtgatgtgcggggcgacagaaccctgtatattgcatttccagctcttactagaaaatccagtgcagttttttcaaactgatctgcagctcacagatataaatgaccatgccccagagttcccagagaaggaaatgctcctaaaaatcccagagagcacccagccagggactgtgtttcccttaaaaatagcccaggactttgacataggtagcaacactgttcagaactacacaatcagcccaaattcacactttcatgttgctacgcataatcgcggagatggcagaaaatacccagagctggtgctggacaaagcgctggaccgggaggagcggcctgagctcagcttaacactcactgcactggacggtggggctccgcccaggtccgggaccaccacaattcgcattgtcgtcttggataataatgacaacgcccccgaatttttacaatcattctatgaggtacaggtgcccgagaacagcccccttaactccttagttgtcgttgtctccgctcgagatttagatgcaggagcatatgggagtgtagcctatgctctattccaaggcgatgaagttactcaaccatttgtaatagacgagaaaacagcagaaattcgcctgaaaagggcattggatttcgaggcaactccatattataacgtggaaattgtagccacagatggtgggggcctttcaggaaaatgcactgtggctatagaagtggtggatgtgaatgacaacgcccctgaactcaccatgtctacgctctccagccctaccccagaaaatgccccggaaactgtagttgccgttttcagtgtttctgatccagactccggggacaacggtaggatgatttgctccatccagaatgatctcccctttcttttgaagcccacattaaaaaacttttacaccctagtgacacagagaacactggacagagagagccaagccgagtacaacatcaccatcactgtcaccgacatggggacacccaggctgaaaaccgagcacaacataacggtcctggtctccgacgtcaatgacaacgcccccgccttcacccaaacctcctacaccctgttcgtccgagagaacaacagccccgccctgcacatcggcagtgtcagcgccacagacagagactcaggcaccaacgcccaggtcacctactcgctgctgccgccccagaacccacacctgcgcctcgcctccctggtctccatcaacgcggacaacggccacctgtttgccctcaggtcgctggactacgaggccctgcaggcgttcgagttccgcgtgggagccacagaccgcggctccccggcgctgagcagcgaggcgctggtgcgcgtgctggtgctggacgccaacgacaactcgcccttcgtgctgtatccgctgcagaacggctcggcgccttgcaccgagctggtgccccgggcggccgagccgggctacctggtgaccaaggtggtggcggtggacggcgactcgggccagaacgcctggctgtcgtaccagctgctcaaggccacggagcccgggctgttcagcatgtgggcgcacaatggcgaggtgcgcaccgccaggctgctgagcgagcgcgacgcggccaagcacaggctggtggtgctggtcaaggacaatggcgagcctccgcgctcggccaccgccacgctgcacgtgctcctggtggacggcttctcccagccctacctgccgctgccggaggcggccccggcccaggcccaggccgactcgctcactgtctacctggtggtggcattggcctcggtgtcgtcgctcttcctcttttcggtgctcctgttcgtggcagtgcggctgtgcaggaggagcagggcggcctcggtcggtcgctgctcggtgcccgagggcccctttccagggcatctggtggacgtgagcggcaccgggaccctatcccagagctaccactacgaggtgtgtttgaccggagactcaggggccggcgagttcaagttcctgaagccgattattcctaaccttttgccccagggcgctggtgaagaaatagggaaaactgctgccttccggaatagctttggattaaattagagatctcgtgatgacgcgttgttttctgccatttatcccaaactttttcagatctagaattcgagagtgtcatggacaaaaatttcaccttgagattgagcttttatttccctttttaatggatttgtctgttgaacttcatgctgtccaagtgttgaaaagtcaattttatttcattgcatttatttacatagtgtcattccaaatccatgcatgctgttgattttcctgagatttttttctcttcttgttggtatttgttgtgataaaccaccttaataaaatcaagtattaatttt

SEQ ID NO: 5380 - DNA, 2653 bp, Homo sapiens
atggagcctgcaggggagcgctttcccgaacaaaggcaagtcctgattctccttcttttactggaagtgactctggcaggctgggaaccccgtcgctattctgtgatggaggaaacagagagaggttcttttgtagccaacctggccaatgacctagggctgggagtgggggagctagccgagcggggagcccgggtagtttctgaggataacgaacaaggcttgcagcttgatctgcagaccgggcagttgatattaaatgagaagctggaccgggagaagctgtgtggccctactgagccctgtataatgcatttccaagtgttactgaaaaaacctttggaagtatttcgagctgaactactagtgacagacataaacgatcattctcctgagtttcctgaaagagaaatgaccctgaaaatcccagaaactagctcccttgggactgtgtttcctctgaaaaaagctcgggacttggacgtgggcagcaataatgttcaaaactacaatatttctcccaattctcatttccatgtttccactcgcacccgaggggatggcaggaaatacccagagctggtgctggacacagaactggatcgcgaggagcaggccgagctcagattaaccttgacagcggtggacggtggctctccaccccgatctggcaccgtccagatcctcatcttggtcttggacgccaatgacaatgccccggagtttgtgcaggcgctctacgaggtgcaggtcccagagaacagcccagtaggctccctagttgtcaaggtctctgctagggatttagacactgggacaaatggagagatatcatactccctttattacagctctcaggagatagacaaaccttttgagctaagcagcctttcaggagaaattcgactaattaaaaaactagattttgagacaatgtcttcgtatgatctagatatagaggcatctgatggcgggggactttctggaaaatgctctgtctctgttaaggtgctggatgttaacgataacttcccggaactaagtatttcatcacttaccagccctattcccgagaattctccagagacagaagtggccctgtttaggattagagaccgagactctggggaaaatggaaaaatgatttgctcaattcaggatgatgttccttttaagctaaaaccttctgttgagaatttctacaggctggtaacagaaggggcgctggacagagagaccagagccgagtacaacatcaccatcaccatcacagacttggggactccaaggctgaaaaccgagcagagcataaccgtgctggtgtcggacgtcaatgacaacgcccccgccttcacccaaacctcctacaccctgttcgtccgcgagaacaacagccccgccctgcacatcggcagtgtcagcgccacagacagagactcgggcaccaacgcccaggtcacctactcgctgctgccgccccgggacccgcacctgcccctcacctccctggtctccattaacacggacaacggccacctgttcgctctccagtcgctggactacgaggccctgcaggctttcgagttccgcgtgggcgccacagaccgcggcttcccggcgctgagcagcgaggcgctggtgcgagtgctggtgctggacgccaacgacaactcgcccttcgtgctgtacccgctgcagaacggctccgcgccctgcaccgagctggtgccccgggcggccgagccgggctacctggtgaccaaggtggtggcggtggacggcgactcgggccagaacgcctggctgtcgtaccagctgctcaaggccacggagcccgggctgttcggcgtgtgggcgcacaatggcgaggtgcgcaccgccaggctgctgagcgagcgcgacgtggccaagcacaggctagtggtgctggtcaaggacaatggcgagcctccgcgctcggccaccgccacgctgcaagtgctcctggtggacggcttctctcagccctacctgccgctcccagaggcggccccggcccaagcccaggccgactcgcttaccgtctacctggtggtggcattggcctcggtgtcttcgctcttcctcttctcggtgttcctgttcgtggcagtgcggctgtgcaggaggagcagggcggcctcagtgggtcgctgctcggtgcccgagggcccctttccagggcatctggtggacgtgagcggcaccgggaccctttcccagagctaccagtacgaggtgtgtctgacgggaggctctgaaagtaatgatttcaagttcttgaagcctatattcccaaatattgtaagccaggactctaggaggaaatcagaatttctagaataatgtaggtatctgtagctttccgaccgtctgttaattttgtcttcctcacttttcaccttagttttttttaaccctttagtaatcttgaattctacttttttttaaatttctactgttgtctttagtaatgttactcatttcctttgtctgattgttagttttcaaattattgtattattataaatattttatatcaggaaagttcatatttctgaataaattaatagtattcattcctgaagggtgatatgaaagttaaccccacctaataaacataactctaattctg

SEQ ID NO: 5381 - DNA, 5154 bp, Homo sapiens
ggtcctcctcctcctcctccacctcctcctcctctgcctcctcctcccccccgtgctcctccctccccgagcctccctcgcccgccctccttcttccctccgcacgttcggggttcgcggcggagcgcggcgcgggggggacgcggagagcctgggcgcagcagcatcctgcgggcggccgctctccgggggggaggctgagagcaggcccgcctcgcccccccgcgggcccgccgccccctccctccctgtcctcagcccggcagcggcggcggcggcggcagtggcagtcgccggagaagcatcatgccgaggaggaagcagcaggcgccccggcgcgcagcagcctatgtttccgaagagttaaaggctgctgccctggtggacgaaggtttagacccagaggagcatacggcagatggagagccctcggccaagtacatgtgcccggagaaggagctcgccagggcctgccccagctaccagaactccccggccgccgagttttcctgccatgaaatggacagcgagtcacacatcagtgagaccagtgaccgaatggctgactttgaaagcggctccatcaagaacgaagaggagaccaaggaggtcacggtcccactggaagacacgactgtgtcggatagcctggagcagatgaaggccgtgtacaacaacttcctctccaactcctactggtccaacctcaacctcaacctgcaccagccctcctcggagaagaacaacggcagcagcagcagcagcagtagcagcagcagcagctgtggcagcgggagcttcgactggcaccagagcgccatggctaagacgctgcagcaggtgtcacagagccgcatgctcccggagcccagcctcttcagcaccgtgcagctgtaccggcagagcagcaagctctatggctccatcttcacgggggccagcaagttccgctgtaaggactgcagcgctgcctacgacaccctggtggagttgacggtgcacatgaacgagacggggcattaccgcgacgacaaccatgagaccgataacaacaaccccaagcgctggtccaagcctcgcaaacgctccttgctggaaatggaagggaaggaagacgcccagaaggtgctgaagtgcatgtactgtggccactcctttgagtccctgcaggatttgagtgtccatatgatcaaaacaaaacactaccaaaaagtgcctctgaaggaacccgtcactcctgtcgccgccaaaatcatccctgccactcggaagaaagcttccctggagctggagctccccagctccccagattccacaggtggaacccccaaagccaccatctcagacaccaacgatgcacttcagaagaactccaacccttacatcacgccaaataatcggtacggccaccagaatggggccagctatgcatggcactttgaggcccggaagtcgcagatcctgaagtgcatggagtgtgggagctcgcatgacaccctgcaggagctcactgcccacatgatggtcactggccacttcatcaaggtcaccaactctgctatgaaaaaggggaagcccattgtggagacgcctgtcacacctaccatcacaaccctgctggatgagaaggtccagtccgtgcccctggcagccaccaccttcacgtccccctccaatacacctgccagcatctccccaaaactgaatgtggaggtcaagaaggaagtcgacaaggagaaagcggtcactgacgagaaacctaagcaaaaagacaagcctggcgaagaagaggagaagtgtgacatctcttccaaataccattacttgactgaaaatgacttagaagagagtcccaagggggggcttgatatcctcaaatccttggaaaacacagtgacatccgcaatcaacaaggcccagaacggcactcctagctgggggggctatcccagcatccatgccgcctaccaacttcccaacatgatgaagttgtccctgggctcgtcggggaagagcacgcccctgaaacccatgtttggcaacagtgagattgtctccccgacgaaaaaccagaccctggtctctccacccagcagccagacgtcccccatgcccaagacaaactttcatgccatggaggagctggtgaaaaaggtcactgagaaagttgccaaagtggaggagaagatgaaggagccggatgggaagctttccccgcccaagcgggccactccctccccatgtagcagcgaagtcggggaacccatcaagatggaggcatccagcgatgggggcttccgcagccaggagaacagccccagccccccgcgggatgggtgcaaggatgggagccccctcgctgagccggtggagaatggcaaggagctggtgaagcccctagccagcagtttgagtggcagcacggccatcatcaccgaccacccgcctgaacagccttttgttaaccctttgagcgccctgcagtcagtcatgaacattcacctgggcaaggccgccaagccctccctgcctgccctggaccccatgagcatgcttttcaagatgagcaacagcctggcggagaaggctgctgtggccaccccgccgcccctgcagtccaagaaggcagaccacctcgaccgctatttctaccacgtcaacaacgaccagcccatagacttgacaaaagggaagagtgacaaaggctgctccttgggttcagtgcttctgtcacccacgtccacagccccggcaacctcctcatccacggtgacaacggcaaagacatctgccgtcgtatcattcatgtcaaactcgccgctacgcgagaatgccttgtcagatatatccgatatgctgaagaacttgacagagagccacacgtcaaaatcctccactccttccagcatctccgagaagtctgacattgacggggccactctggaggaggctgaggagtcgacgcccgcccagaagaggaagggccgccagtcaaactggaacccccagcacctcctgatcctccaggcccagtttgccgccagcctccggcagacctcagaagggaagtacatcatgtcagacctgagcccccaggagcggatgcatatctccaggttcaccgggctgtccatgaccaccatcagccactggctggccaacgtgaaataccagcttcgaaggacaggtggaacaaagttcctcaaaaacttggacactggccaccccgtcttcttttgtaacgattgtgcgtcccaaatcaggactccttccacgtacatcagtcacctagagtcacacttaggcttccggctacgggacttatccaaactgtccaccgaacagattaacagtcagatagcacaaaccaagtcaccgtcagaaaaaatggtgacgtcctcccccgaggaagacctggggacttcctatcagtgcaaactttgcaatcggacctttgccagcaagcacgctgttaaacttcaccttagcaaaacacacgggaaatctccggaagaccaccttctgtatgtctctgagttagagaagcagtagcatttgcttttgatagaaaggactgcagtttgctttgagggaaactgtggaaggcaccttcaggccccctctgacttgttgttcttggcacatgttcttattttaactgcagagaatcactctgggctggactgttttgtataactgtacagtgtttaatagaggtgcataatcagctgttgttactggtaaaatatgaaggttaaaatgcagtggtaagtgtttggaactttgtgtaaacgggatttagttgtgagcatcctcccgatgcttcaagctgcatgcattaacagacagtttaattaagcatttataacggaatcaggcacaccttttccacgagactcgagtgtgctggcatttctcaccctttcatctttagccctctgagtactttgaagcacttttgcattaatttggttaaaaaataaaataaaataataataatgtatgaagctctgttttttaaactccttaccagcttagttataatgaataatatgaacctccatttatgcaggtctgcaggggtataacacgccttgaaatttaaaagaatattattttcacattgaaacatagatgtatatattgtatagatttcagactctcttatgaaaaaaaatgtgattgtggttaaatgacctttttcttgcatttatagcaacagtgttttatgcacctgctatgctctgggcataagctgtgcctatgtatagtgtatatttctttttttcttttttttaaggtctatgggttttgttttttacatgcaaacattgtaaattatacagaagataccacagatagcatttataaagtatacagaaacattatctgaaagcaaagtatgatagtttgttttgctatacagtacatctatattgatagaggttcatgtttaaattatacatatttattagcatcatattgtcatttgttttgagcagtctgaataaacgagaccgggaaagacatccctggcaggcatcagaactattttgcacatgatttttaaaggtatttattagaaatcaaagaacactcaaaataaactcagtgctcaaagggttaagtctatttgaaaaggttaaaaaaaagaacaaaaaaaaaaaaagaacttgtactgtatttcctaaacattgataaagcctttaaaatgtttgtactgtaatactttgcttaaaagtcatgaggcattctgtgatccaacctctttcacttatttataagccctcttggttgctattccatattgtaggatgcctttctatttcaattggtaactttctgttttgttcttcctaattattctcccaagatcccacactgcagctttatctttaggcttatgaaaggtaacccgtggttaccggctctccaagtgattctgttcttctccatttttggcagttaatttgcagaagtaactgacagctgacaccatatgagaacctttgtataaaatattggcatgtaaacagcacagacaccgtaacacactctgtgccctgtttggttgttgacaatgaagcaccattatgtgactcttcatataacccttttttctacggcagcattaaaattgtctttttgctataa

SEQ ID NO: 5382 - DNA, 4075 bp, Homo sapiens
ggagccaccggaagcagcttgcaaatggcgtctccctcgctggagcggccagaaaaaggcgctggaaaaagtgaatttcgtaaccagaagccgaagccggagaaccaagatgaatcagaactccttacggttcctgatggttggaaggaaccagctttttccaaagaggacaatcccagaggacttttggaggagagcagtttcgcaactttgttcccaaaatacagggaagcttacttgaaagagtgttggccattggtgcagaaagccttaaatgaacatcatgttaatgcaaccctggacctgatcgaaggcagcatgactgtttgtactacaaagaagacttttgatccatatatcatcattagggccagagatctgataaaactgttagcaaggagtgtttcatttgaacaggcagtacgaattcttcaggatgatgttgcatgtgacatcattaaaataggttctttagtaaggaataaagagagatttgtaaaacgaagacaacggcttattggtcccaaaggatctacattgaaggcattggaactcttaactaattgttacattatggttcagggaaacacagtttcagccattggaccttttagtggcttaaaagaggttagaaaagtagtccttgatactatgaagaatattcatccaatttataacattaaaagcttaatgattaagagagagttggcaaaagattctgaattacgatcacaaagttgggagagatttttgccacagttcaaacacaaaaatgtgaataaacgcaaggaaccaaagaaaaaaactgttaagaaagaatatacgccattcccaccaccacaaccagaaagtcagatcgataaagaattggctagtggtgaatactttttgaaggcaaatcagaagaagcggcagaaaatggaagcaataaaggctaaacaagcagaagccatcagtaagagacaagaggaaagaaacaaagcatttattccacctaaggaaaaaccaattgtgaaacctaaggaagcttctactgaaactaaaattgatgtggccagcatcaaggaaaaggttaagaaagcaaagaataagaaactgggagctcttacagctgaagaaattgcacttaagatggaggcagatgaaaagaaaaagaagaaaaaaaagtaacatacccaaaactccttgactagaactatctccttttgtaaaggattttgagatatcaggcattagttgccttatttgtgagaaattttctgagggctttttttttttttggtggtggtggttgttcatagaagagtgttctttataaattatattattattgtattttttgaaaaatttatacgagaaagtggtatataagtctttgtatacattacgaccattgtgattatccattaaatccagtgtctgatgctattggttagtaatgatgtcccagcatttgatgttccctctctaatgataacaagtaaatatttaggtttatcccttttgaaagtttggttttacttttaacagtccatgaacagaaaattaaggcctctaaaatcagatcccctagttactcctctgttctgaatctggggaagtagtaaaccaaaaagacagggaaaaccagatatttagagtcgaagcagcatgcaaaaaataataatgtttttaactaatgaaggctactggagttactaagaatcacctaaaaatgtgctactgtaccttgctcattttgcagatttagaagctgaaacatgggttaggttacttactaaaagtccacctgtggcaacctgcaaataatgcttatttatactaaagatgagtttatctgatagagttaggaaatttcttcttttgagtaagagtattgctataacatatatttttttctgaaatgttttaaaatagaagtacacctaattgttattggttaaaaaaaaagccatatgtgaatgaggttggtttttgggttttttctttcctgaattgtattagtccaaaagaactaaattagggtacttgtgctgtaccaaaatggtaattataacagacagtattagaattactgaattaacaatgagaaagagagaagtgtatctgttacgtggatatatgggccagcctggatatacaacagagtagtaacctgtgaaacaaacatagaatatcctcttagacattgttcctcataatgcactgacagaattcacatagctcttaatgaaacaatttaagattgatgtacgtacgtttgacttggtctcgctgtcggttaactgtaaagttagggggaagaaagaaaaaaaattaaaagggtagacacagttgagagttttattttaaaaagctaagtcttataattatgaccattaacttgctttggctttattgcagtgactttccaagtttaattattcaaaactttttgaactgactgaattaacttggtatttttaagttgactttttacataaactttataaaccttttataaaaaggaaactataccattactataaatggaaaatcattttacacatcatacctagcaggtaataaaatttaaaaaataaaaattaaatattagaatgtgagaaatttattaaaatatagttctaaaaataagtttcttcctgagaagaatgatactgtttatgatgaatccatagtgaaaagacagtgacctctctttcatccagtctagtatatcactaaatcatcattacgatgtttggctatcaagtcattaattactgtcctcctttcactgagctttattcaaattttgacaatcagagcactgggaagaaataaattccacaactgcctttagccttctggatactttcttttataaaatagaaaccttttccacaccagttctgcagcagtcgctattagatgctcgtggtagaacccatcaatcatctggtcctctgggtactggtgagcatccctggtcttcatacctgtgagtgggctttgtggtgaattactgtaaatatgctaccctcacttttcttggcagttatgtcgatgaaatcaagagtgtgatgttctagttatttttttttatatatatttttaaatgttcaatattcaactattgaaacaaatgtacatctgtgaactagctaaaatcatcttatgtaccactaatatgcccagcacattttgtaaaacagtcctgatttggcctccaagggtatttattgaactaccagcagtatctaggagaccacgaaggaataccacgaaggaatttatgctccagtgcttgccataatttgtctgagaaggaatctgttaaataaaagcttttatcctctaacctttaccttcatcagaccttataaaaggtcaaatggtgattcttaagttttttagtcacaaatcttacttattcagtattagtgcgaagagtagaatactttcaagtaagcctaaacttacatgaaaacaaattacataaatctagctctgagaataggaaattagtgacaagatcaatctgtaagatgttgagcacttatctgaagtaaatgggtaatgagtttcacatcttataaatacaagttagcatgtgttttctcaagagtccaagggttttcattattggactacagctttaatcttctaaatgttattccccaagattaaagagcatctcaagttagatcaccaaagatcaaaagctaaaaccagaagtatttttgtcattgtggtggtggtagtgttactaattgcctagatttttaaagggaaacatttttttcactgggttgtttcgttgaaaaaaatagaagcagaaacttgcccaaagtcacagtggtcaaactggaaattgcaccaaaacttggcatactggttctgaaatccatagttttagcccttatgtatactggttaatttggaaggaagaaatatatacgttctgaagtgaagagtgagtgaaaggaagaattcagtgaatacattgataccttgatattatctgcattgtggctacatgttacttttcttcacaagagtgatataagtgaaataaagaatgattggactggga

SEQ ID NO: 5383 - DNA, 1631 bp, Homo sapiens
gttttgctggaggatgatgacagaggaatctgagaattgctctcacacaccaacccagcaacatccgtggagaaaactctcaccagcaactcctttaaaacaccgtcatttcaaaccattgtggtcttcaagcaacaacagcagcacaaaaaaccccaaccaaacaaaactcttgacagaagctgtgacaaccagaaaggatgcctcataaagggggaagactttaactaggggcgcgcagatgtgtgaggccttttattgtgagagtggacagacatccgagatttcagagccccatattcgagccccgtggaatcccgcggcccccagccagagccagcatgcagaacagtcacagcggagtgaatcagctcggtggtgtctttgtcaacgggcggccactgccggactccacccggcagaagattgtagagctagctcacagcggggcccggccgtgcgacatttcccgaattctgcaggtgtccaacggatgtgtgagtaaaattctgggcaggtattacgagactggctccatcagacccagggcaatcggtggtagtaaaccgagagtagcgactccagaagttgtaagcaaaatagcccagtataagcgggagtgcccgtccatctttgcttgggaaatccgagacagattactgtccgagggggtctgtaccaacgataacataccaagcgtgtcatcaataaacagagttcttcgcaacctggctagcgaaaagcaacagatgggcgcagacggcatgtatgataaactaaggatgttgaacgggcagaccggaagctggggcacccgccctggttggtatccggggacttcggtgccagggcaacctacgcaagatggctgccagcaacaggaaggagggggagagaataccaactccatcagttccaacggagaagattcagatgaggctcaaatgcgacttcagctgaagcggaagctgcaaagaaatagaacatcctttacccaagagcaaattgaggccctggagaaagagtttgagagaacccattatccagatgtgtttgcccgagaaagactagcagccaaaatagatctacctgaagcaagaatacaggtatggttttctaatcgaagggccaaatggagaagagaagaaaaactgaggaatcagagaagacaggccagcaacacacctagtcatattcctatcagcagtagtttcagcaccagtgtctaccaaccaattccacaacccaccacaccggtttcctccttcacatctggctccatgttgggccgaacagacacagccctcacaaacacctacagcgctctgccgcctatgcccagcttcaccatggcaaataacctgcctatgcaacccccagtccccagccagacctcctcatactcctgcatgctgcccaccagcccttcggtgaatgggcggagttatgatacctacacccccccacatatgcagacacacatgaacagtcagccaatgggcacctcgggcaccacttcaacaggactcatttcccctggtgtgtcagttccagttcaagttcccggaagtgaacctgatatgtctcaatactggccaagattacagtaaaaaaaaaaaaaaaaaaaaaaa

SEQ ID NO: 5384 - DNA, 1682 bp, Homo sapiens
cgcggccagaaacttcagtttgttggctgcggcagcaggtagcaaagtgacgccgagggcctgagtgctccagtagccaccgcatctggagaaccagcggttaccatggaggggatcagtatatacacttcagataactacaccgaggaaatgggctcaggggactatgactccatgaaggaaccctgtttccgtgaagaaaatgctaatttcaataaaatcttcctgcccaccatctactccatcatcttcttaactggcattgtgggcaatggattggtcatcctggtcatgggttaccagaagaaactgagaagcatgacggacaagtacaggctgcacctgtcagtggccgacctcctctttgtcatcacgcttcccttctgggcagttgatgccgtggcaaactggtactttgggaacttcctatgcaaggcagtccatgtcatctacacagtcaacctctacagcagtgtcctcatcctggccttcatcagtctggaccgctacctggccatcgtccacgccaccaacagtcagaggccaaggaagctgttggctgaaaaggtggtctatgttggcgtctggatccctgccctcctgctgactattcccgacttcatctttgccaacgtcagtgaggcagatgacagatatatctgtgaccgcttctaccccaatgacttgtgggtggttgtgttccagtttcagcacatcatggttggccttatcctgcctggtattgtcatcctgtcctgctattgcattatcatctccaagctgtcacactccaagggccaccagaagcgcaaggccctcaagaccacagtcatcctcatcctggctttcttcgcctgttggctgccttactacattgggatcagcatcgactccttcatcctcctggaaatcatcaagcaagggtgtgagtttgagaacactgtgcacaagtggatttccatcaccgaggccctagctttcttccactgttgtctgaaccccatcctctatgctttccttggagccaaatttaaaacctctgcccagcacgcactcacctctgtgagcagagggtccagcctcaagatcctctccaaaggaaagcgaggtggacattcatctgtttccactgagtctgagtcttcaagttttcactccagctaacacagatgtaaaagacttttttttatacgataaataacttttttttaagttacacatttttcagatataaaagactgaccaatattgtacagtttttattgcttgttggatttttgtcttgtgtttctttagtttttgtgaagtttaattgacttatttatataaattttttttgtttcatattgatgtgtgtctaggcaggacctgtggccaagttcttagttgctgtatgtctcgtggtaggactgtagaaaagggaactgaacattccagagcgtgtagtgaatcacgtaaagctagaaatgatccccagctgtttatgcatagataatctctccattcccgtggaacgtttttcctgttcttaagacgtgattttgctgtagaagatggcacttataaccaaagcccaaagtggtatagaaatgctggtttttcagttttcaggagtgggttgatttcagcacctacagtgtacagtcttgtattaagttgttaataaaagtacatgttaaact

SEQ ID NO: 5385 - DNA, 2116 bp, Homo sapiens; identical to SEQ ID NO: 1310

SEQ ID NO: 5386 - DNA, 3585 bp, Homo sapiens
gctgcagaagctgccgccacctccaatgcacaaggtgtctcatctgaaaagaaacctgagccccagggaggcggcgcggagcgaccctggcagagctggcgcaaacagggcgagaggtcgctgggcagcgttcgaggaccagagggagctcggccacagaagaccccagtgatctgatcccgggatcccggctccaagctctcctcgcattttacagatttcacccccgcgactatctccccaaaacggagcctttatatcaagagaaggtgcgggagctggggcaaccaggactttctcgggcacccaagatgcgctccattaggaagaggtggacgatctgcacaataagtctgctcctgatcttttataagacaaaagaaatagcaagaactgaggagcaccaggagacgcaactcatcggagatggtgaattgtctttgagtcggtcacttgtcaatagctctgataaaatcattcgaaaggctggctcttcaatcttccagcacaatgtagaaggttggaaaatcaattcctctttggtcctagagataaggaagaacatacttcgtttcttagatgcagaacgagatgtgtcagtggtcaagagcagttttaagcctggtgatgtcatacactatgtgcttgacaggcgccggacactaaacatttctcatgatctacatagcctcctacctgaagtttcaccaatgaagaatcgcaggtttaagacctgtgcagttgttggaaattctggcattctgttagacagtgaatgtggaaaggagattgacagtcacaattttgtaataaggtgtaatctagctcctgtggtggagtttgctgcagatgtgggaactaaatcagattttattaccatgaatccatcagttgtacaaagagcatttggaggctttcgaaatgagagtgacagagaaaaatttgtgcatagactttccatgctgaatgacagtgtcctttggattcctgctttcatggtcaaaggaggagagaagcacgtggagtgggttaatgcattaatccttaagaataaactgaaagtgcgaactgcctatccgtcattgagacttattcatgctgtcagaggttactggctgaccaacaaagttcctatcaaaagacccagcacaggtcttctcatgtatacacttgccacaagattctgtgatgaaattcacctgtatggattctggcccttccctaaggatttaaatggaaaagcggtcaaatatcattattatgatgacttaaaatataggtacttttccaatgcaagccctcacagaatgccattagaattcaaaacattaaatgtgctacataatagaggagctctaaaactgacaacaggaaagtgtgtaaagcaataaagcacattttgaaacaaacaatatgcacttcttttctgaagatgcttccgaagatttgaaaataggatccaaaacacggctgggtttcagcatccaccaatgaactgaaaggtgaataaaggacgttcatgagaaatcgactaccagctgatgaaatacctgcaaagtgctctaaaaattaaatattttgactttaagggtcctagtaagtgccacttccactaagaatacagtttgaatgtataatcagtagtgtttacaagatccaacagtgcactcatcattagttaacaaagcaaatatgttcatcactgtcaggctgcccacagcaacaccaagcatattagaagaggaaccccaggaacgcaactcagaccttgggaaattaaaccatccttgtcagcagaagccaagatggaagcagtttgagcaatgaaatccgtaagattaaacaactcaagtaaatgcttcagtcaggactctgagtctgatcatgaattttatgttttaatttatgttttttttttgtcttctggaatctcttttggtttggatattgggatgcttagaaatcctttctgagatgcatatgagtgaggaaataaactttaagtaattatttttaaagttcttatactttttaaaagctatcacacaaagacttttttttttttttttgtctcgctctgttgcccaggctggagtacagtggcgcgatctcagctcactgcaagctccgcctcccaagttcactccattctcctgcctcagcctccggagtagctgggactgcaggcgcctgccaccacgcctggctaattttttgtatttttagtggagacggattttcaccgtgttagccaggatggtctcaatctcctgacctcgtgatccacccgccttggcctcccaaagtgctgggattacaggcgtgagccaccgtgcctggccgacatttttaaaaaagttttattttgcacggctctaaacctccatgttattttccagtggtgtagaaggtaccagctaaagtgaaccactatgtaatattaggccattctaaaggaaagatgttccatgtcatcagagatggtaaaataggccgggaaaaaaaaatctttggtaccaaagattacacttgtgtttctacacagcaaaccatttttctttcatgaaaataatatattattaacatgaatatattattttgctattaatgtgaaagttgtctctaaatattttttaattttcaaactcatactttattttcatttgaaatgtttttcacaccttttgcattacataataattttgtggaagcattttgccctttagaataaatattagattgatatagctgaaatgtgacttccagttctttgatattccccttgttattcaaatagaaatatggaaatgctttatatattactgttaaatttcttagtgcagaaataacattattaatagagtattgttttcaaaacagagatgattaatttcaagaggtttaacagtgaaattgtgtcaatattttgcatttaaaatgaatttaattgaccgatattttctgtagttaaatttagtcacaatatcacatatgttcttcaagaaacacatgaaattattaataaagtaattaaaaaatttttaatgtataacagaattgaccaataggccagttttctggtaacttatgatagtagattgtttctttagaaactgggcagaagctctgcattctcacttgtactttgatttcttatttcttgggcaggcaatttgaggaaagaagaaatggcatggggaatatatatgttttgtttcttagggaaaacagtctgagaaatgaataaaaagcatgaagtacgtgtgtgtgtgtgtgtgttaccatggaaaaggatattcacagtagtacagttctcaatatttttaattagatgtcatatttttttaatatagtaaaaccttgggatatagaatattacatcttttgagaatgtatgtgtctctaagtaagtaaaatctaatgcgtataggagactgatagctaaaaatgaatggaacattaatgtacttttataattaaacctcttatctatcagaaattgtaagagaatagatacatgttttgaatgtaaagttgaaaagtctggtttacttaataaattgaaagtgatttataaaatctaaa

SEQ ID NO: 5387 - DNA, 1624 bp, Homo sapiens
ccccctcagcctctctctctctctctctttctctctctctctctctttctgtctcttcctcgctccctctctttctctcctccctctgccttcccagtgcataaagtctctgtcgctcccggaacttgttggcaatgcctattttttggctttcccccgcgttctctaaactaactatttaaaggtctgcggtcgcaaatggtttgactaaacgtaggatgggacttaagttgaacggcagatatatttcactgatcctcgcggtgcaaatagcgtatctggtgcaggccgtgagagcagcgggcaagtgcgatgcggtcttcaagggcttttcggactgtttgctcaagctgggcgacagcatggccaactacccgcagggcctggacgacaagacgaacatcaagaccgtgtgcacatactgggaggatttccacagctgcacggtcacagcccttacggattgccaggaaggggcgaaagatatgtgggataaactgagaaaagaatccaaaaacctcaacatccaaggcagcttattcgaactctgcggcagcggcaacggggcggcggggtccctgctcccggcgttcccggtgctcctggtgtctctctcggcagctttagcgacctggctttccttctgagcgtggggccagctccccccgcgcgcccacccacactcactccatgctcccggaaatcgagaggaagatccattagttctttggggacgttgtgattctctgtgatgctgaaaacactcatataggattgtgggaaatcctgattctcttttttatttcgtttgatttcttgtgttttatttgccaaatgttaccaatcagtgagcaagcaagcacagccaaaatcggacctcagctttagtccgtcttcacacacaaataagaaaacggcaaacccaccccattttttaattttattattattaattttttttgttggcaaaagaatctcaggaacggccctgggccacctactatattaatcatgctagtaacatgaaaaatgatgggctcctcctaataggaaggcgaggagaggagaaggccaggggaatgaattcaagagagatgtccacggacgaaacatacggtgaataattcacgctcacgtcgttcttccacagtatcttgttttgatcatttccactgcacatttctcctcaagaaaagcgaaaggacagactgttggctttgtgtttggaggataggagggagagagggaaggggctgaggaaatctctggggtaagagtaaaggcttccagaagacatgctgctatggtcactgaggggttagctttatctgctgttgttgatgcatccgtccaagttcactgcctttattttccctcctccctcttgttttagctgttacacacacagtaatacctgaatatccaacggtatagatcacaagggggggatgttaaatgttaatctaaaatatagctaaaaaaagattttgacataaaagagccttgattttaaaaaaaaaagagagagagatgtaatttaaaaagtttattataaattaaattcagcaaaaaaagatttgctacaaagtatagagaagtataaaataaaagttattgtttgaaa

SEQ ID NO: 5388 - DNA, 3173 bp, Homo sapiens; identical to SEQ ID NO: 2452

SEQ ID NO: 5389 - DNA, 4907 bp, Homo sapiens
tagacgcaccctctgaagatggtgactccctcctgagaagctggaccccttggtaaaagacaaggccttctccaagaagaatatgaaagtgttactcagacttatttgtttcatagctctactgatttcttctctggaggctgataaatgcaaggaacgtgaagaaaaaataattttagtgtcatctgcaaatgaaattgatgttcgtccctgtcctcttaacccaaatgaacacaaaggcactataacttggtataaagatgacagcaagacacctgtatctacagaacaagcctccaggattcatcaacacaaagagaaactttggtttgttcctgctaaggtggaggattcaggacattactattgcgtggtaagaaattcatcttactgcctcagaattaaaataagtgcaaaatttgtggagaatgagcctaacttatgttataatgcacaagccatatttaagcagaaactacccgttgcaggagacggaggacttgtgtgcccttatatggagttttttaaaaatgaaaataatgagttacctaaattacagtggtataaggattgcaaacctctacttcttgacaatatacactttagtggagtcaaagataggctcatcgtgatgaatgtggctgaaaagcatagagggaactatacttgtcatgcatcctacacatacttgggcaagcaatatcctattacccgggtaatagaatttattactctagaggaaaacaaacccacaaggcctgtgattgtgagcccagctaatgagacaatggaagtagacttgggatcccagatacaattgatctgtaatgtcaccggccagttgagtgacattgcttactggaagtggaatgggtcagtaattgatgaagatgacccagtgctaggggaagactattacagtgtggaaaatcctgcaaacaaaagaaggagtaccctcatcacagtgcttaatatatcggaaattgaaagtagattttataaacatccatttacctgttttgccaagaatacacatggtatagatgcagcatatatccagttaatatatccagtcactaatttccagaagcacatgattggtatatgtgtcacgttgacagtcataattgtgtgttctgttttcatctataaaatcttcaagattgacattgtgctttggtacagggattcctgctatgattttctcccaataaaagcttcagatggaaagacctatgacgcatatatactgtatccaaagactgttggggaagggtctacctctgactgtgatatttttgtgtttaaagtcttgcctgaggtcttggaaaaacagtgtggatataagctgttcatttatggaagggatgactacgttggggaagacattgttgaggtcattaatgaaaacgtaaagaaaagcagaagactgattatcattttagtcagagaaacatcaggcttcagctggctgggtggttcatctgaagagcaaatagccatgtataatgctcttgttcaggatggaattaaagttgtcctgcttgagctggagaaaatccaagactatgagaaaatgccagaatcgattaaattcattaagcagaaacatggggctatccgctggtcaggggactttacacagggaccacagtctgcaaagacaaggttctggaagaatgtcaggtaccacatgccagtccagcgacggtcaccttcatctaaacaccagttactgtcaccagccactaaggagaaactgcaaagagaggctcacgtgcctctcgggtagcatggagaagttgccaagagttctttaggtgcctcctgtcttatggcgttgcaggccaggttatgcctcatgctgacttgcagagttcatggaatgtaactatatcatcctttatccctgaggtcacctggaatcagattattaagggaataagccatgacgtcaatagcagcccagggcacttcagagtagagggcttgggaagatcttttaaaaaggcagtaggcccggtgtggtggctcacgcctataatcccagcactttgggaggctgaagtgggtggatcaccagaggtcaggagttcgagaccagcccagccaacatggcaaaaccccatctctactaaaaatacaaaaatgagctaggcatggtggcacacgcctgtaatcccagctacacctgaggctgaggcaggagaattgcttgaaccggggagacggaggttgcagtgagccgagtttgggccactgcactctagcctggcaacagagcaagactccgtctcaaaaaaagggcaataaatgccctctctgaatgtttgaactgccaagaaaaggcatggagacagcgaactagaagaaagggcaagaaggaaatagccaccgtctacagatggcttagttaagtcatccacagcccaagggcggggctatgccttgtctggggaccctgtagagtcactgaccctggagcggctctcctgagaggtgctgcaggcaaagtgagactgacacctcactgaggaagggagacatattcttggagaactttccatctgcttgtattttccatacacatccccagccagaagttagtgtccgaagaccgaattttattttacagagcttgaaaactcacttcaatgaacaaagggattctccaggattccaaagttttgaagtcatcttagctttccacaggagggagagaacttaaaaaagcaacagtagcagggaattgatccacttcttaatgctttcctccctggcatgaccatcctgtcctttgttattatcctgcattttacgtctttggaggaacagctccctagtggcttcctccgtctgcaatgtcccttgcacagcccacacatgaaccatccttcccatgatgccgctcttctgtcatcccgctcctgctgaaacacctcccaggggctccacctgttcaggagctgaagcccatgctttcccaccagcatgtcactcccagaccacctccctgccctgtcctccagcttcccctcgctgtcctgctgtgtgaattcccaggttggcctggtggccatgtcgcctgcccccagcactcctctgtctctgctcttgcctgcacccttcctcctcctttgcctaggaggccttctcgcattttctctagctgatcagaattttaccaaaattcagaacatcctccaattccacagtctctgggagactttccctaagaggcgacttcctctccagccttctctctctggtcaggcccactgcagagatggtggtgagcacatctgggaggctggtctccctccagctggaattgctgctctctgagggagaggctgtggtggctgtctctgtccctcactgccttccaggagcaatttgcacatgtaacatagatttatgtaatgctttatgtttaaaaacattccccaattatcttatttaatttttgcaattattctaattttatatatagagaaagtgacctattttttaaaaaaatcacactctaagttctattgaacctaggacttgagcctccatttctggcttctagtctggtgttctgagtacttgatttcaggtcaataacggtcccccctcactccacactggcacgtttgtgagaagaaatgacattttgctaggaagtgaccgagtctaggaatgcttttattcaagacaccaaattccaaacttctaaatgttggaattttcaaaaattgtgtttagattttatgaaaaactcttctactttcatctattctttccctagaggcaaacatttcttaaaatgtttcattttcattaaaaatgaaagccaaatttatatgccaccgattgcaggacacaagcacagttttaagagttgtatgaacatggagaggacttttggtttttatatttctcgtatttaatatgggtgaacaccaacttttatttggaataataattttcctcctaaacaaaaacacattgagtttaagtctctgactcttgcctttccacctgctttctcctgggcccgctttgcctgcttgaaggaacagtgctgttctggagctgctgttccaacagacagggcctagctttcatttgacacacagactacagccagaagcccatggagcagggatgtcacgtcttgaaaagcctattagatgttttacaaatttaattttgcagattattttagtctgtcatccagaaaatgtgtcagcatgcatagtgctaagaaagcaagccaatttggaaacttaggttagtgacaaaattggccagagagtgggggtgatgatgaccaagaattacaagtagaatggcagctggaatttaaggagggacaagaatcaatggataagcgtgggtggaggaagatccaaacagaaaagtgcaaagttattccccatcttccaagggttgaattctggaggaagaagacacattcctagttccccgtgaacttcctttgacttattgtccccactaaaacaaaacaaaaaacttttaatgccttccacattaattagattttcttgcagtttttttatggcatttttttaaagatgccctaagtgttgaagaagagtttgcaaatgcaacaaaatatttaattaccggttgttaaaactggtttagcacaatttatattttccctctcttgcctttcttatttgcaataaaaggtattgagccattttttaaatgacatttttgataaattatgtttgtactagttgatgaaggagttttttttaacctgtttatataattttgcagcagaagccaaattttttgtatattaaagcaccaaattcatgtacagcatgcatcacggatcaatagactgtacttattttccaataaaattttcaaactttgtactgtta

SEQ ID NO: 5390 - DNA, 2000 bp, Homo sapiens
ggcccgccgccgcgccggcgcctagcccgccgggtcagcgcggccaggcctcgccgccggccccgctcccagggtgcaccgcggctagcgctggggtgggagcgggcgagatgcgccgggcgggcggtgcccactgacctccctcggcggcccggcccgggcagcgcccgagcccaggcagccccgcccgccgcgccccgcccagcccatgggccacgggcccccaccgccgcccgccgggaggaccgagcctaagagggcagccgcctgaaggaacgcgacggcggcgcccgcagtatttttcagtgctgtacaagcgtcttgaattactctggtagcttttccagaaagacccatgacttcaccacatttctcgagttacgatgaaggtcctctggatgtcagcatggcagccacaaacctggagaaccagctgcacagcgcacagaagaacctcctgttccttcagcgggagcatgccagcacgctcaaggggctgcactccgagatcaggcggctgcagcagcactgcacagatttaacatatgagctgacagtcaaaagttcggaacagacaggagacgggacttctaaaagcagtgaattaaagaaaagatgtgaagagctggaagcccaactgaaagtgaaagagaacgaaaatgctgagttgttgaaagaactggagcagaaaaacgcgatgatcacagtgctggagaacaccatcaaggagcgagagaagaagtacctggaggagctgaaggccaagagtcacaagctgaccctgctgtctagcgagctggagcagcgggccagcaccatcgcctacctgacctcccagctgcacgccgccaagaagaagctcatgagctccagcgggacctcagatgccagcccgtcagggagccccgtgctggccagctacaagccagcgccccccaaagacaagctacccgaaacgcctcgccgccgcatgaaaaagagcctctcagcccccttgcacccggaatttgaagaggtctacagattcggggcagagagcaggaaactccttttgcgggaaccagtggatgctatgcccgaccccaccccatttctgctggctagggagtccgccgaggtccacctcatcaaagagaggcccctcgtcatcccccccatcgcctccgaccgaagcggcgagcagcacagcccggcccgcgaaaagccgcacaaggcccacgtcggggtggcacatcggatccaccacgccaccccgccgcaggcccagcccgaggtgaagaccctggcggtcgaccaggtgaacggaggcaaggtggtgaggaagcactcagggacggacagaactgtgtgaagcccgccgtgccccaccccgcgctgtccatgcactgtgagcaccactgggaaatctcagccacaccttttctgtttaatcccatgcatgccaaacacttttcacacctaccgacccattctccttctgcttctcttgccctcttcttcacaccaaaatatgatcgtgtccctgccgcagaatatgtatttcctaattgctgtggccaaacgcctgtgtgccgaatcgcttgcttctgatcccgctccgtgtaacctaagtgcgctgcaggcaaagcccaggccacggctgcgtcactactgatgttcacgatgccacacagtcacacacctaattcattctcaagtcggagcaacacataccaaccttgaccttatcctcaagctccagggcagcctggccgagcagcccctgctccctcctggagacccttgtcacctcccgagctcctcctggagacccctgtcacctcctgaccaacctttcccagggcggcaccgatcaccgagcagccgtgcgtgtatctcaaggaactaaataagatgacgctactcctcatagcaccacaacctgaatgtgtgttcatatttttttgttagttttatccaaaatgtttaagatcccaacaaactttattttctaaacctgc

SEQ ID NO: 5391 - DNA, 4479 bp, Homo sapiens
actgcgttcagctctggcggtccacagcccgaagcgcggcttaggaagttcgtgtcagcgctgcctgagctcgtcccctggatgtccgggtctccccaggcggccacccgccggctcccatcgtgacctccagccgcagcgcctcccacgccggccgccgcgcgaggggagcgctcgggcgcgccgggtgtggttgggggaaggggttgtgccgcgcgcgggctgcgtgctgtgcccactcaaaaggttccgggcgcgcaggagggaagaggcagtgcccgccactcccactgagattgagagacgcggcaaggaggcagcctgtggaggaactgggtaggatttaggaacgcaccgtgcacatgcttggtggtcttgttaagtggaaactgctgctttagagtttgtttggaaggtccgggtgactcatcccaacatttacatccttaattgttaaagcgctgcctccgagcgcacgcatcctgagatcctgagcctttggttaagaccgagctctattaagctgaaaagataaaaactctccagatgtcttccagtaatgtcgaagtttttatcccagtgtcacaaggaaacaccaatggcttccccgcgacagcttccaatgacctgaaggcatttactgaaggagctgtgttaagttttcataacatctgctatcgagtaaaactgaagagtggctttctaccttgtcgaaaaccagttgagaaagaaatattatcgaatatcaatgggatcatgaaacctggtctcaacgccatcctgggacccacaggtggaggcaaatcttcgttattagatgtcttagctgcaaggaaagatccaagtggattatctggagatgttctgataaatggagcaccgcgacctgccaatttcaaatgtaattcaggttacgtggtacaagatgatgttgtgatgggcactctgacggtgagagaaaacttacagttctcagcagctcttcggcttgcaacaactatgacgaatcatgaaaaaaacgaacggattaacagggtcattcaagagttaggtctggataaagtggcagactccaaggttggaactcagtttatccgtggtgtgtctggaggagaaagaaaaaggactagtataggaatggagcttatcactgatccttccatcttgttcttggatgagcctacaactggcttagactcaagcacagcaaatgctgtccttttgctcctgaaaaggatgtctaagcagggacgaacaatcatcttctccattcatcagcctcgatattccatcttcaagttgtttgatagcctcaccttattggcctcaggaagacttatgttccacgggcctgctcaggaggccttgggatactttgaatcagctggttatcactgtgaggcctataataaccctgcagacttcttcttggacatcattaatggagattccactgctgtggcattaaacagagaagaagactttaaagccacagagatcatagagccttccaagcaggataagccactcatagaaaaattagcggagatttatgtcaactcctccttctacaaagagacaaaagctgaattacatcaactttccgggggtgagaagaagaagaagatcacagtcttcaaggagatcagctacaccacctccttctgtcatcaactcagatgggtttccaagcgttcattcaaaaacttgctgggtaatccccaggcctctatagctcagatcattgtcacagtcgtactgggactggttataggtgccatttactttgggctaaaaaatgattctactggaatccagaacagagctggggttctcttcttcctgacgaccaaccagtgtttcagcagtgtttcagccgtggaactctttgtggtagagaagaagctcttcatacatgaatacatcagcggatactacagagtgtcatcttatttccttggaaaactgttatctgatttattacccatgaggatgttaccaagtattatatttacctgtatagtgtacttcatgttaggattgaagccaaaggcagatgccttcttcgttatgatgtttacccttatgatggtggcttattcagccagttccatggcactggccatagcagcaggtcagagtgtggtttctgtagcaacacttctcatgaccatctgttttgtgtttatgatgattttttcaggtctgttggtcaatctcacaaccattgcatcttggctgtcatggcttcagtacttcagcattccacgatatggatttacggctttgcagcataatgaatttttgggacaaaacttctgcccaggactcaatgcaacaggaaacaatccttgtaactatgcaacatgtactggcgaagaatatttggtaaagcagggcatcgatctctcaccctggggcttgtggaagaatcacgtggccttggcttgtatgattgttattttcctcacaattgcctacctgaaattgttatttcttaaaaaatattcttaaatttccccttaattcagtatgatttatcctcacataaaaaagaagcactttgattgaagtattcaatcaagtttttttgttgttttctgttcccttgccatcacactgttgcacagcagcaattgttttaaagagatacatttttagaaatcacaacaaactgaattaaacatgaaagaacccaagacatcatgtatcgcatattagttaatctcctcagacagtaaccatggggaagaaatctggtctaatttattaatctaaaaaaggagaattgaattctggaaactcctgacaagttattactgtctctggcatttgtttcctcatctttaaaatgaataggtaggttagtagcccttcagtcttaatactttatgatgctatggtttgccattatttaataaatgacaaatgtattaatgctatactggaaatgtaaaattgaaaatatgttggaaaaaagattctgtcttatagggtaaaaaaagccaccgtgatagaaaaaaaatctttttgataagcacattaaagttaatagaacttactgatattcctgtctagtggtataatatctcaggaatcttggctgagggtttggaactgtgggtagagtagagggccaggagtccagtaatagaattcttgcaccatttctggaacattctagctctgggaggtcacgtaaccttcttggggtagttcagtggtttagtggtttataatccaggtgtgcgtcagaatcatctgaggaactttgctaaaatacaaaaatctggcctaagtagctccagatctaccttcataaaggaatctgaccactcctggatttggtaatttccaagttctgaaaattttacttaggatttaataactattaacatctgtccctacataggttttctttcctacttatataccttatgttctcttcattctaaccttcatcagtaatagggaaatgttttaattttatttttttagttgaagggtaatgtaccaaaaaatatagttcagtgaattaaaatgaacacacatgtgcaaccatcaattcaggtcaagaaatagaagattgtagcacacaaaagcctactcagccattctcccagtcactacttccttccttacccctgggttatttttgaaatgacacttgatgtatttccctctgttgctgttatgagaacattgctacagccaagtgttgtgtttctgtgtgcataggttgatacttaattatctccccactttttaataaacttttaatttggaaataattttagattgacagaaaagttgcaaagatagtgaggaaagttcctgtctactctttgctcagcttcccttaatgttaacattttatatagcaagatgcatttgtcaaagctaacaagttaacattggtacaatcactgttaattaaactgcacacaatattcagatttcaccacttttccactaatattctttcattgttctaggattcaattcaggagaccacatttcatctagccctcttttttaaaagtaaatacttttcagcacttacaggagttaactgagctggggcatcatggtgtatagacgccctgacactggtcatcttggaattcatttagtttgtcagtgggtgccctgacattctgtcacaacatcaatttgggaacatggcattatatttttatctttgaacttttttctttttggatgacatttgattaatgcgtcatcttggaacacattatcttttttcttggttatgtgatcaggaagattaatcagtttttcctgttcttggtataattcctgcttttcacatacctgtcccttacagttctctatatatacccttcccttattacacagagagaaatatctatctatactttttacacaaaatatacttcaaaagaaacaaaacagccacaattattaactttttaaataaatgagaatttaattata

SEQ ID NO: 5392 - DNA, 13726 bp, Homo sapiens
gccgctccgggtacctgagggacgcgcggccgcccgcggcaggcggtgcagcccccccaccccttggagccaggcgccggggtctgaggatagcatttctcaagacctgacttatggagcacttgtaacctgagatatttcagttgaaggaagaaatagctcttctcctaagatggaatctgtggtttgggaatgtggttgatcaacttgatatgttggccaaatgtgccccatgtaataaaatgaaaagaagagacaagatgatgtcattttcccatattgtgaaaccaaaaacaaacgccttttgtgagaccaagctaacaaacctctgacggtgcgaagagtatttaactgtttgaagaatttaacagtaagatacagaagaagtaccttcgagctgagacctgcaggtgtataaatatctaaaatacatattgaataggcctgatcatctgaatctccttcagacccaggaaggatggctatgacttggattgtcttctctctttggcccttgactgtgttcatggggcatataggtgggcacagtttgttttcttgtgaacctattaccttgaggatgtgccaagatttgccttataatactaccttcatgcctaatcttctgaatcattatgaccaacagacagcagctttggcaatggagccattccaccctatggtgaatctggattgttctcgggatttccggccttttctttgtgcactctacgctcctatttgtatggaatatggacgtgtcacacttccctgtcgtaggctgtgtcagcgggcttacagtgagtgttcgaagctcatggagatgtttggtgttccttggcctgaagatatggaatgcagtaggttcccagattgtgatgagccatatcctcgacttgtggatctgaatttagctggagaaccaactgaaggagccccagtggcagtgcagagagactatggtttttggtgtccccgagagttaaaaattgatcctgatctgggttattcttttctgcatgtgcgtgattgttcacctccttgtccaaatatgtacttcagaagagaagaactgtcatttgctcgctatttcataggattgatttcaatcatttgcctctcggccacattgtttacttttttaacttttttgattgatgtcacaagattccgttatcctgaaaggcctattatattttatgcagtctgctacatgatggtatccttaattttcttcattggatttttgcttgaagatcgagtagcctgcaatgcatccatccctgcacaatataaggcttccacagtgacacaaggatctcataataaagcctgtaccatgctttttatgatactctatttttttactatggctggcagtgtatggtgggtaattcttaccatcacatggtttttagcagctgtgccaaagtggggtagtgaagctattgagaagaaagcattgctgtttcacgccagtgcatggggcatccccggaactctaaccatcatccttttagcgatgaataaaattgaaggtgacaatattagtggcgtgtgttttgttggcctctacgatgttgatgcattgagatattttgttcttgctcccctctgcctgtatgtggtagttggggtttctctcctcttagctggcattatatccctaaacagagttcgaattgagattccattagaaaaggagaaccaagataaattagtgaagtttatgatccggatcggtgttttcagcattctttatctcgtaccactcttggttgtaattggatgctacttttatgagcaagcttaccggggcatctgggaaacaacgtggatacaagaacgctgcagagaatatcacattccatgtccatatcaggttactcaaatgagtcgtccagacttgattctctttctgatgaaatacctgatggctctcatagttggcattccctctgtattttgggttggaagcaaaaagacatgctttgaatgggccagtttttttcatggtcgtaggaaaaaagagatagtgaatgagagccgacaggtactccaggaacctgattttgctcagtctctcctgagggatccaaatactcctatcataagaaagtcaaggggaacttccactcaaggaacatccacccatgcttcttcaactcagctggctatggtggatgatcaaagaagcaaagcaggaagcatccacagcaaagtgagcagctaccacggcagcctccacagatcacgtgatggcaggtacacgccctgcagttacagaggaatggaggagagactacctcatggcagcatgtcacgactaacagatcactccaggcatagtagttctcatcggctcaatgaacagtcacgacatagcagcatcagagatctcagtaataatcccatgactcatatcacacatggcaccagcatgaatcgggttattgaagaagatggaaccagtgcttaatttgtcttgtctaaggtggaaatcttgtgctgtttaaaaagcagattttattctttgccttttgcatgactgatagctgtaactcacagttaacatgctttcagtcaagtacagattgtgtccactggaaaggtaaatgattgcttttttatattgcatcaaacttggaacatcaaggcatccaaaacactaagaattctatcatcacaaaaataattcgtctttctaggttatgaagagataattatttgtctggtaagcatttttataaacccactcattttatatttagaaaaatcctaaatgtgtggtgactgctttgtagtgaactttcatatactataaactagttgtgagataacattctggtagctcagttaataaaacaatttcagaattaaagaaattttctatgcaaggtttacttctcagatgaacagtaggactttgtagttttatttccactaagtgaaaaaagaactgtgtttttaaactgtaggagaatttaataaatcagcaagggtattttagctaatagaataaaagtgcaacagaagaatttgattagtctatgaaaggttctcttaaaattctatcgaaataatcttcatgcagagatattcagggtttggattagcagtggaataaagagatgggcattgtttcccctataattgtgctgtttttataacttttgtaaatattactttttctggctgtgtttttataacttatccatatgcatgatggaaaaattttaatttgtagccatcttttcccatgtaatagtattgattcatagagaacttaatgttcaaaatttgctttgtggaggcatgtaataagataaacatcatacattataaggtaaccacaattacaaaatggcaaaacattttctctgtattcattgttgtatttttctacagtgagatgtgatcttgccaaagccaccagaccttggcttccaggccctcctgtagtgagttgattgtctgcacttgccttgcccaatagccagtaggctacagcttttgccccacacccttattttcagattctggatcattcttgtttacaactgaaatatatataacctcagtccaaagtggtgattgatttgagtatttgaaaattgttgtagctaaatgaagcatgattagtcttagtatgaatatcatttaatctttaaaaaatcaagtaaaaatgtttatctgataatgtttaaataatttacaatataaactgtaaaacttattaggcatgaaatcaatcagaagagaaagaaaaatgctggaacatgcttgatgtattatgtaaaaagcatatttaaacaagggtcctcaaccctgactgcagataagaatcacttgggttacttcagatgcctaacaccttcctctcatacaaataagaattggtagctttcttaaaaaaaaaaaaaaaaaaaaaaagcgctccaggtgattctaatctgcagcctggcttgaaactcactactttaacttgcccctgatgatctgtcggcatcatatatcacatgaacatccacatggattctgtctttcgcttttatatcattatctaatattcagttgttctgcacctgatgccaaattctgggctgtactcctagagagacttactcagtaaggccaaagtgataggactttaaaatctgtagttataaaaataccgcaggtgattcttacggaggtaatccaagaatcatactttgaagaattattctagactctgaagaggcctggctctgccttatgctattatagtttatgacctttaacaatttaactctccgagcctcagttcccttgtttgtaaatgaagatagaagataaatacgtactctacctacctcacaaagctgtcagattaagatcaagtgaaaaaaattatgtgaaagctctttgaaaactgtaaagcattatgaatgataagggattaggttattgtggatttaagaggtgtgaggactgctatagtacattccttgacgtgtgttgaattcatgtatactttctttcttaccctttaaaacaaactgccaagaaattaggtgttgaaaaagaatattctcatcaggcagcaaagtcagttttctgatagtaataatttgtctattatgttatatatttcaaagtacatgtatgataatatgacttattcttcatgagagatatttgaatatttggcccaaaatgtttttcatttttctctgtgttcattgcctttctccttggagctggagttaatgctcaaagcaggcaggtctgaattccctcataaccgacaattagtaaacattttctctgaaagccaaacatataacaacttatttatcaataattcatgaagcttttgtctgagaatctctcctgcaaacagcatgagagaactaaaacaaacattcacaaacaaaaataagttaaaatagaaggtaccagtttgggctcgaagatgttgtcatccattgccatctgcattatattatcaactgccaaaatgttaattggttttcttttacaagtgggccaagtatagacagttaagtgaacatcactatgaaaatcttaactttgtgcttctagatttttagataatcatttgtattttctctattaaattgtgggtatgtatgggaatactatattgacttttcagttactttcagtaagtatcttaattttgtcccacaaaatttatgtaatattaatccatggttttaaacaacagtattcagtttgggcagcagttttaagtctaactagcttaaaccaatctgaataagtctggacagttttcctaccatatgtttaactttgattggcatatgataatgtttagtgttttcttttttcagttgacaactgagaaaataatagttctctctaacatgttaatatattatcaaaaggttttcaaaaagtactttgatttcagcaactttttttattcaataactagacaaaagatctaagataatattaaactcaaaacagtttgtttcaaagaacaattggttaataactcagctggcacagggattcatacacagtttttcaataaatatttaaatgaacaattcatgtcacacaacttgcttttaccctagtactgagtctcacatcaaagaaatttgaaagatctataacctatgtgaaatgaagtctctgctttaccagaataatatgtggcaggtaataaatatgtaaagtacaccaaatgaaacatattttgcatagataacagtccatatcactattataattaaagaaatatatgtacagacatgtaccaatccttttaattaattttagaagatgaacagtgattcttagaagtgagtaattagactccttttagtcttatgctgttagatctttgtggaccagctgagtaaatgaatcttcaaatcaacctttctttttctgctgctcttagagcagatttataaaaatcctaagaatgtcttcaaattagaaaaatttactacattttaacctacctcatcagtttctttgtgataatagctgaaaataactcaaactgtacccatcttagttaggctatatctctgtgaaatgaaaggaaccacttaattttttttatataaattagtgaatcatttgctggagcttagaaaatattaacataccaaaatttcattatgatgatatttatattgctttttgacatgccaaaggtacatttacatattaccatatttggatgacttacatagtctggtgtaatgaaaattcccctgggattggaattttaagactcatgatgtcaactgggctggtcattttatttctctgagtctttgtttcttcaatgtaaaatgtggataaggtaatttttggttttagcctccctcactggatattgtaaggatcaaatgaaatagtatttattataatgctctgtaacccataaattattctacttaaaaaaattttttatagagacagggtcttgctctgtcacacaggctggagagcagtggcataatcatagttcattataaccttgaactcctaggctcaagcagtcctccagcttcagcctcccaagtagctaagactgtaggcatgcaccactacacctggctaattttaatttttttttctttttttgagacggagtctggctttgttgcccaggctggagtgcagtggcacaatctcagctcactgcaacctccacctcccaggttcaagtgattcttctgtctcagcctcccgagtaactgggactacaggtgcgtgccaccacatccagctagtttttgtatttttagtggagatggagttttgccatgttggtctcaaactcctgacctcaagtgatctgcccacctcagcctcccaaagtgctaggattacaggcatgagtcactgcacctggcttaattttaatttttttaattttttgtagagatgagtctcactatgttgaccaggctggtcttgaactcctggcctcctaaagcactgggattacaagcatgagccaccatgcctgatccataaattgttctactgataccatttggttttgttagaatttgggggggctatagaaaacaaggttacagtcttcattagtatttctttttagcaataacaacaaaataggcaattagaccagtgttcatttggtacagtctttaaatcggtcatccaattaacctttaaaaagtaggttatgctcttaaattgtattggttctttaatatgtgttataccagagtatgcctcaaattttatgtagttgaatttgtagaacaaatttggggatattcattttatttttccttttatatgaaattgtataagtacattagcttgacttaaattataaaaaaaaatatatatgaagaagaatgtagaccctataatgttttttgtctttgactttttggcttttatgtacctcattttttctgattgagaaaaagttttgaaaaagtgattcacttgttggttttcattgtggcaaaactttaaattttaagtcatcacactatgagaattgtttgtacacatttataatttttttaaagtatgtaaagtaaggattttttctccattcttcactcacaaaggatagcatttttatggaacctagatttacaaaggaacttgtgattcttttcaatgcttttgtgtcgttttacagctgattaagaaaaaatgtttacatttaattcagctgtatttcctagtagctgtataatcttacacattattcttatataattttgacctattttatatgaaaataattgtattggcatctcttcataatttaattctcttctctccttcttttgttccgattagatgaatttgggaaaggagtaggaagactaggtatcgcatgccttccgtctgattgtaatcagtctcctgggttttttactaatttaatcttaatcctgtgcttctttagtcatcaaattgatataggattacaattttctctcaggatccaagtcttctaagaatgaaaatgttgaagtctacccagaaccagccatccttgtagacatttctatttggttgatttataaagatttaatatataaagatttaatatgagttaaacatgtttcttattctgtgatctctaattagaaagtaaaattctgttgccataaatataaaagaaagttttcacttatattttagtcaaacaccaaaccactgcattacttacttcctataagacacagtagttcaatctgttgaaaggcattgaaggataatttccttcagattactttttaaatcatcatctgcctcaggaaattctttcttgaatttttttgttggtgtgaaagcgttgcttatactttatgctcattttattggtcactgtcaccagtttttcccgataaagattaaaaatgttttttaccttgaaataattcagattttgaagattcactgtttcattattttgctaattaccattaactagtaaagttagtttttaaagtttttttaaggttgatattttatcatattcctggagtaggatggattactttattattattgtagctttaaggttttttgttgtataagtcagcttgtttgtatatgctaaattgcagatatttctttgtgttgtgcttattggtttttttttttaacttagagcttaataatttctattttctatcctggagtctaaaattaaacaaaaaaatctattttctaaattggcaggatttttttaatgattagtaaaactgtattattttatttttaaaaatacaataggattttgagtcaggaaacttgacttctactcttgcctctcttttgcagttagctgtgtaactttggataaggcattttatctcgtggtgcctccatttttctcattctctagggaacaagagaattagtttaggtagcgtctaaaattccgcccagctctcatttggttctcatttgaccattttataatcattattttggtctcatttttattcttcttattcatcccatgaactagatcaacttgtattattttactagatcaacctgtattattaacgtcatttacatgtaaattgatgggattcagatattttatcaactgtttttccattagtgattttaagtaattttaaagaaggaaaattatattacagataataaaaatgaaagaaagttataaatattggacatggcttttttaaatgggaaagtcttcttaagcaccaatataagcaccttaaattgatacatagaaaagaatgacataacgttttgtggtctttgttctcttaaatatgaatatagctagttagcctaaaatttacacaaaatgtattcaagatcaaattagtgaacaaagcaatggttcgtatggctaatttaaaagcaattcaatttaccaatattaaaataattataaaatgtaaaagaaatttcagaggagttgattgaaaattttttgttcagtaattattcttaaactgcattcttaggtttattacataaatatagttgccagattgccatgggcaagtgaatgtcttcatttgaaatattattagagatcaatgtggcttgttatttttaatttttttctggctatacagaaaatgtttctggaaaaattccttaattgtcatctgatataatgtagagattgaggccagacgcagtggctcacgcctgtaatcccagcactttgggaggccaaggtgggcagatcacctgaggtcaggagttcgagaccagcctgatgaacatggcaaatccccttctgtactaaaaatacaaaaattagccaggcgcagtggctcacgcctgtaatcccaacactttgggaggccgaggcgggcggatcacgaggtcaggagatcaagaccgtcctggctaacatggtgagaccctgtctctactaaaaacaaaaaaattagttgggcatggtggcgggcacctgtagtcccagccactcgggaggctgaggcaggagaatggcgtgaacccgggaggcggagcttgcagtgagctgagatcgcaccgctgcactccagcctgggcaacggagcgagactctatctcaaaaaaaaaaaaagaaaaaaaaaaaagtagagattgcattagttccatatctccgcagagttctctggtagattaaatgttctctgtgcactaggccaaggaagttcctgttacctttgaaaatcattgtgtttgctctgattgtctacattagctcatatcagtcttttgaacactggttcaaatctgggtgttgggttaggatctgatgagtagagaatagtggaaagttgatataggaaggtatactggtttctggtgtgattctttagctacatttattccttgtcttatgtcatttcactggatcatgtaactgtcctggctttcagaaattatattagatgcccagcctttctcattcagagatgcctgtattattatgttatttcgattgcctaccaaaaaaaaaaaaaaaagaaaaggtttgtttttagttctctgcctctgcaagtctttgtgatcacatttgttaaattgaatctgagattcaaatatttcatttaatattttctgggttttgataatgggatattctgtaagataaagcaagtaatcctagagtgatttactttatgtttagccatccaccattttcctatttctctactcctcccattctccatttttaaaaggaaattaacaaatgtcttcctttatccctgcctcagataatttttccctgaactcatcttgtcagcagaaacatttaatgtgaaataattctgtatttctgagacaagatcaacacagtagttctttacattgagctgaggtgaatgtatacttaaaaatactctattttctttttatatgaacttaaaatttttaaaatcatatatgggactccccaatgtgaaaatattagtctggacattctcttgccatcaggtgctatttctaccttagctgtgagttagactaaatccaaatttcgtatcattcatctttttataatatttaacttccctagaatcaccccatttcatgtctttaaccccaacttccaacaacttttctgcttttattttcaaatgtcaaattgtatttttgtgttttattttctcattgaagtgtaaaagtatcacatatatgaaggaatggctggtttagacatttactttggcatagtaaagattgatattgataccacccaccatcctttcctctagccccagaaagaaaagtttgacaactcaaaaacgattaaattatcttatcttgttatttaatagaacaatggaagctgtttcgtcaaaattaaaatactttaccaaaaaaatacttttttgtattttaatctgatagtgaatttggggattatttatgtaaatgtatcataattaatagtaattatgagttatttcactctctgtaatttgtgatacccaagattcatatttatttaatgtgaggtgttttttgaggcttttttgttttatcttgttttcttaactttttacagtgttgttagattatcgcggtcatctcggcatgtggatcgctcctcctgtagatcagctgttctctcttagagtcaggacaaggaggtttttgctacatggtcgtagttggataatacagcattattctgaactatctgaaattgctggttttattggtcaaaaatgatcagatgctagcaatttcataatagatatattcaagaaggaaccaaactttaaaagatcttttagaataggtatgttaacttctcatcctaaccctatcaatatatcagaggctttatgaaggagactctacagataaccacaaatcttatcaagaaaattctccttaaaaaaagttatcctttattttgttgttaaatttcccagtttttaaaagtgttttatcaaaatgacttcataattgaagcaaataccttttggaagtatatatgttacataagactttcactaaatctgtgcgtaaagcttttataatctgagatattgttatgtattaggtttgtgcaaacctaatataaaagggttcatctgtaagtatcatttagaggcaaaataatttccccctcacatctaatgtggactcaaattttggcaactggaatgttatcctcttggtaggcattctaaattaatgaatactgctatgtggtgtagtaaacaaatttgccataaaatgccatttaaggattttctttttacctttatttcattataaaagtatatgagttgaagatcatataaaaaatatgaaactcctacacaggaaatccccaattttgtgatttaataggttgtaaaaagagttgttccaaattcagactacatctcatcatataaataatattatgaataataagggtaaaagattagccaacaaaagctaatctagtacaccccatagaggtactccaggtgtcttggttttggataaatttttatagtggagaaaggttactttgatctctcaataattgcttggtacacttcttcctaggcaatatgctcatgataccctcttcatgtgacctattcctcaaatgctgcattctccaaaacttccttacctgccttctatcccctagtcattcttatcaatacttccaaaatataacctatctcaagtgttagaaatttgctttaactaatttatattaaagtgttagtgactatagcccttttatctctcttaaagagaaatctgcattaaaagcaaacacattgctgttagctcaaattaatgtcagtgagtagaatcttaagctttaaaacaaaagtggaaataatttaaattagtgttgatgggactattttgaggcaagagataccattaagtgacctagcttggaaatctgccccctttgcccaaacccatgtgatgtctgaaactactgtatattttcaatgaccttgagaaagggagctagtcatttgtatttatgggccttatgaagtcagggcctgctgatcctgttttttaagttcaagcgcaatgcctgaagcatcctagatctccttcaccctcattctacctgacagacagctaggtctgtcttccagctctttctcattgatactacctttacatatgaatactatccatgcttgttaaaaaaaaaaaaagtctttccccattttactgttacaatttttcaagagctataaaggtagaaaaagtattccttttcattattctaaaaaatatgtcatttttaaatagctggcacttagcagtttagttttccaaactttattctgaatcaaattgctgaggtgattctaaatgtctaatgttgatttatcatataaacatctaattagaaagtgtttatgctaaagacttgtattttgtggcattagttcttcatgtttcttttttatatgtttattaaaattgttcacttccaaatgagtggaaaagttgctgttgttgggatgtacagggcaagtgcacttggttagagcatgaactgggaatttcacattctctgatgtgctttgcactctgctcttgtagatttattttgtttacagtagactgatgtcagtttttgtaaatgttttttcttagcactttaactgtgagtgtacaaactgattttaaatgtagtggttgtatattttggttataaattggagatttttaataaaattaaataattctc

SEQ ID NO: 5393 - DNA, 5537 bp, Homo sapiens
gctgagcgccggaggagcgtaggcagggcagcgctggcgccagtggcgacaggagccgcgcgaccggcaaaaatacacgggaggccgtcgccgaaaagagtccgcggtcctctctcgtaaacacactctcctccaccggcgcctccccctccgctctgcgcgccgcccggctgggcgcccgaggccgctccgactgctatgtgaccgcgaggctgcgggaggaaggggacagggaagaagaggctctcccgcgggagcccttgaggaccaagtttgcggccacttctgcaggcgtcccttcttagctctcgcccgcccctttctgcagcctaggcggcccgggttctcttctcttcctcgcgcgcccagccgcctcggttcccggcgaccatggtgacgatggaggagctgcgggagatggactgcagtgtgctcaaaaggctgatgaaccgggacgagaatggcggcggcgcgggcggcagcggcagccacggcaccctggggctgccgagcggcggcaagtgcctgctgctggactgcagaccgttcctggcgcacagcgcgggctacatcctaggttcggtcaacgtgcgctgtaacaccatcgtgcggcggcgggctaagggctccgtgagcctggagcagatcctgcccgccgaggaggaggtacgcgcccgcttgcgctccggcctctactcggcggtcatcgtctacgacgagcgcagcccgcgcgccgagagcctccgcgaggacagcaccgtgtcgctggtggtgcaggcgctgcgccgcaacgccgagcgcaccgacatctgcctgctcaaaggcggctatgagaggttttcctccgagtacccagaattctgttctaaaaccaaggccctggcagccatcccacccccggttccccccagtgccacagagcccttggacctgggctgcagctcctgtgggaccccactacacgaccaggggggtcctgtggagatccttcccttcctctacctcggcagtgcctaccatgctgcccggagagacatgctggacgccctgggcatcacggctctgttgaatgtctcctcggactgcccaaaccactttgaaggacactatcagtacaagtgcatcccagtggaagataaccacaaggccgacatcagctcctggttcatggaagccatagagtacatcgatgccgtgaaggactgccgtgggcgcgtgctggtgcactgccaggcgggcatctcgcggtcggccaccatctgcctggcctacctgatgatgaagaaacgggtgaggctggaggaggccttcgagttcgttaagcagcgccgcagcatcatctcgcccaacttcagcttcatggggcagctgctgcagttcgagtcccaggtgctggccacgtcctgtgctgcggaggctgctagcccctcgggacccctgcgggagcggggcaagacccccgccacccccacctcgcagttcgtcttcagctttccggtctccgtgggcgtgcactcggcccccagcagcctgccctacctgcacagccccatcaccacctctcccagctgttagagccgccctgggggccccagaaccagagctggctcccagcaagggtaggacgggccgcatgcgggcagaaagttgggactgagcagctgggagcaggcgaccgagctccttccccatcatttctccttggccaacgacgaggccagccagaatggcaataaggactccgaatacataataaaagcaaacagaacactccaacttagagcaataacggctgccgcagcagccagggaagaccttggtttggtttatgtgtcagtttcacttttccgatagaaatttcttacctcatttttttaagcagtaaggcttgaagtgatgaaacccacagatcctagcaaatgtgcccaaccagctttactaaagggggaggaagggagggcaaagggatgagaagacaagtttcccagaagtgcctggttctgtgtacttgtccctttgttgtcgttgttgtagttaaaggaatttcattttttaaaagaaatcttcgaaggtgtggttttcatttctcagtcaccaacagatgaataattatgcttaataataaagtatttattaagactttcttcagagtatgaaagtacaaaaagtctagttacagtggatttagaatatatttatgttgatgtcaaacagctgagcaccgtagcatgcagatgtcaaggcagttaggaagtaaatggtgtcttgtagatatgtgcaaggtagcatgatgagcaacttgagtttgttgccactgagaagcaggcgggttgggtgggaggaggaagaaagggaagaattaggtttgaattgctttttaaaaaaaaaagaaaagaaaaagacagcatctcactatgttgccaaggctcatcttgagaagcaggcgggttgggtgggaggaggaagaaagggaagaattaggtttgaattgcttttttaaaaaaaaagaaaagaaaaaaaaagacagcatctcactatgttgccaaggctcatctcaagctcttgggctcaagagatcctcccacctcggcctcctgagtagctgggactgcaggtgtgtgtcatcatgaccaatgtgaattgcttttgaagctggttcatgggcatgtaggccaccgaagcaattttagaccacagtaagtcaagcttttttccctccgatgatcactgggtggttgcagcattttttgcataaacctgcctaagacttgtctatcgtctgtgatcaatatgccatattacactaaggtgctcctggaaaattgggtgcagttcaaattttcctacagcaaatcatttggcaaggccagccattggggaaaccagacaactagagataaccctgaaatgaatccttttgtaaattgaagcaccatcttttctttttttgcataaattggaggttttaattttagggcagttacctgaagtgaaatataccaacaatttcttgtgttctttaaattcctagttaggtgaatatttttgaaggtcctcttttgaataaagaggggaatggacaccacatttcaggtcttctcgaagtgtggaagggcaagagagcatcagtgagctgatggtggattgcttacatcggattccattggtatgaatttcccaaactggaaatcaaagcgccagggtggggttggggctgactgctggtgagggggctggccgctggctcccgtgacgtgcgtcatgggcacgcaggcgccattttgaatctatcgtcggcacgtgggtgccattttgaatccttagttgggcctttctaaatggagaatggctttggagggagacacgttttctgtggggagggtttgggggggagggaggagggaacaagctacatgctattttgtttgtagtattgtggaacagtcttgttatggagtgccagcttagaggttgttgcaaacttgtctagaagtgagagcatggttttttttagccctttgagagtctacatctaatgaacattcttgctcacccataaataacgtcaagcctcaatgtcaccgtcacgttgggatactctttctcatctggcatcctagacaggacaaggttggttacctttccttccatgaaccatgaacctgtgacggcatcattcatcctgacttcaccaagctccgcctgtgggtgaggccagagctcccactggcaatttttagaagagccagaggctccctgcttcctctagaaataacagttcagggtgaagcatggagggtttcagttcccagacaatggaaccatttagagacaacacagttggacatttccactttttccttgattcctggaagtccagtgggttctgcagctgaaaaagccctgggtcccagcagcagagagacaggacagaggggatgcttgggcggggagggacggtaacctgcagaacagattccatttttatagaacgagtacacgtttgctaaaacagtcctgctttcccagactggattcccaccacagggacagtcggaactcaggactagctccagcgacatctttcctccgaattcaagccttctatcacaatgtcaaaacagctatttataaagccattttcattgtacttgataacagcacgagtcccaaaacttttagaaataaaataggacattggcttgattgaaaagagggactttttaaaaattgttctttcgtcagaagccttttggatgacttacaatagctctgatgaagataccaccccagcgtcagtccaataggtcagtgagtttcaacaggcatccatccctcccatgaagggattctggtgatgggaagtttctgtaatgacaggaaagcattgaccctcattgattgtcaactttggtattagccatgaaagacaggatgctcattgggtgttctgtagagtgaggaatgctgcctattccctcccagaacgtctgacccaggggtgtgtgttgaggagccctgggggaaatggaccaagttttcccacagagcagtattaggctgaagagcaggtgactggtaggccccagctcccatcattccctcccaaagccattttgttcagttgctcatccacgctggattccagagagttttccaatttgggaagccatgagaaaggtttttaaatcttgggaagatggagagagggacataggatagttgactccaacatgacaggaagaggctggagattgggaattggccatcaaccaagcctgtagtagtaaagccatggtcccgcattggaattacttggggaacttatacagttctgatacccaggctctcctagaccagttcaaccaattctaggtgggggactcaggcatcagtgtgtttcgtagctccccgggtgttttccctgtgcagccgagcttgggaaactgccatgctttttggatgtcaaggcgctgttggaggctgggtgtgacagcacagagccaggttgtcttgtggaaaccacagccacgggtttgccactggctcagcatggcctcactgccagtcccagcctggctgagggacaagatggtttctcttgggagttcctgagtggagcacccttccaggctttttgaaagccagctgatctgtggagccttgttaagggactcaatacggtgtttggatattgatgtttttccttgagactgtcttgtccatcaataaagatggaggatgtctcctctttgaaccccgcttccccaccagtactctctctcccttagagtttatgagttattcaaggaggagacttcttaaagacagcaacgcaattcttgtaacttgtgtaaatagccccatctttcagagtgataccatttctacatttgataatgcctgtattcctgtaggatgtatatagtttaggggattttttttttgtttggttttgttttttagaagtcaatatgtctggttttatttattgcttgaaaaagatcatttgaaaaaaataaatacattttcaacca

SEQ ID NO: 5394 - DNA, 1509 bp, Homo sapiens
agctgagccatgtacttcaaacagaaggcagccaattactaacttctggttgctaggtgtggcttcctttaaaatcctataaaatcagaagcccaagtctccactgccagtgtgaaatcttcagagaagaatttctctttagttctttgcaagaaggtagagataaagacactttttcaaaaatggcaatggtatcagaattcctcaagcaggcctggtttattgaaaatgaagagcaggaatatgttcaaactgtgaagtcatccaaaggtggtcccggatcagcggtgagcccctatcctaccttcaatccatcctcggatgtcgctgccttgcataaggccataatggttaaaggtgtggatgaagcaaccatcattgacattctaactaagcgaaacaatgcacagcgtcaacagatcaaagcagcatatctccaggaaacaggaaagcccctggatgaaacactgaagaaagcccttacaggtcaccttgaggaggttgttttagctctgctaaaaactccagcgcaatttgatgctgatgaacttcgtgctgccatgaagggccttggaactgatgaagatactctaattgagattttggcatcaagaactaacaaagaaatcagagacattaacagggtctacagagaggaactgaagagagatctggccaaagacataacctcagacacatctggagattttcggaacgctttgctttctcttgctaagggtgaccgatctgaggactttggtgtgaatgaagacttggctgattcagatgccagggccttgtatgaagcaggagaaaggagaaaggggacagacgtaaacgtgttcaataccatccttaccaccagaagctatccacaacttcgcagagtgtttcagaaatacaccaagtacagtaagcatgacatgaacaaagttctggacctggagttgaaaggtgacattgagaaatgcctcacagctatcgtgaagtgcgccacaagcaaaccagctttctttgcagagaagcttcatcaagccatgaaaggtgttggaactcgccataaggcattgatcaggattatggtttcccgttctgaaattgacatgaatgatatcaaagcattctatcagaagatgtatggtatctccctttgccaagccatcctggatgaaaccaaaggagattatgagaaaatcctggtggctctttgtggaggaaactaaacattcccttgatggtctcaagctatgatcagaagactttaattatatattttcatcctataagcttaaataggaaagtttcttcaacaggattacagtgtagctacctacatgctgaaaaatatagcctttaaatcatttttatattataactctgtataatagagataagtccattttttaaaaatgttttccccaaaccataaaaccctatacaagttgttctagtaacaatacatgagaaagatgtctatgtagctgaaaataaaatgacgtcacaagacaa

SEQ ID NO: 5395 - DNA, 1863 bp, Homo sapiens; identical to SEQ ID NO: 165

SEQ ID NO: 5396 - DNA, 2723 bp, Homo sapiens; identical to SEQ ID NO: 2509

SEQ ID NO: 5397 - DNA, 4575 bp, Homo sapiens
gcggggttcctgacgcagctgcgggcggcgggcggcgcgcacactgctcgctgggccgcggctcccgggtgtcccaggcccggccggtgcgcagagcatggcgggtgcgggcccgaagcggcgcgcgctagcggcgccggcggccgaggagaaggaagaggcgcgggagaagatgctggccgccaagagcgcggacggctcggcgccggcaggcgagggcgagggcgtgaccctgcagcggaacatcacgctgctcaacggcgtggccatcatcgtggggaccattatcggctcgggcatcttcgtgacgcccacgggcgtgctcaaggaggcaggctcgccggggctggcgctggtggtgtgggccgcgtgcggcgtcttctccatcgtgggcgcgctctgctacgcggagctcggcaccaccatctccaaatcgggcggcgactacgcctacatgctggaggtctacggctcgctgcccgccttcctcaagctctggatcgagctgctcatcatccggccttcatcgcagtacatcgtggccctggtcttcgccacctacctgctcaagccgctcttccccacctgcccggtgcccgaggaggcagccaagctcgtggcctgcctctgcgtgctgctgctcacggccgtgaactgctacagcgtgaaggccgccacccgggtccaggatgcctttgccgccgccaagctcctggccctggccctgatcatcctgctgggcttcgtccagatcgggaagggtgatgtgtccaatctagatcccaacttctcatttgaaggcaccaaactggatgtggggaacattgtgctggcattatacagcggcctctttgcctatggaggatggaattacttgaatttcgtcacagaggaaatgatcaacccctacagaaacctgcccctggccatcatcatctccctgcccatcgtgacgctggtgtacgtgctgaccaacctggcctacttcaccaccctgtccaccgagcagatgctgtcgtccgaggccgtggccgtggacttcgggaactatcacctgggcgtcatgtcctggatcatccccgtcttcgtgggcctgtcctgcttcggctccgtcaatgggtccctgttcacatcctccaggctcttcttcgtggggtcccgggaaggccacctgccctccatcctctccatgatccacccacagctcctcacccccgtgccgtccctcgtgttcacgtgtgtgatgacgctgctctacgccttctccaaggacatcttctccgtcatcaacttcttcagcttcttcaactggctctgcgtggccctggccatcatcggcatgatctggctgcgccacagaaagcctgagcttgagcggcccatcaaggtgaacctggccctgcctgtgttcttcatcctggcctgcctcttcctgatcgccgtctccttctggaagacacccgtggagtgtggcatcggcttcaccatcatcctcagcgggctgcccgtctacttcttcggggtctggtggaaaaacaagcccaagtggctcctccagggcatcttctccacgaccgtcctgtgtcagaagctcatgcaggtggtcccccaggagacatagccaggaggccgagtggctgccggaggagcatgcgcagaggccagttaaagtagatcacctcctcgaacccactccggttccccgcaacccacagctcagctgcccatcccagtccctcgccgtccctcccaggtcgggcagtggaggctgctgtgaaaactctggtacgaatctcatccctcaactgagggccagggacccaggtgtgcctgtgctcctgcccaggagcagcttttggtctccttgggccctttttcccttccctcctttgtttacttatatatatattttttttaaacttaaattttgggtcaacttgacaccactaagatgattttttaaggagctgggggaaggcaggagccttcctttctcctgccccaagggcccagaccctgggcaaacagagctactgagacttggaacctcattgctaccacagacttgcactgaagccggacagctgcccagacacatgggcttgtgacattcgtgaaaaccaaccctgtgggcttatgtctctgccttagggtttgcagagtggaaactcagccgtagggtggcactgggagggggtgggggatctgggcaaggtgggtgattcctcccaggaggtgcttgaggccccgatggactcctgaccataatcctagccccgagacaccatcctgagccagggaacagccccagggttggggggtgccggcatctcccctagctcaccaggcctggcctctgggcagtgtggcctcttggctatttctgtgtccagttttggaggctgagttctggttcatgcagacaaagccctgtccttcagtcttctagaaacagagacaagaaaggcagacacaccgcggccaggcacccatgtgggcgcccaccctgggctccacacagcagtgtcccctgccccagaggtcgcagctaccctcagcctccaatgcattggcctctgtaccgcccggcagccccttctggccggtgctgggttcccactcccggcctaggcacctccccgctctccctgtcacgctcatgtcctgtcctggtcctgatgcccgttgtctaggagacagagccaagcactgctcacgtctctgccgcctgcgtttggaggcccctgggctctcacccagtccccacccgcctgcagagagggaactagggcaccccttgtttctgttgttcccgtgaatttttttcgctatgggaggcagccgaggcctggccaatgcggcccactttcctgagctgtcgctgcctccatggcagcagccagggacccccagaacaagaagaccccgcaggatccctcctgagctcggggggctctgccttctcaggccccgggcttcccttctccccagccagaggtggagccaagtggtccagcgtcactccagtgctcagctgtggctggaggagctggcctgtggcacagccctgagtgtcccaagccgggagccaacgaagccggacacggcttcactgaccagcggctgctcaagccgcaagctctcagcaagtgcccagtggagcctgccgcccccgcctgggcaccgggaccccctcaccatccagtgggcccggagaaacctgatgaacagtttggggactcaggaccagatgtccgtctctcttgcttgaggaatgaagacctttattcacccctgccccgttgcttcccgctgcacatggacagacttcacagcgtctgctcataggacctgcatccttcctggggacgaattccactcgtccaagggacagcccacggtctggaggccgaggaccaccagcaggcaggtggactgactgtgttgggcaagacctcttccctctgggcctgttctcttggctgcaaataaggacagcagctggtgccccacctgcctggtgcattgctgtgtgaatccaggaggcagtggacatcgtaggcagccacggccccgggtccaggagaagtgctccctggaggcacgcaccactgcttcccactggggccggcggggcccacgcacgacgtcagcctcttaccttcccgcctcggctaggggtcctcgggatgccgttctgttccaacctcctgctctgggacgtggacatgcctcaaggatacagggagccggcggcctctcgacggcacgcacttgcctgttggctgctgcggctgtgggcgagcatgggggctgccagcgtctgttgtggaaagtagctgctagtgaaatggctggggccgctggggtccgtcttcacactgcgcaggtctcttctgggcgtctgagctggggtgggagctcctccgcagaaggttggtggggggtccagtctgtgatccttggtgctgtgtgccccactccagcctggggaccccacttcagaaggtaggggccgtgtcccgcggtgctgactgaggcctgcttccccctccccctcctgctgtgctggaattccacagggaccagggccaccgcaggggactgtctcagaagacttgatttttccgtccctttttctccacactccactgacaaacgtccccagcggtttccacttgtgggcttcaggtgttttcaagcacaacccaccacaacaagcaagtgcattttcagtcgttgtgcttttttgttttgtgctaacgtcttactaatttaaagatgctgtcggcaccatgtttatttatttccagtggtcatgctcagccttgctgctctgcgtggcgcaggtgccatgcctgctccctgtctgtgtcccagccacgcagggccatccactgtgacgtcggccgaccaggctggacaccctctgccgagtaatgacgtgtgtggctgggaccttctttattctgtgttaatggctaacctgttacactgggctgggttgggtagggtgttctggcttttttgtggggtttttatttttaaagaaacactcaatcatcctaccgctga

SEQ ID NO: 5398 - DNA, 1751 bp, Homo sapiens
aggcgcttccgcaggaagaaggaagcggcgccgccatcgcctcccggcgctccctccccgactcctaagtccttcggccgccaccatgtccgcctcggctgtcttcattctggacgttaagggcaagccattgatcagccgcaactacaagggcgatgtggccatgagcaagattgagcacttcatgcctttgctggtacagcgggaggaggaaggcgccctggccccgctgctgagccacggccaggtccacttcctatggatcaaacacagcaacctctacttggtggccaccacatcgaagaatgccaatgcctccctggtgtactccttcctgtataagacaatagaggtattctgcgaatacttcaaggagctggaggaggagagcatccgggacaactttgtcatcgtctacgagttgctggacgagctcatggactttggcttcccgcagaccaccgacagcaagatcctgcaggagtacatcactcagcagagcaacaagctggagacgggcaagtcacgggtgccacccactgtcaccaacgctgtgtcctggcgctccgagggtatcaagtataagaagaacgaggtcttcattgatgtcatagagtctgtcaacctgctggtcaatgccaacggcagcgtccttctgagcgaaatcgtcggtaccatcaagctcaaggtgtttctgtcaggaatgccagagctgcggctgggcctcaatgaccgcgtgctcttcgagctcactggccgcagcaagaacaaatcagtagagctggaggatgtaaaattccaccagtgcgtgcggctctctcgctttgacaacgaccgcaccatctccttcatcccgcctgatggtgactttgagctcatgtcataccgcctcagcacccaggtcaagccactgatctggattgagtctgtcattgagaagttctcccacagccgcgtggagatcatggtcaaggccaaggggcagtttaagaaacagtcagtggccaacggtgtggagatatctgtgcctgtacccagcgatgccgactcccccagattcaagaccagtgtgggcagcgccaagtatgtgccggagagaaacgtcgtgatttggagtattaagtctttcccggggggcaaggagtacttgatgcgagcccactttggcctccccagtgtggaaaaggaagaggtggagggccggccccccatcggggtcaagtttgagatcccctacttcaccgtctctgggatccaggtccgatacatgaagatcattgagaaaagtggttaccaggccctgccctgggttcgctacatcacccagagtggcgattaccaacttcgtaccagctagaagggagaagagatgggggcttgaacacggggcttccttacagccccggatgcagattttagagggagggcaggtgcgggctgtgtgtgtctgtgtgagggcaggtcctggacttggcagtttcttgctcccagcacccgccccttcctcacctcttccttattccataggctgggagagaaactctctctgcttccctcgcccttggagctttccccatccccctgattttatatgaagaaatagaagaggggcttgaagtcctcctcgcgagtgccttcttgcaattacctgccttagcgggtgttgcgggtccctccttcacagccgctgagcccagaggtcccgctggcccctcctctgaattttaggatgtcattaaaaagatgaatct

SEQ ID NO: 5399 - DNA, 6777 bp, Homo sapiens
ggccaaaggtcaagatacttctctgggaaatgttgctgctgatgctgctttacaaagtcatacaatgagtgtttggtttaagaaagattttcatacttaaaagattttcatcttggaaatacatcaagtgaaaattaaattcttttgggaaacattttccttctgatatattatacttgtaatgggcgacatggcaaacaactcagttgcttacagtggtgtgaaaaactctttgaaggaagctaatcatgatggagactttggaattacgctcgcagagctgcgggctctcatggagctcaggtccacagatgcattacgaaaaatacaggaaagctatggagatgtctatggaatttgcaccaaattgaaaacatctcccaatgaaggtttaagtggaaaccctgcagatttagaaagaagagaagcagtgtttggaaagaattttatacctcctaaaaagccaaaaacctttcttcaattagtatgggaagcattacaagatgtcactttaattatattagaaattgcagccatagtatcattgggcctttctttttatcagcctccagaaggggataatgcactttgtggagaagtttctgttggggaggaagaaggtgaaggtgaaactggttggattgaaggagctgcaatcctcttgtctgtagtgtgtgtggtgttagtaacagctttcaatgactggagtaaggaaaaacagtttagaggtttgcagagccgaattgaacaagaacagaagttcactgtcatcaggggtggtcaggtcattcagatacctgtagctgacattactgttggagatattgctcaagtgaaatatggtgatcttcttccagctgacggcatacttattcaaggcaacgatcttaaaattgatgaaagctcattgactggtgaatcagatcatgttaaaaagtctttagataaggatcccttacttctatcaggtactcatgtaatggaaggctctggaagaatggtagttacagctgtaggtgtaaattctcaaactggaattatctttaccttacttggagctggaggtgaagaggaagagaagaaagatgagaagaaaaaggaaaagaaaaataagaaacaagatggagctattgagaatcgcaacaaagcaaaagcccaggatggtgcagccatggaaatgcagccattgaagagtgaagaaggtggagatggtgatgaaaaagataaaaagaaagcaaatttgccaaaaaaggaaaaatctgttttacaagggaaacttacaaaactggctgttcagattggcaaagcaggtctgttgatgtctgccatcacagttatcattctagtattatattttgtcattgacaccttctgggttcagaaaagaccatggcttgctgagtgcacaccaatttatatacaatactttgtgaagttcttcattattggagttacagttttagtggtcgcagtgccagaaggtcttccacttgcagtcacgatctcactggcttattcagtcaaaaaaatgatgaaagataataacttagtaaggcatctggatgcttgtgaaaccatgggaaatgctacagctatttgttcagataaaacaggaactttgacaatgaacagaatgacagtcgttcaagcttacataaatgaaaaacattataaaaaggttcctgaaccagaagctattccaccaaatattttgtcctatcttgtaacaggaatttctgtgaattgtgcttatacatcaaaaatattgccaccagagaaagagggtggattacctcgtcacgttggtaataaaactgaatgtgccttgttgggacttcttttggatttaaaacgggattatcaggatgttagaaatgaaataccagaagaagcactgtacaaagtctacaccttcaattctgttaggaagtccatgagtactgtcctgaaaaattcagatggaagttatcgaatattcagcaagggtgcatctgagataattctgaaaaagtgtttcaaaatcttgagtgctaatggtgaggcaaaagtattcagaccaagggaccgtgatgatattgtaaaaactgtgattgaaccgatggcatcagaaggcttgagaaccatatgtcttgcattcagagattttccagcaggagaaccagaaccagagtgggataatgaaaatgatattgtcaccggccttacatgcattgctgttgtggggattgaagatcctgtgagacctgaggtgccagatgcaattaaaaagtgtcagagggctggaattactgtgcggatggtcactggtgataatattaatactgctcgggccattgctaccaaatgtggtattttacatcctggggaagattttctgtgcctagaaggtaaagattttaacagaagaatacgaaatgaaaaaggagagattgagcaagagaggatagacaagatttggccaaaacttcgagtacttgcaagatcatctcctactgataagcatacactggttaaaggtataattgacagcactgtctcagaccaacgccaggttgtagctgtaactggtgatggtacaaatgatggcccagcactaaagaaagcagatgttggatttgcaatgggtattgctggaactgatgtagctaaagaagcatccgatattattctcacagatgacaactttacaagcattgttaaagcagttatgtggggacgaaatgtctatgacagcatctcaaaattccttcagttccaacttactgttaatgtagtagcagtgattgttgcttttacgggcgcctgcattactcaagactcaccgcttaaggctgtgcagatgctgtgggtaaacctcataatggatacactcgcttccctggctctggcaacggaaccacccactgagtctctcttgcttcggaaaccttatggtagaaataagcctctcatctcacgtacaatgatgaagaatattttgggtcatgcattctatcaacttgtagtagtctttacactcttatttgctggagaaaagttttttgacattgatagtggaagaaatgctcctttgcatgctcctccttcagaacattatactattgtttttaatacctttgtgctgatgcaacttttcaacgaaataaatgcccggaaaattcatggtgaaagaaatgtattcgaaggaatctttaacaatgccatcttctgcacaattgttttaggcacttttgtggtacagataataattgtgcagtttggtggaaaacctttcagttgttcagaactttcaatagaacagtggctatggtcaatattcctaggaatgggaacattactctggggccagcttatttcaacaattccaactagccgtttaaaattcctcaaagaagctggtcatggaacacaaaaggaagaaatacctgaggaggaattagcagaggatgttgaagagattgatcacgctgaaagggagttgcggcgtggccaaatcttgtggtttagaggtctgaacagaatccaaacacagattcgagtggtgaatgcatttcgtagttctttatatgaagggttagaaaaaccggaatcaagaagttcgattcacaactttatgacacatcctgagtttaggatagaagattcagagcctcatatcccccttattgatgacactgatgccgaagatgatgctcctacaaaacgtaactccagtcctccaccctctcccaacaaaaataacaatgctgttgacagtggaattcaccttacaatagaaatgaacaagtctgctacctcttcatccccaggaagcccactacatagtttggaaacatcactctgattgtaagctgaatgttaacacactagctgcattgtaaagaaacaaattgaaactgggtcttttcacatattgtgatggacaagctagtattcttgtctttggacttcaacagaagacacacttgtacgaatgtagatttatttttttaaaaaaaaaaaagcaaagctttctgccagactgagggtgctttttggggggtgggagaaatgaactgacagataaacagtaactcagcgtaagtgacctgtggatcatcagtagtacccaagcatggtcctgaacagtgtattagcagagctttagtttatctcagtcctggatgggagagagagggaggagtaaaactgggcaagacaaagagccctggatcgttgaattgatagtttaatttctgctgttggctgttaataatttggattatttatgtttataaatgatacagatctgtttacaaggtttgtagatactttttttgttcctgttcatagatgggaagcttccttataactgatgcagagaaaaattagtccttcaaatactgctgtattttcaggaaaaaaaaaaaaaggggtgtttctattgaaactgtactaaatttttgcctacaatttaccttgttaaatattgtagataaattgctaatactaatagccaaatagataacactaatgctttgtttaaaaaaacgaaaaaaacaaaacaaaacaaaaaaacatgagcagtggtgttctaatgaagttatgacatctgtcctaattagtttcttaaatacatttactacttaatggttttgaagcaactgtttaatttttaaaatttttgaaaacttgctaataaccttttgttcagaatttagtagattgtttaatgcaggacatcaactacataatgaaagatgcttgaaatgcttttgttatttcaggcaaatcaaattaaatcagactatcaaactacaagagaaccttagtcttttttgtttttgtctaaacatgttagtttagtgatgtcttggtgaactgtgagtgaactgtattgatttttctaatctttagagaccttcacacagcatgagggctgttggcattttgaaaaaggttaataagtagaagcatacatgttttccttttgtttttgaaacttgtttgtaaacataaataaatatgcccttttattaaataaattcatggcaatgtttttttaaaagacatttcagcttctttactcagttctgcatatacagtgcatcagtctgttctctttgaccacaattggaatacatttcaagatggtaacagccccatgaagtaccgctttaattccttgctggtaatctaatagaatcagattaagaaaattaacacaattttaccatttgacatactcttcattgaatttagtttgtctaaaatagtctcacaggtaaaaaacataacaacaatgaccaccattgtctttgatacatttattttaattcttaagtggccaaataacagattaggtaaaatgagattacatgaaaaggttctaaaatgatatatttagatgcaataattaaccatatgctagaatgcccacctctaagccaattggattctttagctctctttttctttccttcatctaccttcttctcttttttgcctctgtctttaccctttagaaactggcatgtgttagggcccagatttcaccagatacacaatcctcaggctgacataaagtttacgaggactgctactataactgagagtgctgaccaagcaaagaaacatttagttgatggtgcttgatatttttggtgggtgggggaaatctttttctcaccatcaaatctttgcagtaatcctctgcaggtcttagaaacacattggctctgtcagcatttgtaattgtacatttattcatcaggtatttatagtgaatcatactgtaaaaaagaggtagcatgatatgctggaaagcatattagactaggagtcaagacctggtttctagtcttggttttgccattaatgtgctgcatgatcttgggaaaatcatttaccctaaataagggtggtggactatcttgaagaaccctttcaactctaaaaattgaccctatcaactggagagcccacaaggcatagggaatagagaaaagggaaatgttttcagttttcttttttattttggttatgcttaaatatgaatgtaattaccaaaagatttagaagtgcatgtgctttggaggatttgtattgagcttttacagtattcatttttcaactcaaggcaatggctttctacaccaactctaatccataaacgggtcttatgacatctatgaagtagtagcaagacatgcttagtgtgtatttctctctttgagacactgtaatttctaccagaaatttccagagcattatgtaggtagaaaaaaatgcaagcaagctgttaaagatcttggatcccattatatagtatgtatagctgaaatctgtaattcaatcactttttctcttttatcctctaaccaaaaaattgtttaattttgcatcccaaatgtttttaatctttgtatattttttaaaaatccttttctcctcatcattgccttttttgtggttgtaaatagacttacttgcactttgaagatgagttactccttgtcatcttacaaatatgtgatatggtaattttcataacagatgtcagttttgaaccaagaattggtgatttgtttataagaaaaaaactggcttcatttctgtgaaattgctctttgaaaatttctttttacacgtgtaagccaactgagataccgtgatggtgttgatttctttcaatgatgcttaccatctattttagccactgagccttttattatttgtctatttgtaaagtttatttgtcttaactcatttaataaatatactgtttatctgtttctg

SEQ ID NO: 5400 - DNA, 2463 bp, Homo sapiens; identical to SEQ ID NO: 480

SEQ ID NO: 5401 - DNA, 3722 bp, Homo sapiens; identical to SEQ ID NO: 82

SEQ ID NO: 5402 - DNA, 3336 bp, Homo sapiens; identical to SEQ ID NO: 1399

SEQ ID NO: 5403 - DNA, 1019 bp, Homo sapiens
ataaaggggtggcccgtagaagattccagcaccctcccctaactccaggccagactctaaaggggagatctggatggcatctacttcgtatgactattgcagagtgcccatggaagacggggataagcgctgtaagcttctgctggggataggaattctggtgctcctgatcatcgtgattctgggggtgcccttgattatcttcaccatcaaggccaacagcgaggcctgccgggacggccttcgggcagtgatggagtgtcgcaatgtcacccatctcctgcaacaagagctgaccgaggcccagaagggctttcaggatgtggaggcccaggccgccacctgcaaccacactgtgatggccctaatggcttccctggatgcagagaaggcccaaggacaaaagaaagtggaggagcttgagggagagatcactacattaaaccataagcttcaggacgcgtctgcagaggtggagcgactgagaagagaaaaccaggtcttaagcgtgagaatcgcggacaagaagtactaccccagctcccaggactccagctccgctgcggcgccccagctgctgattgtgctgctgggcctcagcgctctgctgcagtgagatcccaggaagctggcacatcttggaaggtccgtcctgctcggcttttcgcttgaacattcccttgatctcatcagttctgagcgggtcatggggcaacacggttagcggggagagcacggggtagccggagaagggcctctggagcaggtctggaggggccatggggaagtcctgggtgtggggacacagtcgggttgacccagggctgtctccctccagagcctccctccggacaatgagtcccccctcttgtctcccaccctgagattgggcatggggtgcggtgtggggggcatgtgctgcctgttgttatgggttttttttgcggggggggttgcttttttctggggtctttgagctccaaaaaataaacacttcctttgagggagagcacacctga

SEQ ID NO: 5404 - DNA, 4875 bp, Homo sapiens
agccaatcagcggtacggggggcggtgcctccggggctcacctggctgcagccacgcaccccctctcagtggcgtcggaactgcaaagcacctgtgagcttgcggaagtcagttcagactccagcccgctccagcccggcccgacccgaccgcacccggcgcctgccctcgctcggcgtccccggccagccatgggcccttggagccgcagcctctcggcgctgctgctgctgctgcaggtctcctcttggctctgccaggagccggagccctgccaccctggctttgacgccgagagctacacgttcacggtgccccggcgccacctggagagaggccgcgtcctgggcagagtgaattttgaagattgcaccggtcgacaaaggacagcctatttttccctcgacacccgattcaaagtgggcacagatggtgtgattacagtcaaaaggcctctacggtttcataacccacagatccatttcttggtctacgcctgggactccacctacagaaagttttccaccaaagtcacgctgaatacagtggggcaccaccaccgccccccgccccatcaggcctccgtttctggaatccaagcagaattgctcacatttcccaactcctctcctggcctcagaagacagaagagagactgggttattcctcccatcagctgcccagaaaatgaaaaaggcccatttcctaaaaacctggttcagatcaaatccaacaaagacaaagaaggcaaggttttctacagcatcactggccaaggagctgacacaccccctgttggtgtctttattattgaaagagaaacaggatggctgaaggtgacagagcctctggatagagaacgcattgccacatacactctcttctctcacgctgtgtcatccaacgggaatgcagttgaggatccaatggagattttgatcacggtaaccgatcagaatgacaacaagcccgaattcacccaggaggtctttaaggggtctgtcatggaaggtgctcttccaggaacctctgtgatggaggtcacagccacagacgcggacgatgatgtgaacacctacaatgccgccatcgcttacaccatcctcagccaagatcctgagctccctgacaaaaatatgttcaccattaacaggaacacaggagtcatcagtgtggtcaccactgggctggaccgagagagtttccctacgtataccctggtggttcaagctgctgaccttcaaggtgaggggttaagcacaacagcaacagctgtgatcacagtcactgacaccaacgataatcctccgatcttcaatcccaccacgtacaagggtcaggtgcctgagaacgaggctaacgtcgtaatcaccacactgaaagtgactgatgctgatgcccccaataccccagcgtgggaggctgtatacaccatattgaatgatgatggtggacaatttgtcgtcaccacaaatccagtgaacaacgatggcattttgaaaacagcaaagggcttggattttgaggccaagcagcagtacattctacacgtagcagtgacgaatgtggtaccttttgaggtctctctcaccacctccacagccaccgtcaccgtggatgtgctggatgtgaatgaagcccccatctttgtgcctcctgaaaagagagtggaagtgtccgaggactttggcgtgggccaggaaatcacatcctacactgcccaggagccagacacatttatggaacagaaaataacatatcggatttggagagacactgccaactggctggagattaatccggacactggtgccatttccactcgggctgagctggacagggaggattttgagcacgtgaagaacagcacgtacacagccctaatcatagctacagacaatggttctccagttgctactggaacagggacacttctgctgatcctgtctgatgtgaatgacaacgcccccataccagaacctcgaactatattcttctgtgagaggaatccaaagcctcaggtcataaacatcattgatgcagaccttcctcccaatacatctcccttcacagcagaactaacacacggggcgagtgccaactggaccattcagtacaacgacccaacccaagaatctatcattttgaagccaaagatggccttagaggtgggtgactacaaaatcaatctcaagctcatggataaccagaataaagaccaagtgaccaccttagaggtcagcgtgtgtgactgtgaaggggccgctggcgtctgtaggaaggcacagcctgtcgaagcaggattgcaaattcctgccattctggggattcttggaggaattcttgctttgctaattctgattctgctgctcttgctgtttcttcggaggagagcggtggtcaaagagcccttactgcccccagaggatgacacccgggacaacgtttattactatgatgaagaaggaggcggagaagaggaccaggactttgacttgagccagctgcacaggggcctggacgctcggcctgaagtgactcgtaacgacgttgcaccaaccctcatgagtgtcccccggtatcttccccgccctgccaatcccgatgaaattggaaattttattgatgaaaatctgaaagcggctgatactgaccccacagccccgccttatgattctctgctcgtgtttgactatgaaggaagcggttccgaagctgctagtctgagctccctgaactcctcagagtcagacaaagaccaggactatgactacttgaacgaatggggcaatcgcttcaagaagctggctgacatgtacggaggcggcgaggacgactaggggactcgagagaggcgggccccagacccatgtgctgggaaatgcagaaatcacgttgctggtggtttttcagctcccttcccttgagatgagtttctggggaaaaaaaagagactggttagtgatgcagttagtatagctttatactctctccactttatagctctaataagtttgtgttagaaaagtttcgacttatttcttaaagcttttttttttttcccatcactctttacatggtggtgatgtccaaaagatacccaaattttaatattccagaagaacaactttagcatcagaaggttcacccagcaccttgcagattttcttaaggaattttgtctcacttttaaaaagaaggggagaagtcagctactctagttctgttgttttgtgtatataattttttaaaaaaaatttgtgtgcttctgctcattactacactggtgtgtccctctgccttttttttttttttaagacagggtctcattctatcggccaggctggagtgcagtggtgcaatcacagctcactgcagccttgtcctcccaggctcaagctatccttgcacctcagcctcccaagtagctgggaccacaggcatgcaccactacgcatgactaattttttaaatatttgagacggggtctccctgtgttacccaggctggtctcaaactcctgggctcaagtgatcctcccatcttggcctcccagagtattgggattacagacatgagccactgcacctgcccagctccccaactccctgccattttttaagagacagtttcgctccatcgcccaggcctgggatgcagtgatgtgatcatagctcactgtaacctcaaactctggggctcaagcagttctcccaccagcctcctttttatttttttgtacagatggggtcttgctatgttgcccaagctggtcttaaactcctggcctcaagcaatccttctgccttggccccccaaagtgctgggattgtgggcatgagctgctgtgcccagcctccatgttttaatatcaactctcactcctgaattcagttgctttgcccaagataggagttctctgatgcagaaattattgggctcttttagggtaagaagtttgtgtctttgtctggccacatcttgactaggtattgtctactctgaagacctttaatggcttccctctttcatctcctgagtatgtaacttgcaatgggcagctatccagtgacttgttctgagtaagtgtgttcattaatgtttatttagctctgaagcaagagtgatatactccaggacttagaatagtgcctaaagtgctgcagccaaagacagagcggaactatgaaaagtgggcttggagatggcaggagagcttgtcattgagcctggcaatttagcaaactgatgctgaggatgattgaggtgggtctacctcatctctgaaaattctggaaggaatggaggagtctcaacatgtgtttctgacacaagatccgtggtttgtactcaaagcccagaatccccaagtgcctgcttttgatgatgtctacagaaaatgctggctgagctgaacacatttgcccaattccaggtgtgcacagaaaaccgagaatattcaaaattccaaatttttttcttaggagcaagaagaaaatgtggccctaaagggggttagttgaggggtagggggtagtgaggatcttgatttggatctctttttatttaaatgtgaatttcaacttttgacaatcaaagaaaagacttttgttgaaatagctttactgtttctcaagtgttttggagaaaaaaatcaaccctgcaatcactttttggaattgtcttgatttttcggcagttcaagctatatcgaatatagttctgtgtagagaatgtcactgtagttttgagtgtatacatgtgtgggtgctgataattgtgtattttctttgggggtggaaaaggaaaacaattcaagctgagaaaagtattctcaaagatgcatttttataaattttattaaacaattttgtt

SEQ ID NO: 5405 - DNA, 1406 bp, Homo sapiens
agagaggggttgagtagtcccttcgcaagccctcatttcaccaggcccccggcttggggcgccttccttccccatggcgggacacctggcttcggatttcgccttctcgccccctccaggtggtggaggtgatgggccaggggggccggagccgggctgggttgatcctcggacctggctaagcttccaaggccctcctggagggccaggaatcgggccgggggttgggccaggctctgaggtgtgggggattcccccatgccccccgccgtatgagttctgtggggggatggcgtactgtgggccccaggttggagtggggctagtgccccaaggcggcttggagacctctcagcctgagggcgaagcaggagtcggggtggagagcaactccgatggggcctccccggagccctgcaccgtcacccctggtgccgtgaagctggagaaggagaagctggagcaaaacccggaggagtcccaggacatcaaagctctgcagaaagaactcgagcaatttgccaagctcctgaagcagaagaggatcaccctgggatatacacaggccgatgtggggctcaccctgggggttctatttgggaaggtattcagccaaacgaccatctgccgctttgaggctctgcagcttagcttcaagaacatgtgtaagctgcggcccttgctgcagaagtgggtggaggaagctgacaacaatgaaaatcttcaggagatatgcaaagcagaaaccctcgtgcaggcccgaaagagaaagcgaaccagtatcgagaaccgagtgagaggcaacctggagaatttgttcctgcagtgcccgaaacccacactgcagcagatcagccacatcgcccagcagcttgggctcgagaaggatgtggtccgagtgtggttctgtaaccggcgccagaagggcaagcgatcaagcagcgactatgcacaacgagaggattttgaggctgctgggtctcctttctcagggggaccagtgtcctttcctctggccccagggccccattttggtaccccaggctatgggagccctcacttcactgcactgtactcctcggtccctttccctgagggggaagcctttccccctgtctccgtcaccactctgggctctcccatgcattcaaactgaggtgcctgcccttctaggaatgggggacagggggaggggaggagctagggaaagaaaacctggagtttgtgccagggtttttgggattaagttcttcattcactaaggaaggaattgggaacacaaagggtgggggcaggggagtttggggcaactggttggagggaaggtgaagttcaatgatgctcttgattttaatcccacatcatgtatcacttttttcttaaataaagaagcctgggacacagta

SEQ ID NO: 5406 - DNA, 3442 bp, Homo sapiens
gggacgcccgggcggccctgaaggggacggggcggccccagtcggaggtcgcagggagctccgcccccgactcggtataagagctgggcccggcccacggcggcggcggcggcggcggagagagctggctcagggcgtccgctaggctcggacgacctgctgagcctcccaaaccgcttccataaggctttgcctttccaacttcagctacagtgttagctaagtttggaaagaaggaaaaaagaaaatccctgggccccttttcttttgttctttgccaaagtcgtcgttgtagtctttttgcccaaggctgttgtgtttttagaggtgctatctccagttccttgcactcctgttaacaagcacctcagcgagagcagcagcagcgatagcagccgcagaagagccagcggggtcgcctagtgtcatgaccagggcgggagatcacaaccgccagagaggatgctgtggatccttggccgactacctgacctctgcaaaattccttctctaccttggtcattctctctctacttggggagatcggatgtggcactttgcggtgtctgtgtttctggtagagctctatggaaacagcctccttttgacagcagtctacgggctggtggtggcagggtctgttctggtcctgggagccatcatcggtgactgggtggacaagaatgctagacttaaagtggcccagacctcgctggtggtacagaatgtttcagtcatcctgtgtggaatcatcctgatgatggttttcttacataaacatgagcttctgaccatgtaccatggatgggttctcacttcctgctatatcctgatcatcactattgcaaatattgcaaatttggccagtactgctactgcaatcacaatccaaagggattggattgttgttgttgcaggagaagacagaagcaaactagcaaatatgaatgccacaatacgaaggattgaccagttaaccaacatcttagcccccatggctgttggccagattatgacatttggctccccagtcatcggctgtggctttatttcgggatggaacttggtatccatgtgcgtggagtacgttctgctctggaaggtttaccagaaaaccccagctctagctgtgaaagctggtcttaaagaagaggaaactgaattgaaacagctgaatttacacaaagatactgagccaaaacccctggagggaactcatctaatgggtgtgaaagactctaacatccatgagcttgaacatgagcaagagcctacttgtgcctcccagatggctgagcccttccgtaccttccgagatggatgggtctcctactacaaccagcctgtgtttctggctggcatgggtcttgctttcctttatatgactgtcctgggctttgactgcatcaccacagggtacgcctacactcagggactgagtggttccatcctcagtattttgatgggagcatcagctataactggaataatgggaactgtagcttttacttggctacgtcgaaaatgtggtttggttcggacaggtctgatctcaggattggcacagctttcctgtttgatcttgtgtgtgatctctgtattcatgcctggaagccccctggacttgtccgtttctccttttgaagatatccgatcaaggttcattcaaggagagtcaattacacctaccaagatacctgaaattacaactgaaatatacatgtctaatgggtctaattctgctaatattgtcccggagacaagtcctgaatctgtgcccataatctctgtcagtctgctgtttgcaggcgtcattgctgctagaatcggtctttggtcctttgatttaactgtgacacagttgctgcaagaaaatgtaattgaatctgaaagaggcattataaatggtgtacagaactccatgaactatcttcttgatcttctgcatttcatcatggtcatcctggctccaaatcctgaagcttttggcttgctcgtattgatttcagtctcctttgtggcaatgggccacattatgtatttccgatttgcccaaaatactctgggaaacaagctctttgcttgcggtcctgatgcaaaagaagttaggaaggaaaatcaagcaaatacatctgttgtttgagacagtttaactgttgctatcctgttactagattatatagagcacatgtgcttattttgtactgcagaattccaataaatggctgggtgttttgctctgtttttaccacagctgtgccttgagaactaaaagctgtttaggaaacctaagtcagcagaaattaactgattaatttcccttatgttgaggcatggaaaaaaaattggaaaagaaaaactcagtttaaatacggagactataatgataacactgaattcccctatttctcatgagtagatacaatcttacgtaaaagagtggttagtcacgtgaattcagttatcatttgacagattcttatctgtactagaattcagatatgtcagttttctgcaaaactcactcttgttcaagactagctaatttatttttttgcatcttagttatttttaaaaacaaattcttcaagtatgaagactaaattttgataactaatattatccttattgatcctattgatcttaaggtatttacatgtatgtggaaaaacaaaacacttaactagaattctctaataaggtttatggtttagcttaaagagcacctttgtatttttattatcagatggggcaacatattgtatgaagcatatgtagcacttcacagcatggttatcatgtaagctgcaggtagaagcaaagctgtaaagtagatttatcacacaatgactgcatacagacttcaaatatgtcaatagtttggtcatagaacctagaagccaaaagccacacagaagggcaagaatcccaatttaactcatgttatcatcattagtgatctgtgttgtagaacatgagggtgtaagccttcagcctggcaagttacatgtagaaagcccacacttgtgaaggttttgttttacaaatcacttgatttaacacactcaggtagaatatttttatttttactgttttatacccagaagttatttctacattgttctacagcaagaatattcataaaagtatccctttcaaatgcctttgagaagaatagaagaaaaaaagtttgtatatattttaaaaaattgttttaaaagtcagtttgcaacatgtctgtaccaagatggtactttgccttaaccgtttatatgcactttcatggagactgcaatacgttgctatgagcactttctttatccttggagtttaatcctttgcttcatctttctacagtatgacataatgatttgctatgttgtaaaatctttgtaaaaaatttctatataaaaatattttgaaaatcttaatttttcctgaa

SEQ ID NO: 5407 - DNA, 3093 bp, Homo sapiens
cgccctctcggagggctccgggttataagggctggaggccgagcggacgggagctggagcccgcggagcccacggagcccacggagcccacggaggagcccacggaggagccccagcgtccgaacgggcagaccccctcgagccgcgaaggagcccgagaagcagccacgatgtgcggaatctttgcctacatgaactacagagtcccccggacgaggaaggagatcttcgaaaccctcatcaagggcctgcagcggctggagtacagaggctacgactcggcaggtgtggcgatcgatgggaataatcacgaagtcaaagaaagacacattcagctggtcaagaaaagggggaaagtcaaggctctcgatgaagaactttacaaacaagacagcatggacttaaaagtggagtttgagacacacttcggcattgcccacacgcgctgggccacccacggggtccccagtgctgtcaacagccaccctcagcgctcagacaaaggcaacgaatttgttgtcatccacaatgggatcatcacaaattacaaagatctgaggaaatttctggaaagcaaaggctacgagtttgagtcagaaacagatacagagaccatcgccaagctgattaaatatgtgttcgacaacagagaaactgaggacattacgttttcaacgttggtcgagagagtcattcagcagttggaaggtgcattcgcgctggttttcaagagtgtccactacccaggagaagccgttgccacacggagaggcagccccctgctcatcggagtccggagcaaatacaagctctccacagaacagatccctatcttatacaggacgtgcactctggagaatgtgaagaatatctgtaagacacggatgaagaggctggacagctccgcctgcctgcatgctgtgggcgacaaggccgtggaattcttctttgcttctgatgcaagcgctatcatagagcacaccaaccgggtcatcttcctggaggacgatgacatcgccgcagtggctgatgggaaactctccattcaccgggtcaagcgctcggccagtgatgacccatctcgagccatccagaccttgcagatggaactgcagcaaatcatgaaaggtaacttcagtgcgtttatgcagaaggagatcttcgaacagccagaatcagttttcaatactatgagaggtcgggtgaattttgaaaccaacacagtgctcctgggtggcttgaaggaccacttgaaggagattcgacgatgccgacggctcatcgtgattggctgtggaaccagctaccacgctgccgtggctacgcggcaagttttggaggaactgactgagcttcctgtgatggttgaacttgctagtgattttctggacaggaacacacctgtgttcagggatgacgtttgctttttcatcagccagtcaggcgagaccgcggacaccctcctggcgctgcgctactgtaaggaccgcggcgctctcaccgtgggcgtcaccaacaccgtgggcagctccatctctcgcgagaccgactgcggcgtccacatcaacgcagggccggagatcggcgtggccagcaccaaggcttataccagtcagttcatctctctggtgatgtttggtttgatgatgtctgaagaccgaatttcactacaaaacaggaggcaagagatcatccgtggcttgagatctttacctgagctgatcaaggaagtgctgtctctggaggagaagatccacgacttggccctggagctctacacgcagagatcgctgctggtgatggggcggggctacaactatgccacctgcctggaaggagccctgaaaattaaagagataacctacatgcactcagaaggcatcctggctggggagctgaagcacgggcccctggcactgattgacaagcagatgcccgtcatcatggtcattatgaaggatccttgcttcgccaaatgccagaacgccctgcagcaagtcacggcccgccagggtcgccccattatactgtgctccaaggacgatactgaaagttccaagtttgcgtataagacaattgagctgccccacactgtggactgcctccagggcatcctgagcgtgattccgctgcagctgctgtccttccacctggctgttctccgaggatatgacgttgacttccccagaaatctggccaagtctgtaactgtggaatgaggctgagaccgtgacaagaccatcaccacctttcatctgattccagacctgtcccaacagcagggatgctacatgggaagagaagtggacatcccacatgttctgcgtgctcctgtagagcttgacagcttccacgtgccttctacccaagtgcttttgcttacagcagatactgtttctctgtgtcctgaagtcgccagaggagaagggaatcattgtttacacatggggatcagagcagacttctccactactgtgcaatagagatacagctctcttcagagtaactgtgaaccttttataaccaacactagagttagttttaaaagacaagatatttataatgacgactgtatagcttttaagttatttttctagtatgtggctttctgtagccgtggtaacggccaaactgttcatcctagctacccatgctctgtgtccaggcttgctcctggcaggtggcattcatctcagatgtgagcacaaggcattggccctctggactcctttctccttttctttcctctctaggctgctcctgaatcctgttctctgacatccgtggagcccctcctgcatccacctatgcctcctataagtccagttgaaatctcagcctccttcaacattttcttctcgtgtgtggcccacatccctccacttctccaacttctgtttaatctgatcacggctctttttaagccctggcagcattttggtccctgctccttgcccatagtaaaacagcttgaaatatcccatgcaagagagtagtttcaagtgggcaactctgctctctatttaaaagcgtgcacaatcaaaagtactatgcaattttaggacaataaagaacatacagtttttttgtgtg

SEQ ID NO: 5408 - DNA, 2519 bp, Homo sapiens
gatttcgggcacctccgaaagataattgggaagggtttccagaaggtgggaaatgtcacctgattcacactgaacttttgaaagctccccacccccaaggagccgcgcacaccctcgctcgcggccgccctcccacagccccacacactgggagaccgcccaccgcaaaccgcggagacccccgtctagatttaaagcgcggctgcgcccggcttctgacgtccattgaatcgcgcgggcggccggcggcgagcgcggggctgcgccgggatcgctgcgccctccgccgctggcctctgcgacgcgcgccgctcgcccgagccacccgccgccgcgccggctccccgcgccgctgcgctcctcgccccgcgcctgcccccaggatggtccgcgcgaggcaccagccgggtgggctttgcctcctgctgctgctgctctgccagttcatggaggaccgcagtgcccaggctgggaactgctggctccgtcaagcgaagaacggccgctgccaggtcctgtacaagaccgaactgagcaaggaggagtgctgcagcaccggccggctgagcacctcgtggaccgaggaggacgtgaatgacaacacactcttcaagtggatgattttcaacgggggcgcccccaactgcatcccctgtaaagaaacgtgtgagaacgtggactgtggacctgggaaaaaatgccgaatgaacaagaagaacaaaccccgctgcgtctgcgccccggattgttccaacatcacctggaagggtccagtctgcgggctggatgggaaaacctaccgcaatgaatgtgcactcctaaaggcaagatgtaaagagcagccagaactggaagtccagtaccaaggcagatgtaaaaagacttgtcgggatgttttctgtccaggcagctccacatgtgtggtggaccagaccaataatgcctactgtgtgacctgtaatcggatttgcccagagcctgcttcctctgagcaatatctctgtgggaatgatggagtcacctactccagtgcctgccacctgagaaaggctacctgcctgctgggcagatctattggattagcctatgagggaaagtgtatcaaagcaaagtcctgtgaagatatccagtgcactggtgggaaaaaatgtttatgggatttcaaggttgggagaggccggtgttccctctgtgatgagctgtgccctgacagtaagtcggatgagcctgtctgtgccagtgacaatgccacttatgccagcgagtgtgccatgaaggaagctgcctgctcctcaggtgtgctactggaagtaaagcactccggatcttgcaactccatttcggaagacaccgaggaagaggaggaagatgaagaccaggactacagctttcctatatcttctattctagagtggtaaactctctataagtgttcagtgttgacatagcctttgtgcaaaaaaaaaaaaaaaaaaaaagaaaaagaaaaaaagaaaaatatattgtccatactgtaaataagtgtatgcttatttatttggggggaaaactatacattaaaggacctttgtcctaaagctctctcccaggccaccttgttactcattggacacggagaggcattcattgtgaggtctactggatgaggcccatagttgagacttgtagacatttatttatactgtgtcatgttttataatttatacataaaatgtctggttgactgtataccttgtttttgaagaaatttattcgtgaaaggaagagcagttgttatttattgtgaggtctcttgcttgtaaagtaaaagctttttttccttgtaaaccatttaagtccattccttactattcactcactcatctgtctcccttcatttcactgttagactcttttccactttcaacaaacttgcatgtcagtttctgtcatgtttatttattggattctctgctgcctgatctgtacatacatgatccctcgggttttgtttacaaggaaccttgactgaccaaaaggcattataactctgactcaaatacaaggtacagaagataagcatctttgaggaaactcctacttcagttcttttgttatgatgaagacatttgtgagagaggagatgattagaattctagtaatgtacttttaagatgttacagatacaaagaaatgatgtgggtgtcaggagactaaaggatgttgaaggctacacattcaaccttttgttaggtgtttcctttaagctactcagctgtaccttttaaattagttctttttcaaccagtatatcactaaaagttatatcaaagctttatcagttcaagtttcttgcttttcataatacttttttctgatgcaattttatattttcaaacatggcaagttaaaatataaattcatttaaatatatagttttgtacttttctaccatgtaaatgtgcaatgtatataaaagttataatgtgtatttgtaaataaatgatgagtgaaaaaataaaaaaattttaaaaagccaa

SEQ ID NO: 5409 - DNA, 5247 bp, Homo sapiens
aaaacccggaggagcgggatggcgcgctttgactctggagtgggagtgggagcgagcgcttctgcgactccagttgtgagagccgcaagggcatgggaattgacgccactcaccgacccccagtctcaatctcaacgctgtgaggaaacctcgactttgccaggtccccaagggcagcggggctcggcgagcgaggcacccttctccgtccccatcccaatccaagcgctcctggcactgacgacgccaagagactcgagtgggagttaaagcttccagtgagggcagcaggtgtccaggccgggctgcgggttcctgttgacgtcttgccctaggcaaaggtcccagttccttctcggagccggctgtcccgcgccactggaaaccgcacctccccgcagcatgggcaccagcctcagcccgaacgacccttggccgctaaacccgctgtccatccagcagaccacgctcctgctactcctgtcggtgctggccactgtgcatgtgggccagcggctgctgaggcaacggaggcggcagctccggtccgcgcccccgggcccgtttgcgtggccactgatcggaaacgcggcggcggtgggccaggcggctcacctctcgttcgctcgcctggcgcggcgctacggcgacgttttccagatccgcctgggcagctgccccatagtggtgctgaatggcgagcgcgccatccaccaggccctggtgcagcagggctcggccttcgccgaccggccggccttcgcctccttccgtgtggtgtccggcggccgcagcatggctttcggccactactcggagcactggaaggtgcagcggcgcgcagcccacagcatgatgcgcaacttcttcacgcgccagccgcgcagccgccaagtcctcgagggccacgtgctgagcgaggcgcgcgagctggtggcgctgctggtgcgcggcagcgcggacggcgccttcctcgacccgaggccgctgaccgtcgtggccgtggccaacgtcatgagtgccgtgtgtttcggctgccgctacagccacgacgaccccgagttccgtgagctgctcagccacaacgaagagttcgggcgcacggtgggcgcgggcagcctggtggacgtgatgccctggctgcagtacttccccaacccggtgcgcaccgttttccgcgaattcgagcagctcaaccgcaacttcagcaacttcatcctggacaagttcttgaggcactgcgaaagccttcggcccggggccgccccccgcgacatgatggacgcctttatcctctctgcggaaaagaaggcggccggggactcgcacggtggtggcgcgcggctggatttggagaacgtaccggccactatcactgacatcttcggcgccagccaggacaccctgtccaccgcgctgcagtggctgctcctcctcttcaccaggtatcctgatgtgcagactcgagtgcaggcagaattggatcaggtcgtggggagggaccgtctgccttgtatgggtgaccagcccaacctgccctatgtcctggccttcctttatgaagccatgcgcttctccagctttgtgcctgtcactattcctcatgccaccactgccaacacctctgtcttgggctaccacattcccaaggacactgtggtttttgtcaaccagtggtctgtgaatcatgacccagtgaagtggcctaacccggagaactttgatccagctcgattcttggacaaggatggcctcatcaacaaggacctgaccagcagagtgatgattttttcagtgggcaaaaggcggtgcattggcgaagaactttctaagatgcagctttttctcttcatctccatcctggctcaccagtgcgatttcagggccaacccaaatgagcctgcgaaaatgaatttcagttatggtctaaccattaaacccaagtcatttaaagtcaatgtcactctcagagagtccatggagctccttgatagtgctgtccaaaatttacaagccaaggaaacttgccaataagaagcaagaggcaagctgaaattttagaaatattcacatcttcggagatgaggagtaaaattcagtttttttccagttcctcttttgtgctgcttctcaattagcgtttaaggtgagcataaatcaactgtccatcaggtgaggtgtgctccatacccagcggttcttcatgagtagtgggctatgcaggagcttctgggagatttttttgagtcaaagacttaaagggcccaatgaattattatatacatactgcatcttggttatttctgaaggtagcattctttggagttaaaatgcacatatagacacatacacccaaacacttacaccaaactactgaatgaagcagtattttggtaaccaggccatttttggtgggaatccaagattggtctcccatatgcagaaatagacaaaaagtatattaaacaaagtttcagagtatattgttgaagagacagagacaagtaatttcagtgtaaagtgtgtgattgaaggtgataagggaaaagataaagaccagaaattcccttttcaccttttcaggaaaataacttagactctagtatttatgggtggatttatccttttgccttctggtatacttccttacttttaaggataaatcataaagtcagttgctcaaaaagaaatcaatagttgaattagtgagtatagtggggttccatgagttatcatgaattttaaagtatgcattattaaattgtaaaactccaaggtgatgttgtacctcttttgcttgccaaagtacagaatttgaattatcagcaaagaaaaaaaaaaaagccagccaagctttaaattatgtgaccataatgtactgatttcagtaagtctcataggttaaaaaaaaaagtcaccaaatagtgtgaaatatattacttaactgtccgtaagcagtatattagtattatcttgttcaggaaaaggttgaataatatatgccttgtataatattgaaaattgaaaagtacaactaacgcaaccaagtgtgctaaaaatgagcttgattaaatcaaccacctatttttgacatggaaatgaagcagggtttcttttcttcactcaaattttggcgaatctcaaaattagatcctaagatgtgttcttatttttataacatctttattgaaattctatttataatacagaatcttgttttgaaaataacctaattaatatattaaaattccaaattcatggcatgcttaaattttaactaaattttaaagccattctgattattgagttccagttgaagttagtggaaatctgaacattctcctgtggaaggcagagaaatctaagctgtgtctgcccaatgaataatggaaaatgccatgaattacctggatgttctttttacgaggtgacaagagttggggacagaactcccattacaactgaccaagtttctcttctagatgattttttgaaagttaacattaatgcctgctttttggaaagtcagaatcagaagatagtcttggaagctgtttggaaaagacagtggagatgaggtcagttgtgttttttaagatggcaattactttggtagctgggaaagcataaagctcaaatgaaatgtatgcattcacatttagaaaagtgaattgaagtttcaagttttaaagttcattgcaattaaacttccaaagaaagttctacagtgtcctaagtgctaagtgcttattacattttattaagctttttggaatctttgtaccaaaattttaaaaaagggagtttttgatagttgtgtgtatgtgtgtgtggggtggggggatggtaagagaaaagagagaaacactgaaaagaaggaaagatggttaaacattttcccactcattctgaattaattaatttggagcacaaaattcaaagcatggacatttagaagaaagatgtttggcgtagcagagttaaatctcaaataggctattaaaaaagtctacaacatagcagatctgttttgtggtttggaatattaaaaaacttcatgtaattttattttaaaatttcatagctgtacttcttgaatataaaaaatcatgccagtatttttaaaggcattagagtcaactacacaaagcaggcttgcccagtacatttaaattttttggcacttgccattccaaaatattatgccccaccaaggctgagacagtgaatttgggctgctgtagcctatttttttagattgagaaatgtgtagctgcaaaaataatcatgaaccaatctggatgcctcattatgtcaaccaggtccagatgtgctataatctgtttttacgtatgtaggcccagtcgtcatcagatgcttgcggcaaaaggaaagctgtgtttatatggaagaaagtaaggtgcttggagtttacctggcttatttaatatgcttataacctagttaaagaaaggaaaagaaaacaaaaaacgaatgaaaataactgaatttggaggctggagtaatcagattactgctttaatcagaaaccctcattgtgtttctaccggagagagaatgtatttgctgacaaccattaaagtcagaagttttactccaggttattgcaataaagtataatgtttattaaatgcttcatttgtatgtcaaagctttgactctataagcaaattgcttttttccaaaacaaaaagatgtctcaggtttgttttgtgaattttctaaaagctttcatgtcccagaacttagcctttacctgtgaagtgttactacagccttaatattttcctagtagatctatattagatcaaatagttgcatagcagtatatgttaatttgtgtgtttttagctgtgacacaactgtgtgattaaaaggtatactttagtagacatttataactcaaggataccttcttatttaatcttttcttatttttgtactttatcatgaatgcttttagtgtgtgcataatagctacagtgcatagttgtagacaaagtacattctggggaaacaacatttatatgtagcctttactgtttgatataccaaattaaaaaaaaattgtatctcattacttatactgggacaccattaccaaaataataaaaatcactttcataatcttgttatgaagttttatgttgtagcaaatatagtctaatgtatcactttatttcaactattactatggattattcaattaaaatattgcactgtaaa

SEQ ID NO: 5410 - DNA, 2195 bp, Homo sapiens
cgataaagcccccgccgccgcggcagccagcttgcgctgtggggctgcccgggctgcgcggcgtctgcaggcgccaccgctgcctctttccggctgtgaccctcctcgccgccgccgcttggctgcgtcctccgactccccgcgccgccgagaccaggctcccgctccggttgcggccgcaccgccctccgcggccgccccctggggatccagcgagcgcggtcgtccttggtggaaggaaccatgaactggcatctccccctcttcctcttggcctctgtgacgctgccttccatctgctcccacttcaatcctctgtctctcgaggaactaggctccaacacggggatccaggttttcaatcagattgtgaagtcgaggcctcatgacaacatcgtgatctctccccatgggattgcgtcggtcctggggatgcttcagctgggggcggacggcaggaccaagaagcagctcgccatggtgatgagatacggcgtaaatggagttggtaaaatattaaagaagatcaacaaggccatcgtctccaagaagaataaagacattgtgacagtggctaacgccgtgtttgttaagaatgcctctgaaattgaagtgccttttgttacaaggaacaaagatgtgttccagtgtgaggtccggaatgtgaactttgaggatccagcctctgcctgtgattccatcaatgcatgggttaaaaatgaaaccagggatatgattgacaatctgctgtccccagatcttattgatggtgtgctcaccagactggtcctcgtcaacgcagtgtatttcaagggtctgtggaaatcacggttccaacccgagaacacaaagaaacgcactttcgtggcagccgacgggaaatcctatcaagtgccaatgctggcccagctctccgtgttccggtgtgggtcgacaagtgcccccaatgatttatggtacaacttcattgaactgccctaccacggggaaagcatcagcatgctgattgcactgccgactgagagctccactccgctgtctgccatcatcccacacatcagcaccaagaccatagacagctggatgagcatcatggtgcccaagagggtgcaggtgatcctgcccaagttcacagctgtagcacaaacagatttgaaggagccgctgaaagttcttggcattactgacatgtttgattcatcaaaggcaaattttgcaaaaataacaacagggtcagaaaacctccatgtttctcatatcttgcaaaaagcaaaaattgaagtcagtgaagatggaaccaaagcttcagcagcaacaactgcaattctcattgcaagatcatcgcctccctggtttatagtagacagaccttttctgtttttcatccgacataatcctacaggtgctgtgttattcatggggcagataaacaaaccctgaagagtatacaaaagaaaccatgcaaagcaacgactactttgctacgaagaaagactcctttcctgcatctttcatagttctgttaaatatttttgtacatcgcttctttttcaaaactagttcttaggaacagactcgatgcaagtgtttctgttctgggaggtattggagggaaaaaacaagcaggatggctggaacactgtactgaggaatgaatagaaaggcttccagatgtctaaaagattctttaaactactgaactgttacctaggttaacaaccctgttgagtatttgctgtttgtccagttcaggaatttttgttttgttttgtctatatgtgcggcttttcagaagaaatttaatcagtgtgacagaaaaaaaaatgttttatggtagcttttactttttatgaaaaaaaaattatttgccttttaaattcttttcccccatccccctccaaagtcttgatagcaagcgttattttggtggtagaaacggtgaaatctctagcctctttgtgtttttgttgttgttgttgttgttgttttatataatgcatgtattcactaaaataaaatttaaaaaactcctgtcttgctagacaaggttgctgttgtgcagtgtgcctgtcactactggtctgtactccttggatttgcatttttgtattttgtacaaagtaaaaataaactgttatgagtagtaaaaataaagctatttctctgctatttgaaaatacaatagaagaaactga

SEQ ID NO: 5411 - DNA, 1896 bp, Homo sapiens
agcgctgcgggctgcgcgagtcccggggcggcgagtcccggcgctgtccgcgtctgtgtcggtcccggcgaccgcgcctcttaaaggcccccgacccgacccgccccgccccgcctctggccccgcgcccggccgccccgcagtcccagcagtctgctcgaggcccggggctgcgggttcctcagcggaccgaggaggctgggaaagctacaggagggtgtccagaagccacaagccatggctgtggggaacatcaacgagctgcccgagaacatcctgctggagctgttcacgcacgtgcccgcccgccagctgctgctgaactgccgcctggtctgcagcctctggcgggacctcatcgacctcgtgaccctctggaaacgcaagtgcctgcgagagggcttcatcactgaggactgggaccagcccgtggccgactggaagatcttctacttcttacggagcctgcacaggaacctcctgcacaacccgtgcgctgaagaggggttcgagttctggagcctggatgtgaatggaggcgatgagtggaaggtggaggatctctctcgagaccagaggaaggaattccccaatgaccaggttcgcagccaggccagattgcgggtccaagtaccagctgtgcgttcagctcctgtcgtccgcgcacgcgcctctggggaccttccagccagacccggcgaccatccagcagaagagcgatgccaagtggagggaggtctcccacacattctccaactacccgcccggcgtccgctacatctggtttcagcacggcggcgtggacactcattactgggccggctggtacggcccgagggtcaccaacagcagcatcaccatcgggcccccgctgccctgacaccccctgagcccccatctgctgaaccctgactggtaaacaactgctgtcagaaaagggctgggcttgggaaggggaggtggaggccaggtgtccccagacctctaacccttgcccctagcagcctcttctttgtggagcctctcagtgtgggcagccctcgcatgctggggtcgggccagctctccccgaaaggtcttgacctgaatgatggccggggaagcctgcgtgtgcccctttcagagacggagcacctgagatgtgggaggtgcagcatgttcccctgggcccctcagaaagtcgagcttggaggccagcctggatctgtctctcccttcccctcctgggaccattctacctgtgttctttgaccctcggagcagggacaggcaagacaactggcaagcttgcagctgccctgatggtgcaggtgcagggaggtgaccatgtaactctgaccaatctgggaagtggagggtgggctcatgggccgtgctctgcccctgtctgctgctcccagtctctcgctctgcctgcctgctcagaagaggtggctttggcccagaggctcaggccgggactgagatggacagacccagggtggggtggggtccaggtcgggtgtggactgtcctcactgtcagtggagccccagaagctagatgggtaccaggtggggttaggttcccagaggactgagggaatcctgtacaggatgtcccagggtagatggggagcaggattgggacctgctctgacagctggacacatgagccctggatgagtatggtagggggtttgaagaatcccctgtccacctcccaaatccaggcccggccccctctggcttggagagcattccaagcccccaccccacccctagaactgccattcccaagacctctgtctcccagccaaccacccttggaacttgcctcttgtcctgctggaaagatagcagtgttctcctgacttcgccctactgcatgcagccaaataaaaggtgtgcccagtct

SEQ ID NO: 5412 - DNA, 9837 bp, Homo sapiens
ctgtctctcctctgtgtctctctcaaaaaagccaagtttgatggtgcccaagagaaattcaacacgtacgtgaccctgaaagtgcagaatgtcaagagcacgaccatcgcggtgcggggcagccagcccagctgggagcaggatttcatgttcgagattaaccgtctggatttgggactgacggtggaggtgtggaataagggtctcatctgggacacaatggtgggcactgtgtggatcccactgaggaccatccgccagtccaatgaggagggccctggagagtggctgacgctggactcccaggtcatcatggcagacagtgagatctgtggcaccaaggaccccaccttccaccgcatcctcctggacacgcgctttgagctacccttagacattcctgaagaggaggctcgctactgggccaagaagctggagcagctcaatgctatgcgggaccaggatgaatattcgttccaagatgagcaagacaagcctctgcctgtccccagcaaccagtgctgcaactggaattattttggctggggtgagcagcacaacgatgaccccgacagtgcagtggatgatcgtgacagtgactaccgcagtgaaacgagcaacagcatcccgccgccctattatactacgtcacaacccaacgcctcagtccaccaatattctgttcgcccaccacccctgggctcccgggagtcctacagtgactccatgcacagttacgaggagttctctgagccacaagccctcagccccacgggtagcagccgctatgcctcttccggggagctgagccagggaagctctcagctgagcgaggacttcgaccctgacgagcacagcctgcagggctccgacatggaggatgagcgggaccgggactcctaccactcctgccacagctcggtcagctaccacaaagactcgcctcgctgggaccaggatgaggaagagctggaggaggacctggaggacttcctggaggaggaggagctgcctgaagatgaggaggagctggaggaggaggaggaggaggtgcctgacgatttgggcagctatgcccagcgtgaagacgtagctgtggctgagcccaaagacttcaaacgcatcagcctcccgccagctgccccagggaaggaggacaaggccccagtggcacccaccgaggcccccgacatggccaaggtggcccccaagccagccacgcccgacaaggtgcctgcagctgagcagatccctgaggctgagccacccaaggacgaggagagtttcaggccgagagaggatgaggaaggccaggaggggcaggactccatgtccagggccaaggccaactggctgcgtgccttcaacaaggtgcggatgcagctgcaggaggcccggggagaaggagagatgtctaaatccctatggttcaaaggcggcccagggggcggtctcatcatcatcgacagcatgccagacatccgcaagaggaaacctatcccactcgtgagcgacttggccatgtccctggtccagtccaggaaagcgggcatcacctcggccttggcctccagcacgttgaacaacgaggagctgaaaaaccacgtttacaagaagaccctgcaagccttaatctaccccatctcgtgcacgacgccacacaacttcgaagtgtggacggccaccacgcccacctactgctacgagtgcgaggggctgctgtggggcatcgcgaggcagggcatgcgctgcaccgagtgcggtgtcaagtgccacgagaagtgccaggacctgctcaacgccgactgcctgcagcgggctgcggagaagagctccaagcacggggcggaggaccggacacagaacatcatcatggtgctcaaggaccgcatgaagatccgggagcgcaacaagcccgagatcttcgagctcatccaggagatcttcgcggtgaccaagacggcgcacacgcagcagatgaaggcggtcaagcagagcgtgctggacggcacgtccaagtggtccgccaagatcagcatcaccgtggtctgcgcccagggcttgcaggcaaaggacaagacaggatccagtgacccctatgtcaccgtccaggtcgggaagaccaagaaacggacaaaaaccatctatgggaacctcaacccggtgtgggaggagaatttccactttgaatgtcacaattcctccgaccgcatcaaggtgcgcgtctgggacgaggatgacgacatcaaatcccgcgtgaaacagaggttcaagagggaatctgacgatttcctggggcagacgatcattgaggtgcggacgctcagcggcgagatggacgtgtggtacaacctggacaagcgaactgacaaatctgccgtgtcgggtgccatccggctccacatcagtgtggagatcaaaggcgaggagaaggtggccccgtaccatgtccagtacacctgtctgcatgagaacctgttccacttcgtgaccgacgtgcagaacaatggggtcgtgaagatcccagatgccaagggtgacgatgcctggaaggtttactacgatgagacagcccaggagattgtggacgagtttgccatgcgctacggcgtcgagtccatctaccaagccatgacccactttgcctgcctctcctccaagtatatgtgcccaggggtgcctgccgtcatgagcaccctgctcgccaacatcaatgcctactacgcacacaccaccgcctccaccaacgtgtctgcctccgaccgcttcgccgcctccaactttgggaaagagcgcttcgtgaaactcctggaccagctgcataactccctgcggattgacctctccatgtaccggaataacttcccagccagcagcccggagagactccaggacctcaaatccactgtggaccttctcaccagcatcaccttctttcggatgaaggtacaagaactccagagcccgccccgagccagccaggtggtaaaggactgtgtgaaagcctgccttaattctacctacgagtacatcttcaataactgccatgaactgtacagccgggagtaccagacagacccggccaagaagggggaagttctcccagaggaacaggggcccagcatcaagaacctcgacttctggtccaagctgattaccctcatagtgtccatcattgaggaagacaagaattcctacactccctgcctcaaccagtttccccaggagctgaatgtgggtaaaatcagcgctgaagtgatgtggaatctgtttgcccaagacatgaagtacgccatggaggagcacgacaagcatcgtctatgcaagagtgccgactacatgaacctccacttcaaggtgaaatggctctacaatgagtatgtgacggaacttcccgccttcaaggaccgcgtgcctgagtaccctgcatggtttgaacccttcgtcatccagtggctggatgagaatgaggaggtgtcccgggatttcctgcacggtgccctggagcgagacaagaaggatgggttccagcagacctcagagcatgccctattctcctgctccgtggtggatgttttctcccaactcaaccagagctttgaaatcatcaagaaactcgagtgtcccgaccctcagatcgtggggcactacatgaggcgctttgccaagaccatcagtaatgtgctcctccagtatgcagacatcatctccaaggactttgcctcctactgctccaaggagaaggagaaagtgccctgcattctcatgaataacactcaacagctacgagttcagctggagaagatgttcgaagccatgggaggaaaggagctggatgctgaagccagtgacatcctgaaggagcttcaggtgaaactcaataacgtcttggatgagctcagccgggtgtttgctaccagcttccagccgcacattgaagagtgtgtcaaacagatgggtgacatccttagccaggttaagggcacaggcaatgtgccagccagtgcctgcagcagcgtggcccaggacgcggacaatgtgttgcagcccatcatggacctgctggacagcaacctgaccctctttgccaaaatctgtgagaagactgtgctgaagcgagtgctgaaggagctgtggaagctggttatgaacaccatggagaaaaccatcgtcctgccgcccctcactgaccagacgctgcaggggaacctcttgagaaaacatggcaagggattagaaaagggcagggtgaaattgccaagccactcagacggaacccagatgatcttcaatgcagccaaggagctgggtcagctgtccaaactcaaggatcacatggtacgagaagaagccaagagcttgaccccaaagcagtgcgcggttgttgagttggccctggacaccatcaagcaatatttccacgcgggtggcgtgggcctcaagaagaccttcctggagaagagcccggacctgcaatccttgcgctatgccctgtcgctctacacgcaggccaccgacctgctaatcaagacctttgtacagacgcaatcggcccagggcttgggtgtagaagaccctgtgggtgaagtctctgtccatgttgagctgttcactcatccaggaactggggaacacaaggtcacagtgaaagtggtggctgccaatgacctcaagtggcagacttctggcatcttccggccgttcatcgaggtcaacatcattgggccccagctcagcgacaagaaacgcaagtttgcgaccaaatccaagaacaatagctgggctcccaagtacaatgagagcttccagttcacgctgagcgccgacgcgggtcccgagtgctatgagctgcaggtgtgcgtcaaggactactgcttcgcgcgcgaggaccgcacggtggggctggccgtgctgcagctgcgtgagctggcccagcgcgggagcgccgcctgctggctgccgctcggccgccgcatccacatggacgacacgggcctcacggtgctgcgaatcctctcgcagcgcagcaacgacgaggtggccaaggagttcgtgaagctcaagtcggacacgcgctccgccgaggagggcggtgccgcgcctgcgccttagcgcgggcggtcggccgagcggcactgcgcctgcgcggagggcgctgggcggggagggacggggcttgcgccttggtgggacctccccaggggcggggctcggggggctccacgccaagggtgggctgcgcctacgcccttgactcagctttcccttttggggaattaggaatggaggatgccccgccctctcgggaggccacgcccaagggcgcgacgaaggaaggagccacatccccaacttgaggccacgcccccagcacctagggggcattttgagctgggatgggggaaacctcgtccctatggaggaggccacatcccggggctctggtaccgggaggcaccacctcatgtcccctggaaaagccataagatgggacccagacccctgggaccccagaccaattgccaagtatggaaatctcagctccctcgagggggggccctgggcaaggggtagggctctctggagcgcccctctaggtggcctggggactggagggaccaggatgctggttggagggccccggaataccggagtccctttagatatttgtgcaaaaaataaatggggggaggggggaggatgggatttcaaaagcacatgcgcccttgggcgcccaaaccctgggggccgaggggacggctctggttccccacgctgcccctacttccctttgggagtttgcctctccctctcccccaacaaacccagtcctcatatcatagagttcaacacacccatttgacagatggcaaaactgaggcttaaagagctgcttgagacttggccaaggttccaggtgccataccctctgtgcccctcccttaggcctgtgtgccccatggaagggtgggctgagatcgggatgacctgacacagctccctattgctgctaattccccctcggcctcctccaaggggtgggaattccaggccaagacccctacttcgcctttccttctccggctgccaagcaggacctttgccctcagccctttctcctgggatctccatgggggatgccatgagggcctcccaccacaaaagagaatttgggatcccctggtcccaggtttctccatcccttcttccttttccagaattttccaaataggaaagaacagaaggagaccagaaactctaggggggagaaagagaatgagagaaagagaatgagagagagagaaacacaaacacagtgacacagtgagagcttagtctccaagagcctattcattgattcaaacacccaagccacaggatacctcagatggccctcttgccagctggaagctctttctccaatgagcaaagttacagtgacctggctggagttacctggtgcacataggaccttaggggaaagttcagcgtggactacacttgctctgggatctgcttttccacatgtgtgtatggcacgcctttttctgctggattgggaaggacaagattttgctgtgctagggagaaatgaaaacggggtgagctgagtagctgggtttctggaggatagaacatcagatggggaggctttccgaggtgaagaatgagagggaaccacttactagagagaaaagagctccaggcctggggaacagcacgtgcgaaggccaggagagaagaactgttgaaacaacgagaagggtggcacggctggagctgagccagcaagggggatcgtgaggagccttggggttggggagatctgcagaagcatcagaccaggcagggcctcgtacgcagtcctgaggagttttacttttattctaagacagttggggagctccaggagctgttttaagttggggagagactggattccagcctgcaaaagctgttttgtgaagactaaaaccagtgaggagaggtggaggtgctttggggacactgaaatggattcttggaaagattctgaaggctgtgttgaaaagacacctatagctgtggggacatgactataatcccagcatttggggagaccgaggctggcagatcacttaaggtcaggagtttgagaccagcctggccaacatggcgaaaccccatctctgctaaaaatacaaaaattagctgggtgcagtggtgcatgcctgtagtcccagctactcaggagactgaggcgggagaattgtttgaaccctggaggcagaggttgtagtgagtcgtgatcacacaactgcactccagcctgggcaacagaacaatactccattccctcccctctaccccaccaaaaaaaaaaaaaaatcctgcccttagatgagctctagggctgctgagtacagttgtcccagttgcacagtgcccaagggtttggcattgctaagaaggccacgtgcaaatcctagatattgagtgttgtatgtttgtgacgttggtttcccgacatgtgaatggcccaagtgtctggaagaagtggcgccactttctaatttgcttggagatgttgcatgtcccttaaattcagacaggtgcaggtaactggaggttctgaaccaaaggttaaaatgcaaattctcatacagggttgggaagttgtagccagggataagcttatgtgactgttatatggactgaggagcagatgtgaatttcgaaccatgacatggctgagggtaggggtcgggtggatggatgattcagggttgtaacccatagagcccaaaggggaagtgatctgtgacctggggtgagggtgatctggaagatttttggatggctggaaagaaatggggaagtcgagctgcctgagagagccaagttatttcccaaaagattccttaggagtctttctgttcaagacctccgtgtgtgtgtgtgtgtgtttagggttccccagcaatggcccaggcatgtgaaggaaacaagcttcttcagggaatatttgttgaatgagttttcctgactcccaggctagaactgtttttgcaatttccaccctcttttctttcccccagagaactcctattcgtccttcaaaacccatcacggaaacccctcttggagaaaaccctccttccttcccctcaggactttcccagccaccgtctctcctccagtccagcctgatgccatgggactgggggtttctctgtccagctctgtttctcccagactggggtctgaggactctcaggacccccaactttacctagcacaggctgggcacaagtgggtgacagggagtctacgcctagtggaattatgtattggggcagggtcagtgtgagaatacacatccgcatgcatgtctgtccatgtctgtccgtaccaaccttccccttccacacggacctgggcacataggaggtgtctgagcctgacacatgggacagagagtggacatggctgagacacggacagagaaaagacaaggagtccagggggctgaaagccttttgaaatcaggaagttcctgtattggcagaacaaagcccagagaggagcagggctttcctcaacgccacccagcaagtggacacagagcccggccttggatgacacctccagggttctgaaccctggacctcgctttatgcaaggagctggccccacatttccatgaatcggggaaacagcacaagaaggttggcctgtggcagggcaagggttaaaggggtgacattgagggatgcctcagagtcaaagtcccctgaccaagaggaatagagtagaaaacacagagacagagggtgagatcacgccccgatgaggacggagagagacagagatggagagagacatagaggtggaaatatacagagaaagataaatgcagagaccaaggcagggagtgtcgggggaagtaaagagggtgtcctgaagaaagaaggatctgttcactcttaccagtctgtcctcgaatgatttgcataaaatgaggaggtgcctgtccacacccccaattcctctctcaggccccagagcctgagacctcaccatgcccccatcagagatgcaaaaaactaaacacccaactagaaatccttgggacctctctcggctgggatctcagagcctttctgtcccctacccctaccccatgtgctgtcgattttgcagatggggacaacctggggcctcccggaactctgccaccctggggaagttgggggagggccttagtcccggatcacaaccccgtctgctccccagaatcctttcctaagaatcgttgaggaccaaagttgtctttgctgacacgtgttgcttttctctttgccttttattgtttcagagaaaaatcaagttgactgtgtcaagtaacaccccaccccttacccccgtccagccatagtggctctctggagacacaggtcacaggcggagggtcccctgatcatccccaaccacacagccagggggacttgacccctgtccacccctgtctcgtgctccctcagacccccacaaaccggccaagcagtccggggaggcttcccctccacacaactcttagcatgtgattgcagatgtgaaatcaaaacgttgtttgttttttgttttgttttgattctaccccgtcggtccagtgtctgcacagacgccttcatttctctgtaaatatgtgacttggaacaaatgtttaacacaaacgagaagtggtcatgaatgcatggtgttgagatgttttgcactattctgactttttggtctctgtaaaaatattttattaacagcagacattaaaaaaagaaaaaccacacacagccttgg

SEQ ID NO: 5413 - DNA, 958 bp, Homo sapiens
caaacttttccgccctgggctcgggatcctggactccggggcctccccgtcctcccctttcccgggttccagctccggcctctggactaggaaccgacagcccccctccccgcgtccctccctctctctccagccgttttggggaggggctctccacgctccggatagttcccgagggtcatccgcgccgcactcgcctttccgtttcgccttcacctggatataatttccgagcgaagctgcccccaggatgaccacgctggccggcgctgtgcccaggatgatgcggccgggcccggggcagaactacccgcgtagcgggttcccgctggaagtgtccactcccctcggccagggccgcgtcaaccagctcggcggtgtttttatcaacggcaggccgctgcccaaccacatccgccacaagatcgtggagatggcccaccacggcatccggccctgcgtcatctcgcgccagctgcgcgtgtcccacggctgcgtctccaagatcctgtgcaggtaccaggagactggctccatacgtcctggtgccatcggcggcagcaagcccaagcaggtgacaacgcctgacgtggagaagaaaattgaggaatacaaaagagagaacccgggcatgttcagctgggaaatccgagacaaattactcaaggacgcggtctgtgatcgaaacaccgtgccgtcagtgagttccatcagccgcatcctgagaagtaaattcgggaaaggtgaagaggaggaggccgacttggagaggaaggaggcagaggaaagcgagaagaaggccaaacacagcatcgacggcatcctgagcgagcgaggaaaggccctggtctccggagtttcctcgcattaaaggagagagagagagagtactcttttgggcaacggccctccaaaattgcccccacattggctgccttataaatatgtctgtgtgttg

SEQ ID NO: 5414 - DNA, 4208 bp, Homo sapiens
gcagggctggagtgtctatttcgagctcagcggcagggctcgggcgcgagtcgagaccctgctcgctcctctcgcttctgaaaccgacgttcaggagcggctttttaaaaacgcaaggcacaaggacggtcacccgcgcgactatgtttgctgatttttcgccttgccctctttaaaagcggcctcccattctccaaaagacacttcccctcctccctttgaagtgcattagttgtgatttctgcctccttttcttttttctttcttttttgttttgctttttccccccttttgaattatgtgctgctgttaaacaacaacaaaaaaacaacaaaacacagcagctgcggacttgtccccggctggagcccagcgccccgcctggagtggatgagcctctccatgagagatccggtcattcctgggacaagcatggcctaccatccgttcctacctcaccgggcgccggacttcgccatgagcgcggtgctgggtcaccagccgccgttcttccccgcgctgacgctgcctcccaacggcgcggcggcgctctcgctgccgggcgccctggccaagccgatcatggatcaattggtgggggcggccgagaccggcatcccgttctcctccctggggccccaggcgcatctgaggcctttgaagaccatggagcccgaagaagaggtggaggacgaccccaaggtgcacctggaggctaaagaactttgggatcagtttcacaagcggggcaccgagatggtcattaccaagtcgggaaggcgaatgtttcctccatttaaagtgagatgttctgggctggataaaaaagccaaatacattttattgatggacattatagctgctgatgactgtcgttataaatttcacaattctcggtggatggtggctggtaaggccgaccccgaaatgccaaagaggatgtacattcacccggacagccccgctactggggaacagtggatgtccaaagtcgtcactttccacaaactgaaactcaccaacaacatttcagacaaacatggatttactttggccttcccaagtgatcacgctacgtggcaggggaattatagttttggtactcagactatattgaactccatgcacaaataccagccccggttccacattgtaagagccaatgacatcttgaaactcccttatagtacatttcggacatacttgttccccgaaactgaattcatcgctgtgactgcataccagaatgataagataacccagttaaaaatagacaacaacccttttgcaaaaggtttccgggacactggaaatggccgaagagaaaaaagaaaacagctcaccctgcagtccatgagggtgtttgatgaaagacacaaaaaggagaatgggacctctgatgagtcctccagtgaacaagcagctttcaactgcttcgcccaggcttcttctccagccgcctccactgtagggacatcgaacctcaaagatttatgtcccagcgagggtgagagcgacgccgaggccgagagcaaagaggagcatggccccgaggcctgcgacgcggccaagatctccaccaccacgtcggaggagccctgccgtgacaagggcagccccgcggtcaaggctcaccttttcgctgctgagcggccccgggacagcgggcggctggacaaagcgtcgcccgactcacgccatagccccgccaccatctcgtccagcactcgcggcctgggcgcggaggagcgcaggagcccggttcgcgagggcacagcgccggccaaggtggaagaggcgcgcgcgctcccgggcaaggaggccttcgcgccgctcacggtgcagacggacgcggccgccgcgcacctggcccagggccccctgcctggcctcggcttcgccccgggcctggcgggccaacagttcttcaacgggcacccgctcttcctgcaccccagccagtttgccatggggggcgccttctccagcatggcggccgctggcatgggtcccctcctggccacggtttctggggcctccaccggtgtctcgggcctggattccacggccatggcctctgccgctgcggcgcagggactgtccggggcgtccgcggccaccctgcccttccacctccagcagcacgtcctggcctctcagggcctggccatgtcccctttcggaagcctgttcccttacccctacacgtacatggccgcagcggcggccgcctcctctgcggcagcctccagctcggtgcaccgccaccccttcctcaatctgaacaccatgcgcccgcggctgcgctacagcccctactccatcccggtgccggtcccggacggcagcagtctgctcaccaccgccctgccctccatggcggcggccgcggggcccctggacggcaaagtcgccgccctggccgccagcccggcctcggtggcagtggactcgggctctgaactcaacagccgctcctccacgctctcctccagctccatgtccttgtcgcccaaactctgcgcggagaaagaggcggccaccagcgaactgcagagcatccagcggttggttagcggcttggaagccaagccggacaggtcccgcagcgcgtccccgtagacccgtcccagacacgtcttttcattccagtccagttcaggctgccgtgcactttgtcggatataaaataaaccacgggcccgccatggcgttagcccttccttttgcagttgcgtctgggaaggggccccggactccctcgagagaatgtgctagagacagcccctgtcttcttggcgtggtttatatgtccgggatctggatcagattctgggggctcagaaacgtcggttgcattgagctactgggggtaggagttccaacatttatgtccagagcaacttccagcaaggctggtctgggtctctgcccaccaggcggggaggtgttcaaagacatctccctcagtgcggatttatatatatatttttccttcactgtgtcaagtggaaacaaaaacaaaatctttcaaaaaaaaaatcgggacaagtgaacacattaacatgattctgtttgtgcagattaaaaactttatagggacttgcattatcggttctcaataaattactgagcagctttgtttggggagggaagtccctaccatccttgtttagtctatattaagaaaatctgtgtctttttaatattcttgtgatgttttcagagccgctgtaggtctcttcttgcatgtccacagtaatgtatttgtggtttttattttgaacgcttgcttttagagagaaaacaatatagccccctacccttttcccaatcctttgccctcaaatcagtgacccaagggagggggggatttaaagggaaggagtgggcaaaacacataaaatgaatttattatatctaagctctgtagcaggattcatgtcgttctttgacagttctttctctttcctgtatatgcaataacaaggttttaaaaaaataataaagaagtgagactattagacaaagtatttatgtaattatttgataactcttgtaaataggtggaatatgaatgcttggaaaattaaactttaatttattgacattgtacatagctctgtgtaaatagaattgcaactgtcaggttttgtgttcttgttttcctttagttgggtttatttccaggtcacagaattgctgttaacactagaaaacacacttcctgcaccaacaccaataccctttcaaaagagttgtctgcaacatttttgttttcttttttaatgtccaaaagtgggggaaagtgctatttcctattttcaccaaaattggggaaggagtgccactttccagctccacttcaaattccttaaaatataactgagattgctgtggggagggaggagggcagaggctgcggtttgactttttaatttttcttttgttatttgtatttgctagtctctgatttcctcaaaacgaagtggaatttactactgttgtcagtatcggtgttttgaattggtgcctgcctatagagatatattcacagttcaaaagtcaggtgctgagagatggtttaaagacaaattcatgaaggtatattttgtgttatagttgttgatgagttctttggttttctgtatttttccccctctctttaaaacatcactgaaatttcaataaatttttattgaaatgtc

SEQ ID NO: 5415 - DNA, 5369 bp, Homo sapiens
ctctgtcgcccaggctggagtgcagtagagtgatctcggctcactgcaagctccacctcctgggttcacgccattctcctgcctcagccttccgagtagcttggactacaggcacccaccaccacacccagctaatttttttgtattttttttagtagagacggggttttaccatgttggccaggatggtcttgatctcctgacctcatgatccacctgcctcggcctcacaaagtgctgggattacaggtatgagccaccacgcccggccaggcatttctttatagcaatgccaggatggtgtgccagactgtatcagagacaagtgatacaaagatgaccaagatacagtacttgcccaggaagaagaattcctgtggccacctctgtcttatatcaagagataagtgtgaaacagagtatccacaacagtgtttgggaagacagtgtgagtggctcccaactctaccaacaaaggcttcaaaggagtaatgacatttgaattgagtcttaaaggataaatgtattacttggcctgacaacacagaagaaaaggtcatttttgtcaaagaaatcaaccttgaaaaaatgccgcagttcatgacttgtaccagtgaaggtagcaaggtctgtgtgttggtgatgaatttgcaggggatcaggctgaagaaacaagacttgggagagaggatgtgagacctttttatgacatgcatagagttggcacctcagcctttgcatggtagggagctagctgaaggctacctccatgacagatgtacactttgaaaagacaggccgggtgcggtggctcacgtctgtaatcccagcattttgggaggctgaggtgggcaaatcacttgaagtcaggagttagagatcagcctggccaacacagtgaaacctggtctctactaaaaaaaataaaataattagccaggcatggtggcgcacacctgtaatcccaactattcgggaggctgaggcagaagaattgcttgaacacgggaggcggaagttgcagtgagctgagatggcaccaccgcactccagcctgggcgacagatcaagactccatctcaaaataaaggaagatacagctaatctatatttctttcaccagagatcaccaccactaacaattcatactggtcgtttttccctgaatgttttacctatgtaggaaaattttacatcccaatttttaatttaacactatgaaaagcatttctttttataataaagacactctattagtatacttttgatggcttcaaaactacttttgtatagatgcaaaattaaaatatcaaattgtttcttttgtttgtttgtttttttgttttttttttgagacagagtctcactctgtcgcccaggctaaagcacagtggcatgatctcggctcactgcaagcttttcctcccaggttaaagtgattctcatgccgcagcctcccgagaagctgggactacaggtgtgcaccaccacccccggctaattttttgtatttttacaaaacacaaagagagacggggtttcaccatgttgggcaggctggtctcaaactcctgacctcaggtgatccgcctgcctcagcctcccaaagtgctgggattgcaggcgtgggccaccgtgccctgcctcaaattgtttctttaatggttgttcccaaattttcataaataactttttacgtaacatttttgggcataaagttgtctaaaattattttcataggctagataccttaagtacacttaatgatttaaatcatacttaacattaagactttaatgttgctatattgatatttagtaaaagtacaaaacttgtgctttagagtttagacatattcaggatataagatagttttgttggatttggcgaacacttgccctaggagaataaaaaatgatgaattagtccaaaatgttccagttttctaatttgtcagactcggtaaatggtatcatcaccaaccaagaaaaacagaagatacagggagagtagattttgcagaaaagataaggagttctgtttgggacttgctgcctttgatatactgcactgggagaaaatccaagtcgaacagagtggacaagtgagaatgtgctgtggaatcaacaagaggggtggggagtctacctacctagatttgagagcagtttggcaaataattgttagtaaatgtcatagaaattcgtgggagagagaagttgataagaacagaggggtaaaggatgaaacagaggaaacactgccgcttctcagggttgggtacaagagaagccagggaaatagactaagaaagagtgatcagggaaaccgggagacagtgttgtcacggaagcctggagtgtgagattttccagaaaagaaggaatgaaagaatgaatggtctgtagatccattactcagcactatcagacacattgtccccttttgatatcccataatgaaatttatagataatataatctacttgtgcacaaaattttagaaattaatataatgccccaactataatataaagtgtattagtcagggttctctagagggacagaactaataggatatatatatataaaggggagtttataaagtattaacttacactattacaaggtcccacaataggctgtctgcaagcttgaggagcagagagccaggctgagtctcaacactgaagaacttggagtccgatgttcgagggcaggaaaaatccagcacaggagaaagacgcaggctgggaggctaggccagtctctcctttccatgttcctctgcctgctttatattcactggcagctgattggattgtgcccaccagattaagggtggatctgccttccccagcccactgactcaagtattaatctcttttgacaacaccctcacagacacacccaggatcaatatttgtatccttcaatccaattaagctgacactcagaattaaccatcacataaaggaagaagtaaaaggaaagtatattttatataataagtatttaaatatgtaaacattgggacatgactaaaactgactgaacacattgaaggagtcacttggttggtctgatgtgcagaattaccatgcatgctacaaatggagaggggtctacatgagctgtattgcttgtggtgccgcagatgacttgaatttccagaatgaaaatccattcctcgctgccgaagaattaacaggatgctctccaatgaatccctccatcctcctgccttcagccgttccaactcagaagcctccgtagacagcgcctccatggaggatttctggcgggaaatagaaagtattaaagacagcagcatgggagggcaagaagagccaccgccagctgaggtcacacctgtggatgaaggagaacttgaagcagaatggctgcaagatgtgggtttatcaactctgatctcaggtgatgaagaggaagatggcaaagccttgctctccacattgactcgaacccaagcagctgccgtgcaaaagagataccatacctatacccaaaccatgaggaaaaaggataagcaatctatcagggatgtcagagacatttttggagtcagtgaatctcctcctcgtgatacctgtggcaaccacactaatcagctggatggcaccaaggaagaaagagagcttccaagagttatcaagacaagtggttccatgccagatgatgcttctctcaacagtactaccctgtctgacgcatcccaggataaagaagggagttttgcggttcccaggagtgactctgtggctatacttgagaccattccagttctaccagttcattccaatggatcaccggagcctggacagccagttcagaatgcgataagtgatgatgattttctggaaaagaacattccaccagaggctgaagagctgtcatttgaagtgtcttattcagaaatggttacggaggctctaaaaagaaataaacttaagaaatcagagattaagaaagaagactatgttttaactaaatttaatgttcagaaaaccagatttggcttaactgaagcaggagatctgtctgctgaagacatgaagaaaatccgccatctctctctgattgaattgactgccttttttgatgcctttggaattcaactgaaaaggaacaaaacagagaaagtaaaaggacgagacaatgggatttttggagttccacttacagtcctcctggacggtgaccgaaagaaagaccctggagtgaaagttcccctggtattacaaaaattttttgagaaagttgaggaatcaggtctggaatctgaaggaatttttcgactttcaggatgtactgctaaagtcaagcaataccgtgaagaacttgatgccaagtttaatgctgataaatttaaatgggacaaaatgtgccatagagaagctgcagtaatgttgaaagcgtttttcagagaactacccacctctctcttccctgtggaatatatacctgccttcatcagtctaatggaaagagggcctcacgtcaaagtacagtttcaagccttacacctcatggtcatggcgctgcctgatgccaacagagatgcagctcaggccctcatgacattcttcaataaagtgattgccaatgaatcaaaaaaccgaatgagtctgtggaacatttctacagtgatggcaccaaaccttttcttcagtagaagcaaacactctgattatgaagaattactgttagcaaacactgcggcccacatcatccgcctaatgcttaagtaccagaagattttgtggaaggttccatctttcttaatcactcaagtaagaagaatgaatgaagccacgatgctattgaagaagcagctcccaagtgtcaggaagctgctcaggaggaagaccctcgagcgggagactgcaagccccaagacttcaaaggtactgcaaaaatcaccctcggcaagacgaatgtctgacgtgccggaaggagtcatacgggtccatgctccacttctctccaaggtgtccatggccattcaactcaacaatcaaaccaaagccaaagacatattggcaaaatttcaatatgaaaacagaatactgcactggcagcgagctgcactttccttcctaaatggaaaatgggttaaaaaagaaagagaagagtcgacagagaccaacaggagccccaaacatgtattcctcttcactattggcctggacatctccacataggcagtcatatagagacttgaaatatcattcaagggatttgggtatccagtagacttttagttacatatactacaaaactgactttgtactctcaagtagacctttcgtagaaagaaaatgtttctaataaaaatgtattagaact

SEQ ID NO: 5416 - DNA, 3741 bp, Homo sapiens; identical to SEQ ID NO: 91

SEQ ID NO: 5417 - DNA, 5710 bp, Homo sapiens; identical to SEQ ID NO: 4424

SEQ ID NO: 5418 - DNA, 3882 bp, Homo sapiens
acatgctgcccaggctgcgcgggtgattggcttggctggacctgaatgatgcggctgtgattgctgaattgtctgggcaggtttggagtctctggcaagctcccctgactgtgcatccctctggagacgaagaggagggggaggcctgtcctctctgggatccattggtcacatccccctgaggattcccgaatgcctacctccagtgtcgtcaacatggagttctgaagtccatgtggctcttcacagtgaatcaggtgttaaggaagatgcagagacgccacagcagcaacacggataacattccacctgaaagaaaccgcagccaggcgctcagctccgaggcgagtgtggatgaaggtggcgtctttgagagtctgaaggcagaggcagcctccccaccagcgctcttctcgggcttatcaggcagcctccccaccagctcgttcccctccagcctggtgctgggctcctcggctggcggcggggacgtgttcatccagatgcccgcgtccagggaggaaggagggggccggggcgaggggggcgcctaccaccaccgccagccccaccaccatttccaccatggcggccaccgcgggggctccctgctgcagcacgtgggtggggaccaccgggggcactcggaggagggaggcgacgagcagcctgggacgcccgcccccgccctgtccgagctgaaggctgtgatctgctggctccagaaaggactccccttcatcctgatcctcctggccaaactgtgctttcagcataagctcggcattgctgtgtgcatcgggatggccagcaccttcgcctatgccaactccacgcttcgagaacaggtctcactgaaggagaagaggtcagtgctggtcatcttgtggatcctggcctttctggcggggaacaccctctatgtgctttatacattcagctcccagcagctgtacaacagcctcatattcctgaagcccaacctggagatgctggacttctttgacctgctatggattgtggggatcgcagactttgttctgaagtacatcaccatcgccctcaagtgcctcatcgtggccctgcccaagatcatcctggctgtcaagtccaagggaaagttctatctggtcatcgaggagctgagccagctgttccgatcccttgtccccatccagctgtggtacaaatacatcatgggtgacgactcctccaacagctacttcctgggcggggtcctgatcgttctctacagcctctgcaagtccttcgacatctgtggacgtgtgggcggagttaggaaagccctgaagcttctctgtacctctcagaactatggagtccgagccaccgggcagcagtgcacagaagctggtgacatctgcgccatctgtcaggccgagttccgagagcctctgattctcctgtgccagcacgtgttctgtgaggagtgcctctgcctgtggctggaccgtgagcgcacctgcccgctctgccgctcggtcgccgtggacaccctgcgctgctggaaggacggcgccacgtccgcacacttccaggtgtactaggaccgaacactgaggacacccagaaggacgccaagggtcagcatgcccggacccagccctgcgggggcttcctgagaaacaggcctcaagcacttacatcctgcctcttgccctccaccacctctgaccccaaagtcccgcccctgtcttgtccttctgaccttcatcttcctctctcgttctgtggtatagtgcgtgcctccttcccctgcaaaaggggacgtcttcctaactcagacttgatgcccttctagatgcatcttccttctccactccaagtcaaggacctggcaatacatgaagttcccacttgttggttattttctctttcttttttcttttcttttctttctctctctctctgtttccctccctccctccttccttccttccttccttttttttttttttttaaaacaaggtctcgctctatcacccaggctggagtgcagtggcacaatctcggctcgctgcaacctccacctcctgggttcaagcgattctcctgcctcagcctcccgagtagctgggattacaggcacccaccaacacacttggctaatttttgtattttttagtagagacagggttttgccatgttggccaggctggtctccaactcttgacctcaaatgatcagctcgcctcagcctcacgaagtgctgggattacaggcatgagccaccgtgcccaggctcacttttttttttttttttttttttttgagacagggtctgggtcttcacccaggctggagtgcagttggcacaatcacagctcactgcaaccttgaactcctgggcccaagccatcctcccgcctcagcctcccaagtagctgggactacaggtgtgtgccaccaggcctggctaatttttttttttttttaatttttagtagaggcgaggacttattatgttgtccagggtgttctcaaactcctgggctcaagcaatcctcctgtcctggcctcgcaaagtgctgagtgctggaattacaggtatgagcccctgtgcccagcccacctgctggttattttaacttagtacctagtacctaggacttgatggtgcaggctggggaggagcctagagatcactgcctcccagatagcccaggcctgcagattagaatccctgtgagccctgtgaagtattttttcttttcttttctttttttttttttttttgttgttgtgagacagagtcttgctctgttgcccaggctggagtgcaatagcacgatcttggctcactgcaacctccgcctcccgggttcaagtgattctcctgcctcagcctcccgagtagttgggacaacagatgcgtgccaccatgcccagctaattttttttttgtatttttagtagagatggggtttcaccacgttggccaggctggcctcaaactcctgacctcaagtgatccacctgcctcagcctcccagagtgctgggattacaggcatgagccaccacacctggcccaaagtattttcaaaatacagttgttgggccccaccatatacctgtaatgacttaaggtcccaaatacttcatgcgcagcaggcaaagcatgcagcatcctgcttggattacgtgctgtcatcctcacaacagccctgtgatgggggaggtactgttgggtcccctgttttatagatgaggaaacttgggcacagagcttggtgcggtaactttcccagggtcacccagccagcatgggcgggccaagtttccaacagaggcctggtacagtttcagaacccacatctaaaaaaaaataaatttattagagatgaggtttctaataaaaatccaggttgtccaggctagattcaaactcctgggctcaagtgatcctccctcctcagcctcccaagcagctgcaactacaggcacactccgctatccccagcagagcccgcactcttaacctccgcactgctctgcccctcagacattccaggcatggggcccagcagacacggtcttctaaaagcacacgagaggccgggtgtggtggcccatgcctgtagtgccagcattttgggaggctgaagcaggcgggtcacctgaggtcaagagttcaagactagcctggccaacatggcaaaaccccctctttactaaaaaatacaaaaattagccgggcgcggtggcgggtgcctgtaatcccagctactcaggaggctaaggcagggagaactgcttgaactcgggaggtgaaagttgcagtgagccgagattgcaccacagcactccaacctgggtgacagagtgagtgagactctgtctaaaaaaaaaaagaaagaaa

SEQ ID NO: 5419 - DNA, 1394 bp, Homo sapiens
tttggcgcctgcgcgctgagtgcgtgccgctccgccgaccgaagaggctggacatgacaccagtggcatatcacggccatggggtctcagcattccgctgctgctcgcccctcctcctgcaggcgaaagcaagaagatgacagggacggtttgctggctgaacgagagcaggaagaagccattgctcagttcccatatgtggaattcaccgggagagatagcatcacctgtctcacgtgccaggggacaggctacattccaacagagcaagtaaatgagttggtggctttgatcccacacagtgatcagagattgcgccctcagcgaactaagcaatatgtcctcctgtccatcctgctttgtctcctggcatctggtttggtggttttcttcctgtttccgcattcagtccttgtggatgatgacggcatcaaagtggtgaaagtcacatttaataagcaagactcccttgtaattctcaccatcatggccaccctgaaaatcaggaactccaacttctacacggtggcagtgaccagcctgtccagccagattcagtacatgaacacagtggtgaattttaccgggaaggccgagatgggaggaccgttttcctatgtgtacttcttctgcacggtacctgagatcctggtgcacaacatagtgatcttcatgcgaacttcagtgaagatttcatacattggcctcatgacccagagctccttggagacacatcactatgtggattgtggaggaaattccacagctatttaacaactgctattggttcttccacacagcgcctgtagaagagagcacagcatatgttcccaaggcctgagttctggacctacccccacgtggtgtaagcagaggaggaattggttcacttaactcccagcaaacatcctcctgccacttaggaggaaacacctccctatggtaccatttatgtttctcagaaccagcagaatcagtgcctagcctgtgcccagcaaatagttggcactcaataaagatttgcagaatttaatacagatcttttcagctgttcttagggcattataaatggaaatcataacgtggttctaggttatcaaaccatggagtgatgtggagctaggattgtgagtgacctgcaggccattatcagtgcctcatctgtgcagaagtggcagcagagagggaccatccaaatacctaagagaaaacagacctagtcaggatatgaatttgtttcagctgttcccaaaggcctgggagctttttgaaaagaaagaaaaaagtgtgttggctttttttttttttagaaagttagaattgtttttaccaagagtctatgtggggcttgattcacccttcatccattggctggaacatggattggggatttg

SEQ ID NO: 5420 - DNA, 5174 bp, Homo sapiens
cccgccgcggaggccgagcgagcccccagcccagcctggcgactggggaccccggcacatgaggtggacgcccccggggaagacttgggtgcacagccaggcgagaaggtcttgagtcagacagagcaccagccttggggaccctggaccactatcatggagactgagagcgagcagaactccaattccaccaatgggagttctagctcagggggcagctctcggccccagatagctcaaatgtcactttatgaacgacaagcagtgcaggctctgcaagcactgcagcggcagcccaatgcagctcagtatttccaccagttcatgctccagcagcagctcagtaatgcccagctgcatagcctggctgccgtccagcaggccacaattgctgccagtcggcaggccagctccccaaacaccagcactacacagcagcagactaccaccacccaggcctcgatcaatctggccaccacatcggccgcccagctcatcagccgatcccagagtgtgagctctcccagtgctaccaccttgacccaatctgtgctactggggaacaccacctccccacccctcaaccagtctcaggcccagatgtatctacggccacagctgggaaacctattgcaggtaaaccgaaccctgggtcggaatgtgcctctagcctcccaactcatcctgatgcctaatggggcggtggctgcagtccagcaggaggtgccatctgctcagtctcctggagttcatgcagatgcagatcaggttcagaacttggcagtaaggaatcaacaggcctcagctcaaggacctcagatgcaaggctccactcagaaggccattcctccaggagcctcccctgtctctagcctctcccaggcctctagccaggccctagcggtggcacaggcttcctctggggccacaaaccagtccctcaaccttagtcaagctggtggaggcagtgggaatagcatcccagggtccatgggtccaggtggaggtgggcaggcacatggtggtttgggtcagttgccttcctcaggaatgggtggtgggagctgtcccagaaagggtacaggagtggtgcagcccttgcctgcagcccaaacagtgactgtgagccagggcagccagacagaggcagaaagtgcagcagccaagaaggcagaagcagatgggagtggccagcagaatgtgggcatgaacctgacacggacagccacacctgcgcccagccagacacttattagctcagccacctacacacagatccagccccattcactgattcagcaacagcaacagatccacctccagcagaaacaggtggtgatccagcagcagattgccatccaccaccagcagcagttccagcaccggcagtcccagctccttcacacagctacacacctccagttggcgcagcagcagcagcagcaacaacagcaacagcagcaacagcagcagccgcaagccaccaccctcactgcccctcagccaccacaggtcccacctactcagcaggtcccaccttcccagtcccagcagcaagcccaaaccctggtcgttcagcccatgcttcagtcttcacccttgtctcttccacctgatgcagcccctaagccaccaattcccatccaatccaaaccacctgtagcacctatcaagccgcctcagttaggggccgctaagatgtcagctgcccagcaaccaccaccccatatccctgtgcaagttgtaggcactcgacagccaggtacagcccaggcacaggctttggggttggcacagctggcagctgctgtacctacttcccgggggatgccaggtacagtgcagtctggtcaggcccatttggcctcctcgccaccttcatcccaggctcctggtgcactgcaggagtgccctcccacattggcccctgggatgacccttgctcctgtgcaggggacagcacatgtggtaaagggtggggctaccacctcctcacctgttgtagcccaggtccctgctgccttctatatgcagtctgtgcacttgccgggtaaaccccagacattggctgtcaaacgcaaggctgactctgaggaggagagagatgatgtctccacattgggttcaatgcttcctgccaaggcatctccagtagcagaaagcccaaaagtcatggacgagaagagcagtcttggagaaaaagctgaatcagtggctaatgtgaatgctaatactccaagcagtgaactagtagccttgacccccgccccttcagtaccgcctcctacactagccatggtgtctagacaaatgggtgactcaaaacccccacaggccatcgtgaagccccagattctcacccacatcattgaaggctttgttatccaggaaggagcagaacctttcccggtgggttgttctcagttactgaaggagtctgagaagccactacagactggccttccgacagggctgactgagaatcagtcaggtggccctttgggagtggacagcccatctgctgagttagataagaaggcgaatctcctgaagtgcgagtactgtgggaagtacgcccccgcagagcagtttcgtggctctaagaggttctgctccatgacttgcgctaagaggtacaatgtgagctgtagccatcagttccggctgaagaggaaaaaaatgaaagagtttcaagaagccaactatgctcgcgttcgcaggcgtggaccccgccgcagctcctctgacattgcccgtgccaagattcagggcaagtgccaccggggtcaagaagactctagccggggttcagataattccagttatgatgaagcactctctccaacatctcctgggcctttatcagtaagagctgggcatggagaacgtgacctggggaatcccaatacagctccacctacaccggaattacatggcatcaaccctgtgttcctgtccagtaatcccagccgttggagtgtagaggaggtgtacgagtttattgcttctctccaaggctgccaagagattgcagaggaatttcgctcacaggagattgatggacaggcccttttattacttaaagaagaacatcttatgagtgccatgaacatcaagctgggccctgccctcaagatctgcgccaagataaatgtcctcaaggagacctaaggtggccctcttgcacaaaccagcctaaggcagacactctccactgtccaggttataacctggtaccagcagactttgcagggaagaaagagttgttccaatcatgtaaccttctgtaggggattactgagacagggaagagaagtgcaagaattggttgctggtgctacatggcggcagctttgacattttctctgggttctactttattttttaaaatctttacagttctcaccatttcacgtaccttaatccaatctttataaaagaggcagtctagagaactaggactgctcagccttatcctggagtggagcatttagcccaggtcttaattctccaagaggaggaatacatagtatggtaaggcaaggaactgggtggaatgtcaggttgcctgcccaatgggagaggtagggtttttctagcttgtgtgacagaagtagcaaaatctggtcctcccccctcccagtgtagctgtggctcagagttttttctttttgttgtcacttactcccttgtgattgaattttttctcctgcatccatggcaggatccccagccagtatagagacttggttggcatcttctgctgcagggactaaaagtatttgactggggcacatgtggctgttgtcattctttctgcatcccactgttcccctccaatttatgttattttctaccctgtttttcagttccatctctgctctgtcctatagctttataaaaccagagtgtgtggggctgaggtcaggagtataagtacctgccttaggcactattccttatataacaaaaatattaaatatttttttcctcagtaaaaggatgaaaattggtttcagttgtcttactctattccagtctttgcccactttcacacaaatgacaaggccaatatgttttgtttgttttttaatcattaagagtttttgtacaaaaggtgatggttttttttcttcattttaaaacaccagggtgtgggggagggatgcaaacaaataacaaaaaagatgcttttgtaacattattttccctgtttagaaagaaaaaaatcactccaatagtattgaaaagtccaaagatgaaatagtttcattttcttttcctaaggcttataaaaggccccctgcctgttgattccatccctcttttgtgtccagtggagccatgttactcttcagtggcccaggggttcactattaaagaaagatcagtccaggtttctgggcacatggcctaaacaggaagatggaagcatcagaggattaaaaacctttccccacagaaatgtgggcaagaagacacttccctgagccagcagaagggacaggtgcagcagcattccacacccagcgcagaggacagcagagccctcgatgtcccacttctgcttccgttccctttctagaagattgaaaaaaaggtcaaaaccacatgcctgtggagaaagtgcgacatgtttagaaatactggtagggaaccaggagtaagaaaagctttaccagcttttactacaaatggatgaaagacatcaggatcccaccaccgcaaggtaaagtgacttcccttttctggaacccctgtggcacaggagtaccaattttcctttccaacgaactggatttctggataggcattttggctgtatgtggacagataagaccacagtccttagcccaatcccagctatacagtcaccccaatttccacaaatgatgtgatggtaccgtataatcctgtaattgggaaatttcacatttttcctgtcctaatctcagaggtgggagaagcaagtctagaacatctccaggctcagactaaacgagagtacttggactgcaaccaagtaatcactgcaaagtagttccaagcagcaagaaataccagattctcatggaggctactatagggtacagaataacaacatgaaagcaatcaaccctgtataaataatgtttcttggcattttttttttaattaaagaaatccagtgtctc

SEQ ID NO: 5421 - DNA, 1525 bp, Homo sapiens
atgctctgaaaactcttcagacactgaggggcaccagaggagcagactacaagaatggcacacgctatggaaaactcctggacaatcagtaaagagtaccatattgatgaagaagtgggctttgctctgccaaatccacaggaaaatctacctgatttttataatgactggatgttcattgctaaacatctgcctgatctcatagagtctggccagcttcgagaaagagttgagaagttaaacatgctcagcattgatcatctcacagaccacaagtcacagcgccttgcacgtctagttctgggatgcatcaccatggcatatgtgtggggcaaaggtcatggagatgtccgtaaggtcttgccaagaaatattgctgttccttactgccaactctccaagaaactggaactgcctcctattttggtttatgcagactgtgtcttggcaaactggaagaaaaaggatcctaataagtatgtaaacagaacatggacgttttgttctcatttcgtgatggagactgcagtaaaggattcttcctggtctctctattggtggaaatagcagctgcttctgcaatcaaagtaattcctactgtattcaaggcaatgcaaatgcaagaacgggacactttgctaaaggcgctgttggaaatagcttcttgcttggagaaagcccttcaagtgtttcaccaaatccacggcaaatcatgtgaacccaaaagcatttttcagtgttcttcgcatatatttgtctggctggaaaggcaacccccagctatcagacggtctggtgtatgaagggttctgggaagacccaaaggagtttgcagggggcagtgcaggccaaagcagcgtctttcagtgctttgacgtcctgctgggcatccagcagactgctggtggaggacatgctgctcagttcctccaggacatgagaagatatatgccaccagctcacaggaacttcctgtgctcattagagtcaaatccctcagtccgtgagtttgtcctttcaaaaggtgatgctggcctgcgggaagcttatgacgcctgtgtgaaagctctggtctccctgaggagctaccatctgcaaatcgtgactaagtacatcctgattcctgcaagccagcagccaaaggagaataagacctctgaagacccttcaaaactggaagccaaaggaactggaggcactgatttaatgaatttcctgaagactgtaagaagtacaactgagaaatcccttttgaaggaaggttaatgtaacccaacaagagcacattttatcatagcagagacatctgtatgcattcctgtcattacccattgtaacagagccacaaactaatactatgcaatgttttaccaataatgcaatacaaaagacctcaaaatacctgtgcatttcttgtaggaaaacaacaaaaggtaattatgtgtaattatactagaagttttgtaatctgtatcttatcattggaataaaatgacattcaataaataaaaatgcataagatata

SEQ ID NO: 5422 - DNA, 5239 bp, Homo sapiens
tccttgcgagaaagttacctgtggccgcccaagtccgccactttctgctctgtgtctgcccattgccacgatccaggaggactccgcgccgcccggccgcctccgagctcgggccccatgtgaggggcccccccttatcccacctttccggctaggtgagggcgcgagcgggcgagcgagcgagagtggtgaggggggacggaaaagcagaattacctgtagctcttgttctgccatctcgggcgctctcacacaccttcacctgcacagacttgaaagtccagtttcaccagaggctgaggctccaggaaaagcggagcaagttcattggatcaaacatgtcacaagagtcggacaataataaaagactagtggccttagtgcccatgcccagtgaccctccattcaatacccgaagagcctacaccagtgaggatgaagcctggaagtcatacttggagaatcccctgacagcagccaccaaggccatgatgagcattaatggtgatgaggacagtgctgctgccctcggcctgctctatgactactacaaggttcctcgagacaagaggctgctgtctgtaagcaaagcaagtgacagccaagaagaccaggagaaaagaaactgccttggcaccagtgaagcccagagtaatttgagtggaggagaaaaccgagtgcaagtcctaaagactgttccagtgaacctttccctaaatcaagatcacctggagaattccaagcgggaacagtacagcatcagcttccccgagagctctgccatcatcccggtgtcgggaatcacggtggtgaaagctgaagatttcacaccagttttcatggccccacctgtgcactatccccggggagatggggaagagcaacgagtggttatctttgaacagactcagtatgacgtgccctcgctggccacccacagcgcctatctcaaagacgaccagcgcagcactccggacagcacatacagcgagagcttcaaggacgcagccacagagaaatttcggagtgcttcagttggggctgaggagtacatgtatgatcagacatcaagtggcacatttcagtacaccctggaagccaccaaatctctccgtcagaagcagggggagggccccatgacctacctcaacaaaggacagttctatgccataacactcagcgagaccggagacaacaaatgcttccgacaccccatcagcaaagtcaggagtgtggtgatggtggtcttcagtgaagacaaaaacagagatgaacagctcaaatactggaaatactggcactctcggcagcatacggcgaagcagagggtccttgacattgccgattacaaggagagctttaatacgattggaaacattgaagagattgcatataatgctgtttcctttacctgggacgtgaatgaagaggcgaagattttcatcaccgtgaattgcttgagcacagatttctcctcccaaaaaggggtgaaaggacttcctttgatgattcagattgacacatacagttataacaatcgtagcaataaacccattcatagagcttattgccagatcaaggtcttctgtgacaaaggagcagaaagaaaaatccgagatgaagagcggaagcagaacaggaagaaagggaaaggccaggcctcccaaactcaatgcaacagctcctctgatgggaagttggctgccatacctttacagaagaagagtgacatcacctacttcaaaaccatgcctgatctccactcacagccagttctcttcatacctgatgttcactttgcaaacctgcagaggaccggacaggtgtattacaacacggatgatgaacgagaaggtggcagtgtccttgttaaacggatgttccggcccatggaagaggagtttggtccagtgccttcaaagcagatgaaagaagaagggacaaagcgagtgctcttgtacgtgaggaaggagactgacgatgtgttcgatgcattgatgttgaagtctcccacagtgaagggcctgatggaagcgatatctgagaaatatgggctgcccgtggagaagatagcaaagctttacaagaaaagcaaaaaaggcatcttggtgaacatggatgacaacatcatcgagcactactcgaacgaggacaccttcatcctcaacatggagagcatggtggagggcttcaaggtcacgctcatggaaatctagccctgggtttggcatccgctttggctggagctctcagtgcgttcctccctgagagagacagaagccccagccccagaacctggagacccatctcccccatctcacaactgctgttacaagaccgtgctggggagtggggcaagggacaggccccactgtcggtgtgcttggcccatccactggcacctaccacggagctgaagcctgagcccctcaggaaggtgccttaggcctgttggattcctatttattgcccaccttttcctggagcccaggtccaggcccgccaggactctgcaggtcactgctagctccagatgagaccgtccagcgttcccccttcaagagaaacactcatcccgaacagcctaaaaaattcccatcccttctctctcacccctccatatctatctcccgagtggctggacaaaatgagctacgtctgggtgcagtagttataggtggggcaagaggtggatgcccactttctggtcagacacctttaggttgctctggggaaggctgtcttgctaaatacctccagggttcccagcaagtggccaccaggccttgtacaggaagacattcagtcaccgtgtaattagtaacacagaaagtctgcctgtctgcattgtacatagtgtttataatattgtaataatatattttacctgtggtatgtgggcatgtttactgccactggcctagaggagacacagacctggagaccgttttaatgggggtttttgcctctgtgcctgttcaagagacttgcagggctaggtagagggcctttgggatgttaaggtgactgcagctgatgccaagatggactctgcaatgggcatacctgggggctcgttccctgtccccagaggaagccccctctccttctccatgggcatgactctccttcgaggccaccacgtttatctcacaatgatgtgttttgcttgactttccctttgcgctgtctcgtgggaaaggtcattctgtctgagaccccagctccttctccagctttggctgcgggcatggcctgagctttctggagagcctctgcagggggtttgccatcagggccctgtggctgggtctgctgcagagctccttggctatcaggagaatcctggacactgtactgtgcctcccagtttacaaacacgcccttcatctcaagtggccctttaaaaggcctgctgccatgtgagagctgtgaacagctcagctctgagtcggcaggctggggcttcctcctgggccaccagatggaaagggggtattgtttgcctcactcctggatgctgcgttttaaggaagtgagtgagaaagaatgtgccaagatacctggctcctgtgaaaccagcctcaggagggaaactgggagagagaagctgtggtctcctgctacatgccctgggagctggaagagaaaaacactcccctaaacaatcgcaaaatgatgaaccatcatgggccactgttctctttgaggggacaggtttaggggtttgcgttcgcccttgtgggctgaagcactagctttttggtagctagacacatcctgcacccaaaggttctctacaaaggcccagatttgtttgtaaagcactttgactcttacctggaggcccgctctctaagggcttcctgcgctcccacctcatctgtccctgagatgcagagcaggatggagggtctgcttctagctcagctgtttctccttgaggttgcggaggaattgaattgaatgggacagagggcaggtgctgtggccaagaagatctccgagcagcagtgacggggcaccttgctgtgtgtcctctgggcatgttaacccttctgtggggccaaaggtttgcatcgtggatccagctgtgctccagtctgtcccctcctcctccactctgactgccacgccccggaccagcagcttggggaccctccagggtactaatggggctctgttctgagatggacaaattcagtgttggaaatacatgttgtactatgcacttcccatgctcctagggttaggaatagtttcaaacatgattggcagacataacaacggcaaatactcggactggggcataggactccagagtaggaaaaagacaaaagatttggcagcctgacacaggcaacctacccctctctctccagcctctttatgaaactgtttgtttgccagtcctgccctaaggcagaagatgaattgaagatgctgtgcatgtttcctaagtccttgagcaatcatggtggtgacaattgccacaagggatatgaggccagtgccaccagagggtggtgccaagtgccacatcccttccgatccattcccctctgcatcctcggagcaccccagtttgcctttgatgtgtccgctgtgtatgttagctgaactttgatgagcaaaatttcctgagcgaaacactccaaagagataggaaaacttgccgcctcttcttttttgtcccttaatcaaactcaaataagcttaaaaaaaatccatggaagatcatggacatgtgaaatgagcatttttttcttttttttttttaacaaagtctgaactgaacagaacaagactttttcctcatacatctccaaattgtttaaacttactttatgagtgtttgtttagaagttcggaccaacagaaaaatgcagtcagatgtcatcttggaattggtttctaaaagagtaaggcatgtccctgcccagaaacttaggaagcatgaaataaatcaaatgtttattttccttcttatttaaaatcatgcaaatgcaacagaaatagagggtttgtgccaaatgctatgaacggccctttcttaaagacaagcaagggagattgatatatgtacaatttgctctcatgttttaaaaaaaaaaaggtaaatgtaacttaatagttttgtaaatgggagagggggaatctataaactataaatacagttattttattttttgtacatttttaaggagaaaaaataaatattcataacataagagtaaaa

SEQ ID NO: 5423 - DNA, 2748 bp, Homo sapiens
ctttaagcgtccacaggcggcggagcggccacaatcacagctccgggcattgggggaacccgagccggctgcgccgggggaatccgtgcgggcgccttccgtcccggtcccatcctcgccgcgctccagcacctctgaagttttgcagcgcccagaaaggaggcgaggaaggagggagtgtgtgagaggagggagcaaaaagctcaccctaaaacatttatttcaaggagaaaagaaaaagggggggcgcaaaaatggctggggcaattatagaaaacatgagcaccaagaagctgtgcattgttggtgggattctgctcgtgttccaaatcatcgcctttctggtgggaggcttgattgctccagggcccacaacggcagtgtcctacatgtcggtgaaatgtgtggatgcccgtaagaaccatcacaagacaaaatggttcgtgccttggggacccaatcattgtgacaagatccgagacattgaagaggcaattccaagggaaattgaagccaatgacatcgtgttttctgttcacattcccctcccccacatggagatgagtccttggttccaattcatgctgtttatcctgcagctggacattgccttcaagctaaacaaccaaatcagagaaaatgcagaagtctccatggacgtttccctggcttaccgtgatgacgcgtttgctgagtggactgaaatggcccatgaaagagtaccacggaaactcaaatgcaccttcacatctcccaagactccagagcatgagggccgttactatgaatgtgatgtccttcctttcatggaaattgggtctgtggcccataagttttaccttttaaacatccggctgcctgtgaatgagaagaagaaaatcaatgtgggaattggggagataaaggatatccggttggtggggatccaccaaaatggaggcttcaccaaggtgtggtttgccatgaagaccttccttacgcccagcatcttcatcattatggtgtggtattggaggaggatcaccatgatgtcccgacccccagtgcttctggaaaaagtcatctttgcccttgggatttccatgacctttatcaatatcccagtggaatggttttccatcgggtttgactggacctggatgctgctgtttggtgacatccgacagggcatcttctatgcgatgcttctgtccttctggatcatcttctgtggcgagcacatgatggatcagcacgagcggaaccacatcgcagggtattggaagcaagtcggacccattgccgttggctccttctgcctcttcatatttgacatgtgtgagagaggggtacaactcacgaatcccttctacagtatctggactacagacattggaacagagctggccatggccttcatcatcgtggctggaatctgcctctgcctctacttcctgtttctatgcttcatggtatttcaggtgtttcggaacatcagtgggaagcagtccagcctgccagctatgagcaaagtccggcggctacactatgaggggctaatttttaggttcaagttcctcatgcttatcaccttggcctgcgctgccatgactgtcatcttcttcatcgttagtcaggtaacggaaggccattggaaatggggcggcgtcacagtccaagtgaacagtgcctttttcacaggcatctatgggatgtggaatctgtatgtctttgctctgatgttcttgtatgcaccatcccataaaaactatggagaagaccagtccaatggcgatctgggtgtccatagtggggaagaactccagctcaccaccactatcacccatgtggacggacccactgagatctacaagttgacccgcaaggaggcccaggagtaggaggctgcagcgcccggctgggacggtctctccataccccagcccctctaactagagtggggagcatgccagagagagctcaatgtacaaatgaatgcctcatggctcttagctgtggtttcttggaccagcggcatggacatttgtcagtttgccttctgacggtagcttttggaggaagattcctgcagccactaatgcattgtgtatgataacaaaaactctggtatgacacattttctgtgatcattgttaattagtgacatagtaacatctgtagcagctggttagtaaacctcatgtgggggtggggtgggggtgtattccttgggggatggtttgggccgaatggggagtggaatatttgacatttttcctgttttaaattctaggatagattttaacatcctttgcggtcccagtccaaggtaggctggtgtcatagtcttctcactcctaatccatgaccactgtttttttcctatttatatcaccaggtagcccactgagttaatatttaagttgtcaatagataagtgtccctgttttgtggcataatataactgaatttcatgagaagatttattccaccaggggtatttcagctttgaaaccaaatctgtgtatctaatactaaccaatctgttggatgtgggttttaaaaaatgtttgctaaactacccaagtaagatttactgtattaaatggccttcgggtctgaaaagcttttttaacttcttgcttaaaatgcgttttattttgataagatacttcaaatagcctccaaaagtgtagatccaatcatttaaataaacctgtatgtatatgcatatgtgtacatgcatatcccctcctgctaaaactcata

SEQ ID NO: 5424 - DNA, 4808 bp, Homo sapiens
caatcaggatgctggggctcggagatgatgggcggccgcctcctcactggagggattcctggagaagctgcagtgtggggatgctctagaccgagtactgcccccagtgtctttccacctcctcctgcagcagcggcagcggcagcagcagttagcagcggcaacttgaggctgcaccccgggcaagtccccagggtggtgctcagccgagaggggggcttggcgccccgaaggggtgtgtgtagggtgggggcgaccacgtgggaccagctggtggccctggaaaacctcccacacacccacacccacacaccccttttgtgttgcaggctgcccctccaagagcggaggcagcgagagtacgcgtgtgcctcgcgccggtccacgcggggagagcactggggaccgagacccggcaccacctcccggtccgccctccagggaaaacgggaaaactagcaagagctagcaagaactagcaagagcttgaacaaacgcctggactcagattggaagactgctcatttgtctactgcctcattcctggaaattgcactggaactgtctgattaagaaaaacagaataattctgaaagaaagaaaacaaagaaaaacatactccagaattcctaatagaacacttcacctgaacctaaaatggtgagcgagagtcaccatgaggccctggcagccccgcctgtcaccactgtcgcgactgttctgccaagcaacgccacagagccagccagtcctggagaaggaaaggaagatgcattttctaagctgaaggagaagtttatgaatgagttgcataaaattccattgccaccgtgggccttaattgcaatagccatagtcgcagtccttttagtcctgacctgctgcttttgtatctgtaagaaatgtttgttcaaaaagaaaaacaagaagaagggaaaggaaaaaggagggaagaatgccattaacatgaaagatgtaaaagacttagggaagacgatgaaagatcaggccctcaaggatgatgatgctgaaactggattgacagatggagaagaaaaagaagaacccaaagaagaggagaaactgggaaaacttcagtattcactggattatgatttccaaaataaccagctgctggtagggatcattcaggctgccgaactgcccgccttggacatggggggcacatctgatccttacgtgaaagtgtttctgctacctgataagaagaagaaatttgagacaaaagtccaccgaaaaacccttaatcctgtcttcaatgagcaatttactttcaaggtaccatactcggaattgggtggcaaaaccctagtgatggctgtatatgattttgatcgtttctctaagcatgacatcattggagaatttaaagtccctatgaacacagtggattttggccatgtaactgaggaatggcgtgacctgcaaagtgctgagaaggaagagcaagagaaattgggtgatatctgcttctcccttcgctacgtacctactgctggtaagctgactgttgtcattctggaggcaaagaacctgaagaagatggatgtgggtggcttatccgatccttatgtgaagattcatctgatgcagaatggtaagaggctgaagaagaaaaagacaacaattaaaaagaacacacttaacccctactacaatgagtcattcagctttgaagtaccttttgaacaaatccagaaagtgcaggtggtggtaactgttttggactatgacaagattggcaagaacgatgccatcggcaaagtctttgtgggctacaacagcaccggcgcggagctgcgacactggtcagacatgctggccaaccccaggcgacctattgcccagtggcacaccctgcaggtagaggaggaagttgatgccatgctggccgtcaagaagtaaaggaaagaagaagcctttctgcatttgcccatatagtgctctttagccagtatctgtaaatacctcagtaatatgggtcctttcatttttccagccatgcattcctaacacaattcagtggtacttggaatcctgttttaatttgcacaaatttaaatgtagagagcccctaagtccttcatcataccactgccctccaaatctactcttcttttaagcaatatgatgtgtagatagagcatgaatgaaattatttattgtatcacactgttgtatataccagtatgctaaagatttatttctagtttgtgtatttgtatgttgtaagcgtttcctaatctgtgtatatctagatgtttttaataagatgttctattttaaactatgtaaattgactgagatataggagagctgataatatattatacggtaaatatagtatcgtctgcattccagcaaaaatatcaactcgtaaggcactagtacagttaaactgacatcttaaaggacaacttaaacctgagctttctattgaatcatttgagtaccaagataaacttacaccacatacttggtgggtgaatccaattttgtagaattcctacacaggcaaaatagcatgatctgagcagcagcatccaggctgacctcaaggaagcatagccacaaaacagaatagcacctgtctgtacatatttacaaagctaaaataatggcttcactcttatatttgaggaagcaactgaacaggagtcaatgatttcatattactgcatatagaataacaacaaggtgttccgtgtgtgtgtgtgtgtgtgtgtgtgtgtgtgtgtgcacatttgtttggggatgggggagaagaagctaaggggagaagtcaacatttatgaaatattgcctgactatttaaaaagaaaaaagtagctctccattatcacctttatacaaaatgtacatcctgtgaattctgttccagatttcacacctacaataattccaaaaggtttgcacattagagtttgtaacaaaatattttattatataaaaccaggttagaaggaatgcaggatatttttaacacaacaatctgtgcttattacacaaaattactttgtggtaaacagacagtattgtaatcccatcaaaagatgaaagaaaaacaaaaacaaaaaccaacaacaattagccatagttctgaatgcacttcaattaagccaaaacagacagctagtgatctttttatatgctctttttacttaagttttaatttgtcctttaaaaaaaggtgaaacaaaccaagaacaagttctagaaaactgaagcaacctcttatgtatactagatgcttgatttaggaggagtttttaaacgttttcaatgttattatgtagtaaatgacactattatgaagctactagtcattccataagagtcttaaaggactgctctgtgtaacactgtgactgccgtgtgtgcttagacccgtagtttcctcagtggatagcactcaatttattccgtagtgatattgtaacaatactgccattcccttctactgcactgcccaaggtgtgtgtagcacaaacagttctcattacaaaggaccaattcagaactgaaaagctatgcataggacaaggaagatacatagaatggggtggaacacagcattttgtcaagcactgtgcaatattccatatttttccccactatggtagacaaccatttcgtggaagggcagcctattatcccacactgcatctagccttttgtcccattcacttctgtgatccattttaatttccaggccacaagacagtagtgatgctctgaaatgaaagtttgtcttcacaaatatcaaaacaaaatggaggaaaactaagcattggcctcatgttcagtcttcaggatatcacaccacgtcttttcaaaaactaaagagaattcaaaaagggctgatggtaggctttgaacatggggttggctgtttcccagtaaaactggaattcctgtcgttactgtttccttatcaaagaaggggcaagctcttttgccttttaggccagacatagcaaacgctttataattggcatagacataaaggataaaaggaaaataaccgtctgccgatggtccgtacttcttaaaaaacataggtaatagaaaatatacacaagtcagaatgtgaaattaaataatggtttgaacagaaaattcaaacaagactctttccaatttaaagggccaaaccctaccaaagagagggagttgactggcttttaaaaagtatttaaataccacaaatgacatttaatttcactgtattcagctttaagttgttcacaatgaaaccacactttcaaacaagcaggttcaagctgctgaatagacattatttcttgcattaaaataccactaatgcattctcttgcaacactgccagacatgggattgtcaccatagaattagttggtactatgccatctttcactctttcacaagtcagtgatggaacctgctttatgaccaagattcatcctcaaataagccacatgtacccttctgacaaagctgtgtaaagtattagaatctgatgctctagaaagatcctagttgcctttgtgtatatttactgcctgcttgagtgtttctatgtgtgggttttccctgtatcttgtagaaatgttggggtgttttcctctgccatatggctcgtggcctgcgagccaactatttcagctgtattttaccttcatttttgatgaggtgatttaaattttgtttcactttgtgtagtgaattccacagtagttttctgattgttgttaaaaatgacttaacatattacacagatattcaataaaaatgttttatttcctgtt

SEQ ID NO: 5425 - DNA, 2635 bp, Homo sapiens
ctcaaaaggggccggatttccttctcctggaggcagatgttgcctctctctctcgctcggattggttcagtgcactctagaaacactgctgtggtggagaaactggaccccaggtctggagcgaattccagcctgcagggctgataagcgaggcattagtgagattgagagagactttaccccgccgtggtggttggagggcgcgcagtagagcagcagcacaggcgcgggtcccgggaggccggctctgctcgcgccgagatgtggaatctccttcacgaaaccgactcggctgtggccaccgcgcgccgcccgcgctggctgtgcgctggggcgctggtgctggcgggtggcttctttctcctcggcttcctcttcgggtggtttataaaatcctccaatgaagctactaacattactccaaagcataatatgaaagcatttttggatgaattgaaagctgagaacatcaagaagttcttatataattttacacagataccacatttagcaggaacagaacaaaactttcagcttgcaaagcaaattcaatcccagtggaaagaatttggcctggattctgttgagctagcacattatgatgtcctgttgtcctacccaaataagactcatcccaactacatctcaataattaatgaagatggaaatgagattttcaacacatcattatttgaaccacctcctccaggatatgaaaatgtttcggatattgtaccacctttcagtgctttctctcctcaaggaatgccagagggcgatctagtgtatgttaactatgcacgaactgaagacttctttaaattggaacgggacatgaaaatcaattgctctgggaaaattgtaattgccagatatgggaaagttttcagaggaaataaggttaaaaatgcccagctggcaggggccaaaggagtcattctctactccgaccctgctgactactttgctcctggggtgaagtcctatccagatggttggaatcttcctggaggtggtgtccagcgtggaaatatcctaaatctgaatggtgcaggagaccctctcacaccaggttacccagcaaatgaatatgcttataggcgtggaattgcagaggctgttggtcttccaagtattcctgttcatccaattggatactatgatgcacagaagctcctagaaaaaatgggtggctcagcaccaccagatagcagctggagaggaagtctcaaagtgccctacaatgttggacctggctttactggaaacttttctacacaaaaagtcaagatgcacatccactctaccaatgaagtgacaagaatttacaatgtgataggtactctcagaggagcagtggaaccagacagatatgtcattctgggaggtcaccgggactcatgggtgtttggtggtattgaccctcagagtggagcagctgttgttcatgaaattgtgaggagctttggaacactgaaaaaggaagggtggagacctagaagaacaattttgtttgcaagctgggatgcagaagaatttggtcttcttggttctactgagtgggcagaggagaattcaagactccttcaagagcgtggcgtggcttatattaatgctgactcatctatagaaggaaactacactctgagagttgattgtacaccgctgatgtacagcttggtacacaacctaacaaaagagctgaaaagccctgatgaaggctttgaaggcaaatctctttatgaaagttggactaaaaaaagtccttccccagagttcagtggcatgcccaggataagcaaattgggatctggaaatgattttgaggtgttcttccaacgacttggaattgcttcaggcagagcacggtatactaaaaattgggaaacaaacaaattcagcggctatccactgtatcacagtgtctatgaaacatatgagttggtggaaaagttttatgatccaatgtttaaatatcacctcactgtggcccaggttcgaggagggatggtgtttgagctagccaattccatagtgctcccttttgattgtcgagattatgctgtagttttaagaaagtatgctgacaaaatctacagtatttctatgaaacatccacaggaaatgaagacatacagtgtatcatttgattcacttttttctgcagtaaagaattttacagaaattgcttccaagttcagtgagagactccaggactttgacaaaagcaacccaatagtattaagaatgatgaatgatcaactcatgtttctggaaagagcatttattgatccattagggttaccagacaggcctttttataggcatgtcatctatgctccaagcagccacaacaagtatgcaggggagtcattcccaggaatttatgatgctctgtttgatattgaaagcaaagtggacccttccaaggcctggggagaagtgaagagacagatttatgttgcagccttcacagtgcaggcagctgcagagactttgagtgaagtagcctaagaggattctttagagaatccgtattgaatttgtgtggtatgtcactcagaaagaatcgtaatgggtatattgataaattttaaaattggtatatttgaaataaagttgaatattatatata

SEQ ID NO: 5426 - DNA, 2756 bp, Homo sapiens
accgcccattacacaccccagtacaccagcagaggaaacttataacctcgggaggcaggtccttcccctcagtgcggtcacatacttccagaagagcggaccagggctgctgccagcacctgccactcagagcgcctctgtcgctgggacccttcagaactctctttgctcacaagttaccaaaaaaaaaagagccaacatgttggtattgctggctggtatctttgtggtccacatcgctactgttattatgctatttgttagcaccattgccaatgtctggttggtttccaatacggtagatgcatcagtaggtctttggaaaaactgtaccaacattagctgcagtgacagcctgtcatatgccagtgaagatgccctcaagacagtgcaggccttcatgattctctctatcatcttctgtgtcattgccctcctggtcttcgtgttccagctcttcaccatggagaagggaaaccggttcttcctctcaggggccaccacactggtgtgctggctgtgcattcttgtgggggtgtccatctacactagtcattatgcgaatcgtgatggaacgcagtatcaccacggctattcctacatcctgggctggatctgcttctgcttcagcttcatcatcggcgttctctatctggtcctgagaaagaaataaggccggacgagttcatggggatctggggggtggggaggaggaagccgttgaatctgggagggaagtggaggttgctgtacaggaaaaaccgagataggggaggggggagggggaagcaaaggggggaggtcaaatcccaaaccattactgaggggattctctactgccaagcccctgccctggggagaaagtagttggctagtactttgatgctcccttgatggggtccagagagcctccctgcagccaccagacttggcctccagctgttcttagtgacacacactgtctggggccccatcagctgccacaacaccagccccacttctgggtcatgcactgaggtccacagacctactgcactgagttaaaatagcggtacaagttctggcaagagcagatactgtctttgtgctgaatacgctaagcctggaagccatcctgcccttctgacccaaagcaaaacatcacattccagtctgaagtgcctactggggggctttggcctgtgagccattgtccctctttggaacagatatttagctctgtggaattcagtgacaaaatgggaggaggaaagagagtttgtaaggtcatgctggtgggttagctaaaccaagaaggagaccttttcacaatggaaaacctgggggatggtcagagcccagtcgagacctcacacacggctgtccctcatggagacctcatgccatggtctttgctaggcctcttgctgaaagccaaggcagctcttctggagtttctctaaagtcactagtgaacaattcggtggtaaaagtaccacacaaactatgggatccaaggggcagtcttgcaacagtgccatgttagggttatgtttttaggattcccctcaatgcagtcagtgtttcttttaagtatacaacaggagagagatggacatggctcattgtagcacaatcctattactcttcctctaacatttttgaggaagttttgtctaattatcaatattgaggatcagggctcctaggctcagtggtagctctggcttagacaccacctggagtgatcacctcttggggaccctgcctatcccacttcacaggtgaggcatggcaattctggaagctgattaaaacacacataaaccaaaaccaaacaacaggcccttgggtgaaaggtgctatataattgtgaagtattaagcctaccgtatttcagccatgataagaacagagtgcctgcattcccaggaaaatacgaaaatcccatgagataaataaaaatataggtgatgggcagatcttttctttaaaataaaaaagcaaaaactcttgtggtacctagtcagatggtagacgagctgtctgctgccgcaggagcacctctatacaggacttagaagtagtatgttattcctggttaagcaggcattgctttgccctggagcagctattttaagccatctcagattctgtctaaaggggttttttgggaagacgttttctttatcgccctgagaagatctaccccagggagaatctgagacatcttgcctacttttctttattagctttctcctcatccatttcttttatacctttcctttttggggagttgttatgccatgatttttggtatttatgtaaaaggattattactaattctatttctctatgtttattctagttaaggaaatgttgagggcaagccaccaaattacctaggctgaggttagagagattggccagcaaaaactgtgggaagatgaactttgtcattatgatttcattatcacatgattatagaaggctgtcttagtgcaaaaaacatacttacatttcagacatatccaaagggaatactcacattttgttaagaagttgaactatgactggagtaaaccatgtattcccttatcttttactttttttctgtgacatttatgtctcatgtaatttgcattactctggtggattgttctagtactgtattgggcttcttcgttaatagattatttcatatactataattgtaaatattttgatacaaatgtttataactctagggatataaaaacagattctgattcccttca

SEQ ID NO: 5427 - DNA, 3393 bp, Homo sapiens
cgcccaacccaagttcaaaggctgataagagagaaaatctcatgaggaggttttagtctagggaaagtcattcagtggatgtgatcttggctcacaggggacgatgtcaagctcttcctggctccttctcagccttgttgctgtaactgctgctcagtccaccattgaggaacaggccaagacatttttggacaagtttaaccacgaagccgaagacctgttctatcaaagttcacttgcttcttggaattataacaccaatattactgaagagaatgtccaaaacatgaataatgctggggacaaatggtctgcctttttaaaggaacagtccacacttgcccaaatgtatccactacaagaaattcagaatctcacagtcaagcttcagctgcaggctcttcagcaaaatgggtcttcagtgctctcagaagacaagagcaaacggttgaacacaattctaaatacaatgagcaccatctacagtactggaaaagtttgtaacccagataatccacaagaatgcttattacttgaaccaggtttgaatgaaataatggcaaacagtttagactacaatgagaggctctgggcttgggaaagctggagatctgaggtcggcaagcagctgaggccattatatgaagagtatgtggtcttgaaaaatgagatggcaagagcaaatcattatgaggactatggggattattggagaggagactatgaagtaaatggggtagatggctatgactacagccgcggccagttgattgaagatgtggaacatacctttgaagagattaaaccattatatgaacatcttcatgcctatgtgagggcaaagttgatgaatgcctatccttcctatatcagtccaattggatgcctccctgctcatttgcttggtgatatgtggggtagattttggacaaatctgtactctttgacagttccctttggacagaaaccaaacatagatgttactgatgcaatggtggaccaggcctgggatgcacagagaatattcaaggaggccgagaagttctttgtatctgttggtcttcctaatatgactcaaggattctgggaaaattccatgctaacggacccaggaaatgttcagaaagcagtctgccatcccacagcttgggacctggggaagggcgacttcaggatccttatgtgcacaaaggtgacaatggacgacttcctgacagctcatcatgagatggggcatatccagtatgatatggcatatgctgcacaaccttttctgctaagaaatggagctaatgaaggattccatgaagctgttggggaaatcatgtcactttctgcagccacacctaagcatttaaaatccattggtcttctgtcacccgattttcaagaagacaatgaaacagaaataaacttcctgctcaaacaagcactcacgattgttgggactctgccatttacttacatgttagagaagtggaggtggatggtctttaaaggggaaattcccaaagaccagtggatgaaaaagtggtgggagatgaagcgagagatagttggggtggtggaacctgtgccccatgatgaaacatactgtgaccccgcatctctgttccatgtttctaatgattactcattcattcgatattacacaaggaccctttaccaattccagtttcaagaagcactttgtcaagcagctaaacatgaaggccctctgcacaaatgtgacatctcaaactctacagaagctggacagaaactgttcaatatgctgaggcttggaaaatcagaaccctggaccctagcattggaaaatgttgtaggagcaaagaacatgaatgtaaggccactgctcaactactttgagcccttatttacctggctgaaagaccagaacaagaattcttttgtgggatggagtaccgactggagtccatatgcagaccaaagcatcaaagtgaggataagcctaaaatcagctcttggagataaagcatatgaatggaacgacaatgaaatgtacctgttccgatcatctgttgcatatgctatgaggcagtactttttaaaagtaaaaaatcagatgattctttttggggaggaggatgtgcgagtggctaatttgaaaccaagaatctcctttaatttctttgtcactgcacctaaaaatgtgtctgatatcattcctagaactgaagttgaaaaggccatcaggatgtcccggagccgtatcaatgatgctttccgtctgaatgacaacagcctagagtttctggggatacagccaacacttggacctcctaaccagccccctgtttccatatggctgattgtttttggagttgtgatgggagtgatagtggttggcattgtcatcctgatcttcactgggatcagagatcggaagaagaaaaataaagcaagaagtggagaaaatccttatgcctccatcgatattagcaaaggagaaaataatccaggattccaaaacactgatgatgttcagacctccttttagaaaaatctatgtttttcctcttgaggtgattttgttgtatgtaaatgttaatttcatggtatagaaaatataagatgataaagatatcattaaatgtcaaaactatgactctgttcagaaaaaaaattgtccaaagacaacatggccaaggagagagcatcttcattgacattgctttcagtatttatttctgtctctggatttgacttctgttctgtttcttaataaggattttgtattagagtatattagggaaagtgtgtatttggtctcacaggctgttcagggataatctaaatgtaaatgtctgttgaatttctgaagttgaaaacaaggatatatcattggagcaagtgttggatcttgtatggaatatggatggatcacttgtaaggacagtgcctgggaactggtgtagctgcaaggattgagaatggcatgcattagctcactttcatttaatccattgtcaaggatgacatgctttcttcacagtaactcagttcaagtactatggtgatttgcctacagtgatgtttggaatcgatcatgctttcttcaaggtgacaggtctaaagagagaagaatccagggaacaggtagaggacattgctttttcacttccaaggtgcttgatcaacatctccctgacaacacaaaactagagccaggggcctccgtgaactcccagagcatgcctgatagaaactcatttctactgttctctaactgtggagtgaatggaaattccaactgtatgttcaccctctgaagtgggtacccagtctcttaaatcttttgtatttgctcacagtgtttgagcagtgctgagcacaaagcagacactcaataaatgctagatttacacactc

SEQ ID NO: 5428 - DNA, 1993 bp, Homo sapiens
aaaacagccggcgcgccgcgcgagtgcagtctgggtctggagcctgagccctgcggaacctcggcgctcggccccaccccgcccgtacctgcacttatttattgttgttatttcttaccgcggagccccgcagtcgggtcctcccgcccgctcccgcgcagcgctagcattctccagtccctcagtcccttcccgcgcggtgcgccgcagccgaggcgatgcgcctcattcagaacatgtgcaccatcgccgagtaccccgcgccgggcaacgccgcggcctccgactgctgtgtgggcgccgccggccgccgcctggtcaagatcgccgtggtgggcgccagcggcgtgggcaagaccgcactggtggtccggttcctcaccaaacgattcatcggtgactatgaaagaaatgcaggtaatctctatactagacaagttcagatagaaggtgaaaccctggctcttcaggttcaagacactccaggtattcaggtccatgagaacagcctgagctgcagtgaacagctgaataggtgcattcgctgggcagatgctgtggtgatcgttttctccatcactgactacaagagctatgaactcatcagccagctccaccagcacgtgcagcagctacacctgggcacccggctgcctgtggtggtcgtggccaacaaagctgacctgttgcacatcaaacaggttgaccctcagcttggactgcagctagccagcatgctaggctgctcattctatgaagtgtctgtcagtgaaaattataatgatgtctacagcgccttccacgtcctctgtaaagaggtcagtcacaaacagcagcctagcagtacacccgagaagcgaagaacctccctcattcccaggcccaagtcacccaacatgcaggacctgaagaggaggtttaagcaagccctctctgccaaagtgaggactgtcacctccgtctgaagcaggaggagcactcaagggggtttggtcttcccaggaagagggcctgaggttctcctagtgcaggaacgttgaatattggcaatgattcctggttccagaaagggctggagcagaagggccaagagggcctgtggaactgctacagaaaaggaagtgttgttctgagcagggggacaggattgatgaggcttgaaagagcccactgagccactctctgaatatgtgaaatgtactctgtgtcttttcctttagagtggggagggggcataatcgtttcggtttctgcattcaactaccttgtaaatggtggtccgttgcagtttcaccaaatgtattgatgtgatttacagtgggaatgaaagaacagattaagcattgataggctttcttttttcccccttttttcttttttctcttttcttctttcttttcctctttttccccaagaggaagaattgcttttctcttaccagtatgatttgtaactctggaacactattcttacagaatgcctttctaacctgaaggatacccagatttctttctttatgtacaagatggaaaatcccctacccctcaaaaacaggttgagtttatgggccagaatattttgtataccagacattggtaagctctcatggtttacaggaaggctctggttccccctcacaggatgagcatgctcagttgggcgtgtgtggaggagctgtgaacttcacgctcttcaaccccagactttgactgtatagttttttgtttttttaactgttccatcaggaaaaaaatgtgtcagttgattttggtgtgacttgtgtaaatggttcatggcaatgacgttgggttgcttcctaggcctggctgagttgtgcctaagggtggctgaaatactaaaacacttatcttacagcaagtgaacaggggctacctgccacatcccctccacagatgcactttaaaaagccactcatgctttggcttaaactgtaattaatttattttatgtacaataaatcgcatttgaaaaa

SEQ ID NO: 5429 - DNA, 1234 bp, Homo sapiens
agttcactcactttcaaagccagctgaaggaaagaggaagtgctagagagagcccccttcagtgtgcttctgacttttacggacttggcttgttagaaggctgaaagatgatggcaggaatgaaaatccagcttgtatgcatgctactcctggctttcagctcctggagtctgtgctcagattcagaagaggaaatgaaagcattagaagcagatttcttgaccaatatgcatacatcaaagattagtaaagcacatgttccctcttggaagatgactctgctaaatgtttgcagtcttgtaaataatttgaacagcccagctgaggaaacaggagaagttcatgaagaggagcttgttgcaagaaggaaacttcctactgctttagatggctttagcttggaagcaatgttgacaatataccagctccacaaaatctgtcacagcagggcttttcaacactgggagttaatccaggaagatattcttgatactggaaatgacaaaaatggaaaggaagaagtcataaagagaaaaattccttatattctgaaacggcagctgtatgagaataaacccagaagaccctacatactcaaaagagattcttactattactgagagaataaatcatttatttacatgtgattgtgattcatcatcccttaattaaatatcaaattatatttgtgtgaaaatgtgacaaacacacttatctgtctcttctacaattgtggtttattgaatgtgatttttctgcactaatataaattagactaagtgttttcaaataaatctaaatcttcagcatgatgtgttgtgtataattggagtagatattaattaagtcacctgtataatgttttgtaattttgcaaaacatatcttgagttgtttaaacagtcaaaatgtttgatattttataccagcttatgagctcaaagtactacagcaaagcctagcctgcatatcattcacccaaaacaaagtaatagcgcctcttttattattttgactgaatgttttatggaattgaaagaaacatacgttcttttcaagacttcctcatgaatctctcaattataggaaaagttattgtgataaaataggaacagctgaaagattgattaatgaactattgttaattcttcctattttaatgaatgacattgaactgaattttttgtctgttaaatgaacttgatagctaataaaaagacaactagccatcaaaa

SEQ ID NO: 5430 - DNA, 3428 bp, Homo sapiens
ccaagatcttcctcctaccctcccctctttcccttctcccgcggtcggccctcgccccctcccccaggcccagcgcgggcgctcggcgcgtccagacccgcggcgcgatgccggcagtttaggatccaaagcttctctgctccttttgttctttccttcccttttttaaaaaaagaggggggaaatcccagtggtgggcagcctggcacgcacacagtcgccctcataccccgacaaaagcagatgcactttgacttctgacagctctacctcaagccccggagaactcagcggcgctttcctcgcaacccgagctcggcgagtcgtcgtcttcttcttctccgtttttatttatttatttccgttcccgccgccgttctcgctgaccttcactcctccgcgggctctgagcagaagggtcgcattctctcccgcctgagacttcttttcctcgccccgggagctcaggcggcgccgctccagcccggggccccgggactccccggctgcacacttcactgagacgcccccccaggccccgatcagcctcgtttcctccaccctactttgatttcctggtgcgagttttggcttgcacggccgagtgtgtgtcctctttttggagagactggggagctcgtgccgattgtcttcaggagtcatcccctgggctctactttgcccctctctctctctgggcctcatcagaccaaaccaaagaccatggttcactgtgccggctgcaaaaggcccatcctggaccgctttctcttgaacgtgctggacagggcctggcacgtcaagtgcgtccagtgctgtgaatgtaaatgcaacctgaccgagaagtgcttctccagggaaggcaaactctactgcaagaacgacttcttccggtgtttcggtaccaaatgcgcaggctgcgctcagggcatctcccctagcgacctggtgcggagagcgcggagcaaagtgtttcacctgaactgcttcacctgcatgatgtgtaacaagcagctctccactggcgaggaactctacatcatcgacgagaataagttcgtctgcaaagaggattacctaagtaacagcagtgttgccaaagagaacagccttcactcggccaccacgggcagtgaccccagtttgtctccggattcccaagacccgtcgcaggacgacgccaaggactcggagagcgccaacgtgtcggacaaggaagcgggtagcaacgagaatgacgaccagaacctgggcgccaagcggcggggaccgcgcaccaccatcaaagccaagcagctggagacgctgaaggccgccttcgctgctacacccaagcccacccgccacatccgcgagcagctggcgcaggagaccggcctcaacatgcgcgtcattcaggtctggttccagaaccggcgctccaaggagcggaggatgaagcagctgagcgccctgggcgcccggcgccacgccttcttccgcagtccgcgccggatgcggccgctggtggaccgcctggagccgggcgagctcatccccaatggtcccttctccttctacggagattaccagagcgagtactacgggcccgggggcaactacgacttcttcccgcaaggccccccgtcctcgcaggcccagacaccagtggacctacccttcgtgccgtcatctgggccgtccgggacgcccctgggtggcctggagcacccgctgccgggccaccacccgtcgagcgaggcgcagcggtttaccgacatcctggcgcacccacccggggactcgcccagccccgagcccagcctgcccgggcctctgcactccatgtcggccgaggtcttcggacccagcccgcccttctcgtcgctgtcggtcaacggtggggcgagctacggaaaccacctgtcccacccccccgaaatgaacgaggcggccgtgtggtagcggggtctcgcacggtctgcggagttcgtggttgtacagaaatgaacctttatttaagaaaaatagaaaaaaaaaaaaacataaaaagcaagtccccacccccttcctccagcctcgagaaccattctccttctggggagaccggatggaaaagggggacacgaaataggatccaaatcggcctcgaggtgggactgggatccgcgcactggctgtcgacgtgcagaactggggctccccaaaggaaacgcagacctctccccaactcccacctggacccggatccgtagacagaccccgcgggcgtgtgcgcctggcaggcgggcggcgaaaagacgtccagggcagccgcgggtgcgcacagccgttggcgatgccaggagccgtggggagggaggccgtgagcacagccgggtgaaggaagtgaagcggcccagggcgctcccgggccagccaggagggttctagctctgggatatcccttattagtgttgtctcagagttcaacaacagcgacaaaaaactcttatagcttcagaaacgccgacctgccgtgcatcaggtgggactatatatatattttttgtctatctggatttttggtttttgtttttgccaaaattgcaaaattctaaatgtaaagccctccgtatcaactcttctaccttcgcaaaactacacatacacacatacacacgtacacggacacactcggtaagatggtctccagccagaccgctcagtaaaatgacttgaacatcagctgtacaagaaaagtattctaccttcacacacaaaaagttaaaaaaaaaaaaaaaagactattgaactaaaaacagtcaactgtttacgtataatgttaaattcaggagttcagtgttttactaatatatcctgttttgaaacctcttgttcgaaaacaaaatgttttgagcaatcaaccaaaattgttccttttcttttcctgtagatgttctgacagatttgcagggctttcggctcactgtgctagtatgtaaaaaggtgttgtttacacgaggcaaagagaaaacatgctattcagacagttgccaaatagaataattatagcacaaatactgtaaaggtgcctggcaccagcaacctgagaaagtgttaaaaaaaaaaaaaaaaaagtgttacaagatttaaaaaaaaacatctttgctaatttttttgtcctgttgaacattcatggaattgttaatatgacttatatagacccacacaggttttatttttgtgtctttaaaataaaagtccaaaatatttaaattttatggtcaaatatgcagtcaacagctgctactttttctttatatattaaatttctcatatgtcttttattgttctaataaacctaagcttgtgtgacctccagtgcatattagaccattcactgtatgaaagaaaacatgttgaataaatttgtgagtttttaataaaaatagaaaatctgatgttta

SEQ ID NO: 5431 - DNA, 461 bp, Homo sapiens
ctccccagcctgataaaggtcctgcgggcaggacaggacctcccaaccaagccctccagcaaggattcagagtgcccctccggcctcgccatgaggctcttcctgtcgctcccggtcctggtggtggttctgtcgatcgtcttggaaggcccagccccagcccaggggaccccagacgtctccagtgccttggataagctgaaggagtttggaaacacactggaggacaaggctcgggaactcatcagccgcatcaaacagagtgaactttctgccaagatgcgggagtggttttcagagacatttcagaaagtgaaggagaaactcaagattgactcatgaggacctgaagggtgacatcccaggaggggcctctgaaatttcccacaccccagcgcctgtgctgaggactccctccatgtggccccaggtgccaccaataaaaatcctacagaaaattc

SEQ ID NO: 5432 - DNA, 5130 bp, Homo sapiens
gctgatgtttgagccagcatgtcgcggaggaagcaagcgaagcctcaacatttccaatccgaccccgaagtggcctcgctcccccggcgagatggagacacagaaaagggtcaaccgagtcgccctactaagagcaaggatgcccacgtctgtggccggtgctgtgccgagttctttgaattatcagatcttctgctccacaagaagaactgtactaaaaatcaattagttttaatcgtaaatgaaaatccagcctccccacccgaaaccttctcccccagcccccctcctgataatcctgatgaacaaatgaatgacacagttaacaaaacagatcaagtggactgcagcgacctttcagaacacaacggacttgacagggaagagtccatggaggtggaggccccggttgctaacaaaagcggcagcggcacttccagcggcagccacagcagtaccgccccaagcagcagcagcagcagcagcagcagcagcggcggcggcggcagctcctccacaggtacctcagcgatcacaacctctctacctcaactcggggacctgacaacactgggcaacttctccgtaatcaacagcaacgtcatcatcgagaacctccagagcaccaaggtggcggtggcccagttctcccaggaagcgaggtgcggcggggcctctgggggcaagctggccgtcccagccctcatggaacaactcctagctctgcagcagcagcagatccaccagctgcaattgatcgaacagattcgtcaccaaatattgctgttggcttctcagaatgcagacttgccaacatcttctagtccttctcaaggtactttacgaacatctgccaaccccttgtccacgctaagttcccatttatctcagcagctggcagcagcagctggattggcacagagcctcgccagccaatctgccagcattagtggtgtgaaacagctacccccaatccagctacctcagagcagttctggcaacaccatcattccatccaacagcggctcttctcccaatatgaacatattggcagcggcagttaccaccccgtcctctgaaaaagtggcttcaagtgctggggcctcccatgtcagcaacccagcggtctcatcatcgtcctcaccagcttttgcaataagcagtttattaagtcctgcgtctaatccacttctacctcagcaagcctccgctaactcggttttccccagccctttgcccaacatcggaacaactgcagaggatttaaactccttgtctgccttggcccagcaaagaaaaagcaagccaccaaatgtcactgcctttgaagcgaaaagtacttccgatgaggcattcttcaaacacaagtgcaggttctgcgcgaaggtctttgggagtgacagtgccttgcagatccacttgcgttcccataccggagagaggccattcaagtgcaacatctgcgggaacaggttctccaccaaggggaatctgaaagtccactttcagcgccacaaagagaaataccctcatatccagatgaacccctatcctgtgcctgagcatttggacaatatccccacgagtactggcatcccatatggcatgtccatccctccagagaagccagtcaccagctggctagacaccaaaccagtcctgcctactctgaccacttcagtcggcctgccgttgcccccaaccctcccaagcctcatacccttcatcaagacggaagagccagcccccatccccatcagccattctgccaccagccccccaggctcagtcaaaagtgactccgggggccctgagtcagccacaagaaacctaggtgggctcccagaggaagccgaagggtccactctgccaccctctggtggcaaaagcgaagagagtggcatggtcaccaactcagtcccgacggcgagcagtagcgtcctgagctccccagcggcagactgcggccccgcgggcagtgccaccaccttcaccaaccctttgttgccgctcatgtccgagcagttcaaggccaagtttccttttgggggactcctggactcagctcaggcatcagagacgtccaagcttcagcaactggtagaaaacattgacaagaaggccactgaccccaatgagtgcatcatctgccaccgggttctcagctgccagagcgccttgaaaatgcactacaggacacacactggggagaggccctttaagtgtaagatctgtggccgggctttcaccacgaaagggaatcttaaaacccactacagtgtccatcgtgctatgcccccgctcagagtccagcattcctgccccatctgccagaagaagttcacgaacgctgtggtcctgcagcagcacatccgaatgcatatgggaggccagatccccaacaccccagtccccgacagctactctgagtccatggagtctgacacaggttcctttgatgagaaaaattttgatgacctagacaacttctctgatgaaaacatggaagactgtcctgagggcagcatccctgatacacctaagtctgcagacgcctcccaagacagcttatcctcttcgcctttgcccctcgagatgtcgagcatcgctgctttggaaaatcagatgaagatgatcaatgctggcctggcagagcagctacaggccagcctgaagtcagtggagaatgggtccatcgagggggatgtcctgaccaatgattcatcctcagtgggtggtgacatggaaagccaaagtgctggcagcccagccatctcagagtctacctcttccatgcaggctctgtccccgtccaacagcacgcaggagttccacaagtcacccagcattgaggagaaaccacagagagcggtcccaagcgagtttgccaatggtttgtctcccaccccagtgaatggtggggctttggatttgacatctagtcacgcagagaaaatcatcaaagaagattctttggggatcctcttcccttttagagaccggggtaaatttaaaaacactgcttgtgacatttgtggcaaaacatttgcttgtcagagtgccttggacattcactatagaagtcataccaaagagagaccatttatttgcacagtttgcaatcgtggcttttccacaaagggtaatttgaagcagcacatgttgacacatcagatgcgagatctgccatcccagctctttgagcccagttccaaccttggccccaatcagaactcagcggtgattcccgccaactcgttgtcatctctcatcaagacagaggtcaacggcttcgtgcatgtttctcctcaggacagtaaggacacccccaccagtcacgtcccgtctgggcctctgtcttcctctgccacatccccagttctgctccctgctctgcccaggagaactcccaagcagcactactgcaacacatgtggcaaaaccttctcctcatcgagtgccctgcagattcacgagagaactcacactggagagaaaccctttgcttgcactatttgtggaagagctttcacgactaaaggcaatcttaaggtacacatgggcactcacatgtggaatagcacccctgcacgacggggtcggcggctctctgtggatggccccatgacatttctaggaggcaatcccgtcaagttcccagaaatgttccagaaggatttggcggcaagatcaggaagtggggatccttccagcttctggaatcagtatgcagcagcgctctccaacgggctggcgatgaaggccaacgagatctccgtcattcagaacggtggcatccctccaattcctggaagcctcggcagtgggaacagctcacctgttagtgggctgacgggaaacctggagaggctccagaactcagagcccaatgctcccctggccggcctggagaaaatggcaagcagtgagaacggaaccaacttccgcttcacccgcttcgtggaggacagcaaggagatcgtcacgagttaaagcagctcgggctggagacatagcattcattcctgttcagaatgcgacctatggtggcctcctactccttgccccccaccccgccccgccccttccttctgttccccagatctatgaactacaacattatgaagacattcttttgtaccttgttcaactttagagttctaagaaagcttatttattagcgatataaccttgctttgcaaacagaatgcaagcgttaactttggtcttctgtattttggactaaatactaattgactagagtgctgtaaacttgctgtaacatttatggcaattgcaagttgccctgctaggcagttgtaatctggcattaacttattttctatatccagtttaatatgaatctggtgttgatgcaatgcctcagtgatgcattagatctctaataaagtctgtatatacatgtacactttgatcctgctggaaaattttatcagcaaacacattgtctaatctttcaaaacagatttaaggaaaggactgaaagtacagactgaacagtgtggttctttgaaaggtttggttttttaatttttattctaaaattcaacctttttttttgtcgatttaaccatttccattttgaactgctatttgtattgtgctttttacttgagtcgtcttcaatgttaataagtttctgtacagtaataagcacgcagaattctttagagaaaaagaaaacaagcgttgttttggtagttgaaactgagacgtaacattttgccttgtaggtatattcacgatagaaaatgtgtgctggaatttcacaatgctgctaagtatagcatcttgaacaaccttcagtggagaaaatgtagatgctcttgtatatacaataagaaatatcactttcattcaaatgtacatatgttccttacaagagcaaatgcttcttcttgatcaagagagcaggtatagtgtttgtttattttgtcttaggtatggaagaaaaaaattggactgttacatgcactttcttggaaagttgaaaggaaagggggggtccaatttctttaacatttaatacttactaacaacagagatactgtaattttactcaagtaatcaaatacattttttttgcaacagataaaacaaaatactgtg

SEQ ID NO: 5433 - DNA, 5223 bp, Homo sapiens
actacaaaagtagcgcgggcctgagaactccttccagaagttctccagggcttccgcagagcgactttttcgctgcctgtgagctgcagcgcgggagagctcgggctcgcgcggaccccagcgcctggcaggctgacagcgctctctcgccccaggtgcccgcgcgcgtggtgagcagctgcaccaggtggcgtccggggtggggtcaatgaagcgcagcctgaggaagatgtggcgccctggagaaaagaaggagccccagggcgttgtctatgaggatgtgccggacgacacggaggatttcaaggaatcgcttaaggtggtttttgaaggaagtgcatatggattacaaaactttaataagcaaaagaaattaaaaagatgtgacgatatggacaccttcttcttgcattatgctgcagcagaaggccaaattgagctaatggagaagatcaccagagattcctctttggaagtgctgcatgaaatggatgattatggaaatacccctctgcattgtgctgtagaaaaaaaccaaattgaaagcgttaagtttcttctcagcagaggagcaaacccaaatctccgaaacttcaacatgatggctcctctccacatagctgtgcagggcatgaataatgaggtgatgaaggtcttgcttgagcatagaactattgatgttaatttggaaggagaaaatggaaacacagctgtgatcattgcgtgcaccacaaataatagcgaagcattgcagattttgcttaaaaaaggagctaagccatgtaaatcaaataaatggggatgtttccctattcaccaagctgcattttcaggttccaaagaatgcatggaaataatactaaggtttggtgaagagcatgggtacagtagacagttgcacattaactttatgaataatgggaaagccacccctctccacctggctgtgcaaaatggtgacttggaaatgatcaaaatgtgcctggacaatggtgcacaaatagacccagtggagaagggaaggtgcacagccattcattttgctgccacccagggagccactgagattgttaaactgatgatatcgtcctattctggtagcgtggatattgttaacacaaccgatggatgtcatgagaccatgcttcacagagcttcattgtttgatcaccatgagctagcagactatttaatttcagtgggagcagatattaataagatcgattctgaaggacgctctccacttatattagcaactgcttctgcatcttggaatattgtaaatttgctactctctaaaggtgcccaagtagacataaaagataattttggacgtaattttctgcatttaactgtacagcaaccttatggattaaaaaatctgcgacctgaatttatgcagatgcaacagatcaaagagctggtaatggatgaagacaacgatgggtgtactcctctacattatgcatgtagacaggggggccctggttctgtaaataacctacttggctttaatgtgtccattcattccaaaagcaaagataagaaatcacctctgcattttgcagccagttatgggcgtatcaatacctgtcagaggctcctacaagacataagtgatacgaggcttctgaatgaaggtgaccttcatggaatgactcctctccatctggcagcaaagaatggacatgataaagtagttcagcttcttctgaaaaaaggtgcattgtttctcagtgaccacaatggctggacagctttgcatcatgcgtccatgggcgggtacactcagaccatgaaggtcattcttgatactaatttgaagtgcacagatcgcctggatgaagacgggaacactgcacttcactttgctgcaagggaaggccacgccaaagccgttgcgcttcttctgagccacaatgctgacatagtcctgaacaagcagcaggcctcctttttgcaccttgcacttcacaataagaggaaggaggttgttcttacgatcatcaggagcaaaagatgggatgaatgtcttaagattttcagtcataattctccaggcaataaatgtccaattacagaaatgatagaatacctccctgaatgcatgaaggtacttttagatttctgcatgttgcattccacagaagacaagtcctgccgagactattatatcgagtataatttcaaatatcttcaatgtccattagaattcaccaaaaaaacacctacacaggatgttatatatgaaccgcttacagccctcaacgcaatggtacaaaataaccgcatagagcttctcaatcatcctgtgtgtaaagaatatttactcatgaaatggttggcttatggatttagagctcatatgatgaatttaggatcttactgtcttggtctcatacctatgaccattctcgttgtcaatataaaaccaggaatggctttcaactcaactggcatcatcaatgaaactagtgatcattcagaaatactagataccacgaattcatatctaataaaaacttgtatgattttagtgtttttatcaagtatatttgggtattgcaaagaagcggggcaaattttccaacagaaaaggaattattttatggatataagcaatgttcttgaatggattatctacacgacgggcatcatttttgtgctgcccttgtttgttgaaataccagctcatctgcagtggcaatgtggagcaattgctgtttacttctattggatgaatttcttattgtatcttcaaagatttgaaaattgtggaatttttattgttatgttggaggtaattttgaaaactttgttgaggtctacagttgtatttatcttccttcttctggcttttggactcagcttttacatcctcctgaatttacaggatcccttcagctctccattgctttctataatccagaccttcagcatgatgctaggagatatcaattatcgagagtccttcctagaaccatatctgagaaatgaattggcacatccagttctgtcctttgcacaacttgtttccttcacaatatttgtcccaattgtcctcatgaatttacttattggtttggcagttggcgacattgctgaggtccagaaacatgcatcattgaagaggatagctatgcaggtggaacttcataccagcttagagaagaagctgccactttggtttctacgcaaagtggatcagaaatccaccatcgtgtatcccaacaaacccagatctggtgggatgttattccatatattctgttttttattttgcactggggaaataagacaagaaataccaaatgctgataaatctttagaaatggaaatattaaagcagaaataccggctgaaggatcttacttttctcctggaaaaacagcatgagctcattaaactgatcattcagaagatggagatcatctctgagacagaggatgatgatagccattgttcttttcaagacaggtttaagaaagagcagatggaacaaaggaatagcagatggaatactgtgttgagagcagtcaaggcaaaaacacaccatcttgagccttagctcctcagaccttcagtgaggcttctaatggggggtgcatgacttgctggttctaactttcaatttaaaaagagtgaggaagaagcagaatgattcattttgctgcgtgtgaaatcatggttcctgcatgctgtataaaagtaaaccatcttttatcctctattcatattttctaccaatcactatgtattggggatatctttgcagatatgttcaaattggactggactttgatgagatataatctcattatttgaatgggtagaaaatgaatttgctagaacacacatttttaatgaaaagaagtaataaatgtaactattaagctaaaatgcaaatgtcagtactgaattcctgcttgttaattacataatatgtgatgctctagaaaatagtcacaagtattaataatgccttagatgatagtcttaaatattaggttgaggtctacctaacctaagctgcttcctggaaagcttcatgttgaaagaacctatgggtggcaccatgtggacttttctgtccctactgtgatgaatagccccacccttcttgctgtccccaacacacctgatgtcactttgagccatatagttgaagtacaaattaataggccttatgatatgcacgaattttactatagataatatatgttgtttctggttttgtttgccaatgagcataataaatgtaaaacctatatagtatccctgtgattattgtatgagcctttgtttgagatttgaaaacaacatggctccatcacatattcccttttttcttttgatgtctactcaaatcatgaattaatcacatacctcatcattaatcttttcaaggtccttctattgttttgtctgattttctccatcatcctgattagcatgtttattccctcactacccccaggagatattcactgtaatgaatatgtctttggctatgtatgtgtccttgtgttatgttgtacagtgttgttttgagtctgttattatttacacagatgttattatgctatagcttctatttctgtttttgcttcttatttctcttataattctcacttatttcctattttttctactcatttctatttgttactcctttttactggacatgatgtttacaagatacaactgtgttactgtattccatctagtacggggcctttggtgtggcttactatttcattgtgtgcacccacccacccaccacactggacttttctagagatggacagcttggttacctccaccttcctgcactcattctcaaacatactgatgttcatacaaaccagcagagtgctgagggacgatatgtactattacaaaaccagacacttttacattcatggtccaacagatcacatggcctagaggcaatgttgcatataccttaatctttgatatgaataatatctttgttctttatatttcttaaaacagaaagggtggaaaatcactatacagaagcaatatccaaagatctcctgatcataaagacaaggggtcttttcagtcttccctctcctcaaaccttgtgtagcattgcacaatatagatctcagtcaacattcactgagtgccaagaatgtgagaaacactgtaccatgcctgtcatgcgaaatatttaaataaacagattgtcttaca

SEQ ID NO: 5434 - DNA, 7394 bp, Homo sapiens
gctggaaagttgcgcgccaggcagcggggggcggagagaggagcccagactggcccccacctcccgcttcctgcccggccgccgcccattggccggaggaatccccaggaatgcgagcgcccctttaaaagcgcgcggctcctccgccttgccagccgctgcgcccgagctggcctgcgagttcagggctcctgtcgctctccaggagcaacctctactccggacgcacaggcattccccgcgcccctccagccctcgccgccctcgccaccgctcccggccgccgcgctccggtacacacaggatccctgctgggcaccaacagctccaccatggggctggcctggggactaggcgtcctgttcctgatgcatgtgtgtggcaccaaccgcattccagagtctggcggagacaacagcgtgtttgacatctttgaactcaccggggccgcccgcaaggggtctgggcgccgactggtgaagggccccgacccttccagcccagctttccgcatcgaggatgccaacctgatcccccctgtgcctgatgacaagttccaagacctggtggatgctgtgcgggcagaaaagggtttcctccttctggcatccctgaggcagatgaagaagacccggggcacgctgctggccctggagcggaaagaccactctggccaggtcttcagcgtggtgtccaatggcaaggcgggcaccctggacctcagcctgaccgtccaaggaaagcagcacgtggtgtctgtggaagaagctctcctggcaaccggccagtggaagagcatcaccctgtttgtgcaggaagacagggcccagctgtacatcgactgtgaaaagatggagaatgctgagttggacgtccccatccaaagcgtcttcaccagagacctggccagcatcgccagactccgcatcgcaaaggggggcgtcaatgacaatttccagggggtgctgcagaatgtgaggtttgtctttggaaccacaccagaagacatcctcaggaacaaaggctgctccagctctaccagtgtcctcctcacccttgacaacaacgtggtgaatggttccagccctgccatccgcactaactacattggccacaagacaaaggacttgcaagccatctgcggcatctcctgtgatgagctgtccagcatggtcctggaactcaggggcctgcgcaccattgtgaccacgctgcaggacagcatccgcaaagtgactgaagagaacaaagagttggccaatgagctgaggcggcctcccctatgctatcacaacggagttcagtacagaaataacgaggaatggactgttgatagctgcactgagtgtcactgtcagaactcagttaccatctgcaaaaaggtgtcctgccccatcatgccctgctccaatgccacagttcctgatggagaatgctgtcctcgctgttggcccagcgactctgcggacgatggctggtctccatggtccgagtggacctcctgttctacgagctgtggcaatggaattcagcagcgcggccgctcctgcgatagcctcaacaaccgatgtgagggctcctcggtccagacacggacctgccacattcaggagtgtgacaagagatttaaacaggatggtggctggagccactggtccccgtggtcatcttgttctgtgacatgtggtgatggtgtgatcacaaggatccggctctgcaactctcccagcccccagatgaacgggaaaccctgtgaaggcgaagcgcgggagaccaaagcctgcaagaaagacgcctgccccatcaatggaggctggggtccttggtcaccatgggacatctgttctgtcacctgtggaggaggggtacagaaacgtagtcgtctctgcaacaaccccacaccccagtttggaggcaaggactgcgttggtgatgtaacagaaaaccagatctgcaacaagcaggactgtccaattgatggatgcctgtccaatccctgctttgccggcgtgaagtgtactagctaccctgatggcagctggaaatgtggtgcttgtccccctggttacagtggaaatggcatccagtgcacagatgttgatgagtgcaaagaagtgcctgatgcctgcttcaaccacaatggagagcaccggtgtgagaacacggaccccggctacaactgcctgccctgccccccacgcttcaccggctcacagcccttcggccagggtgtcgaacatgccacggccaacaaacaggtgtgcaagccccgtaacccctgcacggatgggacccacgactgcaacaagaacgccaagtgcaactacctgggccactatagcgaccccatgtaccgctgcgagtgcaagcctggctacgctggcaatggcatcatctgcggggaggacacagacctggatggctggcccaatgagaacctggtgtgcgtggccaatgcgacttaccactgcaaaaaggataattgccccaaccttcccaactcagggcaggaagactatgacaaggatggaattggtgatgcctgtgatgatgacgatgacaatgataaaattccagatgacagggacaactgtccattccattacaacccagctcagtatgactatgacagagatgatgtgggagaccgctgtgacaactgtccctacaaccacaacccagatcaggcagacacagacaacaatggggaaggagacgcctgtgctgcagacattgatggagacggtatcctcaatgaacgggacaactgccagtacgtctacaatgtggaccagagagacactgatatggatggggttggagatcagtgtgacaattgccccttggaacacaatccggatcagctggactctgactcagaccgcattggagatacctgtgacaacaatcaggatattgatgaagatggccaccagaacaatctggacaactgtccctatgtgcccaatgccaaccaggctgaccatgacaaagatggcaagggagatgcctgtgaccacgatgatgacaacgatggcattcctgatgacaaggacaactgcagactcgtgcccaatcccgaccagaaggactctgacggcgatggtcgaggtgatgcctgcaaagatgattttgaccatgacagtgtgccagacatcgatgacatctgtcctgagaatgttgacatcagtgagaccgatttccgccgattccagatgattcctctggaccccaaagggacatcccaaaatgaccctaactgggttgtacgccatcagggtaaagaactcgtccagactgtcaactgtgatcctggactcgctgtaggttatgatgagtttaatgctgtggacttcagtggcaccttcttcatcaacaccgaaagggacgatgactatgctggatttgtctttggctaccagtccagcagccgcttttatgttgtgatgtggaagcaagtcacccagtcctactgggacaccaaccccacgagggctcagggatactcgggcctttctgtgaaagttgtaaactccaccacagggcctggcgagcacctgcggaacgccctgtggcacacaggaaacacccctggccaggtgcgcaccctgtggcatgaccctcgtcacataggctggaaagatttcaccgcctacagatggcgtctcagccacaggccaaagacgggtttcattagagtggtgatgtatgaagggaagaaaatcatggctgactcaggacccatctatgataaaacctatgctggtggtagactagggttgtttgtcttctctcaagaaatggtgttcttctctgacctgaaatacgaatgtagagatccctaatcatcaaattgttgattgaaagactgatcataaaccaatgctggtattgcaccttctggaactatgggcttgagaaaacccccaggatcacttctccttggcttccttcttttctgtgcttgcatcagtgtggactcctagaacgtgcgacctgcctcaagaaaatgcagttttcaaaaacagactcagcattcagcctccaatgaataagacatcttccaagcatataaacaattgctttggtttccttttgaaaaagcatctacttgcttcagttgggaaggtgcccattccactctgcctttgtcacagagcagggtgctattgtgaggccatctctgagcagtggactcaaaagcattttcaggcatgtcagagaagggaggactcactagaattagcaaacaaaaccaccctgacatcctccttcaggaacacggggagcagaggccaaagcactaaggggagggcgcatacccgagacgattgtatgaagaaaatatggaggaactgttacatgttcggtactaagtcattttcaggggattgaaagactattgctggatttcatgatgctgactggcgttagctgattaacccatgtaaataggcacttaaatagaagcaggaaagggagacaaagactggcttctggacttcctccctgatccccacccttactcatcacctgcagtggccagaattagggaatcagaatcaaaccagtgtaaggcagtgctggctgccattgcctggtcacattgaaattggtggcttcattctagatgtagcttgtgcagatgtagcaggaaaataggaaaacctaccatctcagtgagcaccagctgcctcccaaaggaggggcagccgtgcttatatttttatggttacaatggcacaaaattattatcaacctaactaaaacattccttttctcttttttcctgaattatcatggagttttctaattctctcttttggaatgtagattttttttaaatgctttacgatgtaaaatatttattttttacttattctggaagatctggctgaaggattattcatggaacaggaagaagcgtaaagactatccatgtcatctttgttgagagtcttcgtgactgtaagattgtaaatacagattatttattaactctgttctgcctggaaatttaggcttcatacggaaagtgtttgagagcaagtagttgacatttatcagcaaatctcttgcaagaacagcacaaggaaaatcagtctaataagctgctctgccccttgtgctcagagtggatgttatgggattctttttttctctgttttatcttttcaagtggaattagttggttatccatttgcaaatgttttaaattgcaaagaaagccatgaggtcttcaatactgttttaccccatcccttgtgcatatttccagggagaaggaaagcatatacacttttttctttcatttttccaaaagagaaaaaaatgacaaaaggtgaaacttacatacaaatattacctcatttgttgtgtgactgagtaaagaatttttggatcaagcggaaagagtttaagtgtctaacaaacttaaagctactgtagtacctaaaaagtcagtgttgtacatagcataaaaactctgcagagaagtattcccaataaggaaatagcattgaaatgttaaatacaatttctgaaagttatgttttttttctatcatctggtataccattgctttatttttataaattattttctcattgccattggaatagatatctcagattgtgtagatatgctatttaaataatttatcaggaaatactgcctgtagagttagtatttctatttttatataatgtttgcacactgaattgaagaattgttggttttttcttttttttgttttgtttttttttttttttttttttgcttttgacctcccatttttactatttgccaatacctttttctaggaatgtgcttttttttgtacacatttttatccattttacattctaaagcagtgtaagttgtatattactgtttcttatgtacaaggaacaacaataaatcatatggaaatttatatttatacttactgtatccatgcttatttgttctctactggctttatgtcatgaagtatatgcgtaaataccattcataaatcaatatagcatatacaaaaataaattacagtaagtcatagcaacattcacagtttgtatgtgattgagaaagactgagttgctcaggcctaggcttagaatttgctgcgtttgtggaataaaagaacaaaatgatacattagcctgccatatcaaaaacatataaaagagaaattatccctaagtcaagggcccccataagaataaaatttcttattaaggtcattagatgtcattgaatccttttcaaagtgcagtatgaaaacaaagggaaaaacactgaagcacacgcaactctcacagcgacattttctgacccacgaatgatgccttgggtgggcaacacgattgcatgttgtggagacacttcggaagtaaatgtggatgagggaggagctgtccttgcaatgttgagccaagcattacagatacctcctcttgaagaaggaataataagtttaatcaaaaaagaagactaaaaaatgtaaaatttggaaggaatccataaatgcgtgtgtgtctaaatacaaattatcatgtgaagaaaaggcccaagtgtaccaataagcagaccttgatttttggatgggctaattatgaatgtggaatactgaccagttaatttccagttttaatgaaaacagatcaaagaagaaattttatgagtaggttaaaggtctggctttgaggtctattaaacactagaaaggactggctgggtgagataaaatcttccttgttgattttcactctcattctataaatactcatctttctgagtagccatgatcacatacaaatgtaaattgccaaatcattttatagtaccaaggtgaagaagcaggaactagaaagtgttgataatagctgtggagttaggaaaactgatgtgaaggaaataattctttgaaatggcaaagaattaaataccatcattcattatcagaagagttcaacgtttgaagtgctgggagataattctaattcattcttggatagtgaagcaaaactgattgaaaataccaagataagacagaaaaagtgactggaaagaggagcttttcttccaggcatgttccagtttcaccctaagactgaccttcaaataatcaggttgtactgaaataaaggacttgttaaaaattaaaattatgtcatcgagatgatagcttttttcctcctccaacagtttattgtcatgtgttgtgggagagctcgagtgaagagcaataaactccaggtcttataagaatgtacatacaataaaggtggtgccagcagtttttttttttctaaagagtcacatgtagaaaagcctccagtattaagctcctgaattcattccttaaataaattggctctctctctcttctataa

SEQ ID NO: 5435 - DNA, 1865 bp, Homo sapiens
ggaccttcaggccctggggtgaattcagctgctcctacatcagcttccggaaccaccaaaaattcaaattgggattttccggagtaaacaagagcctagagccctttgctcaatgctggatttaatacgtatatatttttaagcgagttggttttttcccctttgatttttgatcttcgcgacagttcctcccacgcatattatcgttgttgccgtcgttttctctccccgcgtggctccttgacctgcgagggagagagaggacaccgaagccgggagctcgcagggaccatgtatcagagcttgccatggccgccaaccacgggccgccccccggtgcctacgaggcgggcggccccggcgccttcatgcacggcgcgggcgccgcgtcctcgccagtctacgtgcccacaccgcggtgccctcctccgtgctgggcctgtcctacctccagggcggaggcgcgggctctgcgtccggagggcctcgggcggcagctccggtggggccgcgtctggtgcggggcccgggacccagcagggcagcccgggatggagccaggcgggagccgacggagccgcttacaccccgccgccggtgtcgccgcgcttctccttcccggggaccaccgggtccctggcggccgccgccgccgctgccgcggcccgggaagctgcggcctacagcagtggcggcggagcggcgggtgcgggcctggcgggccgcgagcagtacgggcgcgccggcttcgcgggctcctactccagcccctacccggcttacatggccgacgtgggcgcgtcctgggccgcagccgccgccgcctccgccggccccttcgacagcccggtcctgcacagcctgcccggccgggccaacccggccgcccgacaccccaatctcgatatgtttgacgacttctcagaaggcagagagtgtgtcaactgtggggctatgtccaccccgctctggaggcgagatgggacgggtcactatctgtgcaacgcctgcggcctctaccacaagatgaacggcatcaaccggccgctcatcaagcctcagcgccggctgtccgcctcccgccgagtgggcctctcctgtgccaactgccagaccaccaccaccacgctgtggcgccgcaatgcggagggcgagcctgtgtgcaatgcctgcggcctctacatgaagctccacggggtccccaggcctcttgcaatgcggaaagaggggatccaaaccagaaaacggaagcccaagaacctgaataaatctaagacaccagcagctccttcaggcagtgagagccttcctcccgccagcggtgcttccagcaactccagcaacgccaccaccagcagcagcgaggagatgcgtcccatcaagacggagcctggcctgtcatctcactacgggcacagcagctccgtgtcccagacgttctcagtcagtgcgatgtctggccatgggccctccatccaccctgtcctctcggccctgaagctctccccacaaggctatgcgtctcccgtcagccagtctccacagaccagctccaagcaggactcttggaacagcctggtcttggccgacagtcacggggacataatcactgcgtaatcttccctcttccctcctcaaattcctgcacggacctgggacttggaggatagcaaagaaggaggccctgggctcccaggggccggcctcctctgcctggtaatgactccagaacaacaactgggaagaaacttgaagtcgacaatctggttaggggaagcgggtgttggattttctcagatgcctttacacgctgatgggactggagggagcccacccttcagcacgagcacactgcatctctcctg

SEQ ID NO: 5436 - DNA, 4022 bp, Homo sapiens
gacttcaggaaagcagtttccaggaggtgagagtttaagccaaacctgaaagaggttgatttgtaatgatttgcaggggggcactggaggcagccgccaggacttttcacttaggagatcagcatttgccctgatggaaactgggcgatcctgcagggactgacctctgagttatccaaaggccgacctggggaaagactgattttgaggttttaatagttttcagatgcttcaagtgttgtgaacagagacttgtttggattatgcatttctcagctagactaaataaatgctagcaatggatacgtgcaaacatgttgggcagctgcagcttgctcaagaccattccagcctcaaccctcagaaatggcactgtgtggactgcaacacgaccgagtccatttgggcttgccttagctgctcccatgttgcctgtggaagatatattgaagagcatgcactcaagcactttcaagaaagcagtcatcctgttgcattggaggtgaatgagatgtacgttttttgttacctttgtgatgattatgttctgaatgataacacaactggagacctgaagttactacgacgtacattaagtgccatcaaaagtcaaaattatcactgcacaactcgtagtgggaggtttttacggtccatgggtacaggtgatgattcttatttcttacatgacggtgcccaatctctgcttcaaagtgaagatcaactgtatactgctctttggcacaggagaaggatactaatgggtaaaatctttcgaacatggtttgaacaatcacccattggaagaaaaaagcaagaagaaccatttcaggaaaaaatagtagtaaaaagagaagtaaagaaaagacggcaggaattggagtatcaagttaaagcagaattggaaagtatgcctccaagaaagagtttacgtttacaagggctcgctcagtcgaccataatagaaatagtttctgttcaggtgccagcacaaacgccagcatcaccagcaaaagataaagtactctctacctcagaaaatgaaatatctcaaaaagtcagtgactcctcagttaaacgaaggccaatagtaactcctggtgtaacaggattgagaaatttgggaaatacttgctatatgaattctgttcttcaggtgttgagtcatttacttatttttcgacaatgttttttaaagcttgatctgaaccaatggctggctatgactgctagcgagaagacaagatcttgtaagcatccaccagtcacagatacagtagtatatcaaatgaatgaatgtcaggaaaaagatacaggttttgtttgctccagacaatcaagtctgtcatcaggactaagtggtggagcatcaaaaggtagaaagatggaacttattcagccaaaggagccaacttcacagtacatttctctttgtcatgaattgcatactttgttccaagtcatgtggtctggaaagtgggcgttggtctcaccatttgctatgctacactcagtgtggagactcattcctgcctttcgtggttacgcccaacaagacgctcaggaatttctttgtgaacttttagataaaatacaacgtgaattagagacaactggtaccagtttaccagctcttatccccacttctcaaaggaaactcatcaaacaagttctgaatgttgtaaataacatttttcatggacaacttcttagtcaggttacatgtcttgcatgtgacaacaaatcaaataccatagaacctttctgggacttgtcattggagtttccagaaaggtatcaatgcagtggaaaagatattgcttcccagccatgtctggttactgaaatgttggccaaatttacagaaactgaagctttagaaggaaaaatctacgtatgtgaccagtgtaactcaaagcgtagaaggttttcctccaaaccagttgtactcacagaagcccagaaacaacttatgatatgccacctacctcaggttctcagactgcacctcaaacgattcaggtggtcaggacgtaataaccgagagaagattggtgttcatgttggctttgaggaaatcttaaacatggagccctattgctgcagggagaccctgaaatccctcagaccagaatgctttatctatgacttgtccgcggtggtgatgcaccatgggaaaggatttggctcagggcactacactgcctactgctataattctgaaggagggttctgggtacactgcaatgattccaaactaagcatgtgcactatggatgaagtatgcaaggctcaagcttatatcttgttttatacccaacgagttactgagaatggacattctaaacttttgcctccagagctcctgttggggagccaacatcccaatgaagacgctgatacctcgtctaatgaaatccttagctgatccaaagacaatggggttttcttcctgtgatttatatatatactttttaaaagactgatgtaccattttaaacttcattttttcttgtgaatcagtgtatactacatttatacattttatatctaacaatttttttttttacaaagtataaatgtatatatcaactgaaggtaactacttttttcatatttggagttttaaacttttggtgtttacctcagactgatgttacctcttttatatttttatgtcttaattggctcggatgatgaacttgtgcaatcttctaccaacaaagttcaagtggcatcattttatatacatgtatctttttcaggtattttctatacaaattcttaatagatggaaaattagactctactttggtcactaatagtctttcatttgtatattgaagttaccttgccccttggagttattgaagtgacatgtcaaggtatcacctaaatattcttcagtcacactcactggtatttctgaggctttgtgtgttaacaggccttgtaattgacattattttggttaatgtaaccccaaaattgctttagtaattgctctttggcatagtcaaactataaatgaaaatggcagctttacaaatagtatatttaagtgaactctggaactatggacatgaaaaaaatgatggctgggatttatgatttttgtctggcagcaaacaggtttgtccagaagtctaataattaagcagtcataaaaagtctgaatttagtaaaccagtgtatgatgttattcaaatagtttaccttgggtatgagttcattttataatgtctgatgacattagatctcttaaaactttatgtattttttttagttcaaaggaatagagtcttgaagagaaaaaattatagggcagaaaagataagtgttcaaaattggcaactggactattattatgtctagcatctcattctaaataactaaagcttgatttactcttgctaggattatgtgactactaggtaggagcctcttaaaacactggccctgagcattaaaaaaaaaaaaaaaaactaaaagctatctatctaaacttgcacaaaaaaaaatacagtgtgagtcactctttttcttcttctgataatctcactgggtttctttaaagtcctgttgctgctaactttatcttatttggagagggtagaatcaactaatctctgtagaccagctatgtatctaagctctgttaaccacaggaagatcatgtatcccttttttataagtgggtttatttgcaggttgaagtcttagtgaaagatagtatcctgtagaatgctgttcaccactagtgatcatctgttaagtacaaacttgaaagaggtctctaccaataaatttttcttaaatttcacaaaacaagtcatctgggttagctgatagtgaggtgcagtgagacttttatcactgaatagacaaatcatttgtgccgaaaatacatctggaatattaaatggctatgtttaaaattgttcataatacctatgcaagttgttacctcaactgttacacacttcttaatacctcattaaaaatttacatggtcaagataa

SEQ ID NO: 5437 - DNA, 4256 bp, Homo sapiens
gaacacatcgcgtttgcatcccagaaagtagtcgccgcgactatttcccccaaagagacaagcacacatgtaggaatgacaaaggcttgcgaaggagagagcgcagcccgcggcccggagagatcccctcgataatggattactaaatgggatacacgctgtaccagttcgctccgagccccggccgcctgtccgtcgatgcaccgaaaagggtgaagtagagaaataaagtctccccgctgaactactatgaggtcagaagccttgctgctatatttcacactgctacactttgctggggctggtttcccagaagattctgagccaatcagtatttcgcatggcaactatacaaaacagtatccggtgtttgtgggccacaagccaggacggaacaccacacagaggcacaggctggacatccagatgattatgatcatgaacggaaccctctacattgctgctagggaccatatttatactgttgatatagacacatcacacacggaagaaatttattgtagcaaaaaactgacatggaaatctagacaggccgatgtagacacatgcagaatgaagggaaaacataaggatgagtgccacaactttattaaagttcttctaaagaaaaacgatgatgcattgtttgtctgtggaactaatgccttcaacccttcctgcagaaactataagatggatacattggaaccattcggggatgaattcagcggaatggccagatgcccatatgatgccaaacatgccaacgttgcactgtttgcagatggaaaactatactcagccacagtgactgacttccttgccattgacgcagtcatttaccggagtcttggagaaagccctaccctgcggaccgtcaagcacgattcaaaatggttgaaagaaccatactttgttcaagccgtggattacggagattatatctacttcttcttcagggaaatagcagtggagtataacaccatgggaaaggtagttttcccaagagtggctcaggtttgtaagaatgatatgggaggatctcaaagagtcctggagaaacagtggacgtcgttcctgaaggcgcgcttgaactgctcagttcctggagactctcatttttatttcaacattctccaggcagttacagatgtgattcgtatcaacgggcgtgatgttgtcctggcaacgttttctacaccttataacagcatccctgggtctgcagtctgtgcctatgacatgcttgacattgccagtgtttttactgggagattcaaggaacagaagtctcctgattccacctggacaccagttcctgatgaacgagttcctaagcccaggccaggttgctgtgctggctcatcctccttagaaagatatgcaacctccaatgagttccctgatgataccctgaacttcatcaagacgcacccgctcatggatgaggcagtgccctccatcttcaacaggccatggttcctgagaacaatggtcagataccgccttaccaaaattgcagtggacacagctgctgggccatatcagaatcacactgtggtttttctgggatcagagaagggaatcatcttgaagtttttggccagaataggaaatagtggttttctaaatgacagccttttcctggaggagatgagtgtttacaactctgaaaaatgcagctatgatggagtcgaagacaaaaggatcatgggcatgcagctggacagagcaagcagctctctgtatgttgcgttctctacctgtgtgataaaggttccccttggccggtgtgaacgatatgggaagtgtaaaaaaacctgtattgcctccagagacccatattgtggatggataaaggaaggtggtgcctgcagccatttatcacccaacagcagactgacttttgagcaggacatagagcgtggcaatacagatggtctgggggactgtcacaattcctttgtggcactgaatgacatttcaactcctctaccagataatgaaatgtcttacaacacagtgtatgggcattccagttccctcttgcccagcacaaccacatcagattcgacggctcaagaggggtatgagtctaggggaggaatgctggactggaagcatctgcttgactcacctgacagcacagaccctttgggggcagtgtcttcccataatcaccaagacaagaagggagtgattcgggaaagttacctcaaaggccacgaccagctggttcccgtcaccctcttggccattgcagtcatcctggctttcgtcatgggggccgtcttctcgggcatcaccgtctactgcgtctgtgatcatcggcgcaaagacgtggctgtggtgcagcgcaaggagaaggagctcacccactcgcgccggggctccatgagcagcgtcaccaagctcagcggcctctttggggacactcaatccaaagacccaaagccggaggccatcctcacgccactcatgcacaacggcaagctcgccactcccggcaacacggccaagatgctcattaaagcagaccagcaccacctggacctgacggccctccccaccccagagtcaaccccaacgctgcagcagaagcggaagcccagccgcggcagccgcgagtgggagaggaaccagaacctcatcaatgcctgcacaaaggacatgccccccatgggctcccctgtgattcccacggacctgcccctgcgggcctcccccagccacatccccagcgtggtggtcctgcccatcacgcagcagggctaccagcatgagtacgtggaccagcccaaaatgagcgaggtggcccagatggcgctggaggaccaggccgccacactggagtataagaccatcaaggaacatctcagcagcaagagtcccaaccatggggtgaaccttgtggagaacctggacagcctgccccccaaagttccacagcgggaggcctccctgggtcccccgggagcctccctgtctcagaccggtctaagcaagcggctggaaatgcaccactcctcttcctacggggttgactataagaggagctaccccacgaactcgctcacgagaagccaccaggccaccactctcaaaagaaacaacactaactcctccaattcctctcacctctccagaaaccagagctttggcaggggagacaacccgccgcccgccccgcagagggtggactccatccaggtgcacagctcccagccatctggccaggccgtgactgtctcgaggcagcccagcctcaacgcctacaactcactgacaaggtcggggctgaagcgtacgccctcgctaaagccggacgtaccccccaaaccatcctttgctcccctttccacatccatgaagcccaatgatgcgtgtacataatcccagggggagggggtcaggtgtcgaaccagcaggcaaggcgaggtgcccgctcagctcagcaaggttctcaactgcctcgagtacccaccagaccaagaaggcctgcggcagagccgaggacgctgggtcctcctctctgggacacaggggtactcacgaaaactgggccgcgtggtttggtgaaggtttgcaacggcggggactcaccttcattctcttccttcactttcccccacaccctacaacaggtcggacccacaaaagacttcagttatcatcacaaacatgagccaaaagcacatacctaccccatcccccacccccacacacacacacacacacacatgcacacaacacatacacacacacgcacagaggtgaacagaaactgaaacattttgtccacaacttcacgggacgtggccagactgggtttgcgttccaacctgcaaaacacaaatacattttttaaaatcaagaaaatttaaaaagacaaaaaaaaaagaattcattgataattctaactcagactttaacaatggcagaagtttactatgcgcaaatactgtgaaatgcccgccagtgttacagctttctgttgcagcagataaatgccatgttgggcaactatgtcatagatttctgctcctcctctcttttaatgaaataacgtgaccgttaacgcaagtaactctttatttattgttcaccctttttttccttaaggaaaggactcttccaaatatcatcctatgaacagctcttcagaaagcccattgaaagttaaactatttaacgtgaaatccattaactggaataattgagtttctttatttttacaataaattcactgagtaaat

SEQ ID NO: 5438 - DNA, 4826 bp, Homo sapiens
cgctcggcccgcgacctgccccgagccctctccatggaggcagcccgcccctccggctcctggaacggagccctctgccggctgctcctgctgaccctcgcgatcttaatatttgccagtgatgcctgcaaaaatgtgacattacatgttccctccaaactagatgccgagaaacttgttggtagagttaacctgaaagagtgctttacagctgcaaatctaattcattcaagtgatcctgacttccaaattttggaggatggttcagtctatacaacaaatactattctattgtcctcggagaagagaagttttaccatattactttccaacactgagaaccaagaaaagaagaaaatatttgtctttttggagcatcaaacaaaggtcctaaagaaaagacatactaaagaaaaagttctaaggcgcgccaagagaagatgggctccaattccttgttcgatgctagaaaactccttgggtccttttccacttttccttcaacaggttcaatctgacacggcccaaaactataccatatactattccataagaggtcctggagttgaccaagaacctcggaatttattttatgtggagagagacactggaaacttgtattgtactcgtcctgtagatcgtgagcagtatgaatcttttgagataattgcctttgcaacaactccagatgggtatactccagaacttccactgcccctaataatcaaaatagaggatgaaaatgataactacccaatttttacagaagaaacttatacttttacaatttttgaaaattgcagagtgggcactactgtgggacaagtgtgtgctactgacaaagatgagcctgacacgatgcacacacgcctgaagtactccatcattgggcaggtgccaccatcacccaccctattttctatgcatccaactacaggcgtgatcaccacaacatcatctcagctagacagagagttaattgacaagtaccagttgaaaataaaagtacaagacatggatggtcagtattttggtctacagacaacttcaacttgtatcattaacattgatgatgtaaatgaccacttgccaacatttactcgtacttcttatgtgacatcagtggaagaaaatacagttgatgtggaaatcttacgagttactgttgaggataaggacttagtgaatactgctaactggagagctaattataccattttaaagggcaatgaaaatggcaattttaaaattgtaacagatgccaaaaccaatgaaggagttctttgtgtagttaagcctttgaattatgaagaaaagcaacagatgatcttgcaaattggtgtagttaatgaagctccattttccagagaggctagtccaagatcagccatgagcacagcaacagttactgttaatgtagaagatcaggatgagggccctgagtgtaaccctccaatacagactgttcgcatgaaagaaaatgcagaagtgggaacaacaagcaatggatataaagcatatgacccagaaacaagaagtagcagtggcataaggtataagaaattaactgatccaacagggtgggtcaccattgatgaaaatacaggatcaatcaaagttttcagaagcctggatagagaggcagagaccatcaaaaatggcatatataatattacagtccttgcatcagaccaaggagggagaacatgtacggggacactgggcattatacttcaagacgtgaatgataacagcccattcatacctaaaaagacagtgatcatctgcaaacccaccatgtcatctgcggagattgttgcggttgatcctgatgagcctatccatggcccaccctttgactttagtctggagagttctacttcagaagtacagagaatgtggagactgaaagcaattaatgatacagcagcacgtctttcctatcagaatgatcctccatttggctcatatgtagtacctataacagtgagagatagacttggcatgtctagtgtcacttcattggatgttacactgtgtgactgcattaccgaaaatgactgcacacatcgtgtagatccaaggattggcggtggaggagtacaacttggaaagtgggccatccttgcaatattgttgggcatagcattgctcttttgcatcctgtttacgctggtctgtggggcttctgggacgtctaaacaaccaaaagtaattcctgatgatttagcccagcagaacctaattgtatcaaacacagaagctcctggagatgacaaagtgtattctgcgaatggcttcacaacccaaactgtgggcgcttctgctcagggagtttgtggcaccgtgggatcaggaatcaaaaacggaggtcaggagaccatcgaaatggtgaaaggaggacaccagacctcggaatcctgccggggggctggccaccatcacaccctggactcctgcaggggaggacacacggaggtggacaactgcagatacacttactcggagtggcacagttttactcagccccgtcttggtgaagaatccattagaggacacactctgattaaaaattaaacaatgaaagaaagtgtatctgtgtaatcaagatgaaaatcacaagcatgcccaagactatgtcctgacatataactatgaaggaagaggatcggtggctgggtctgtaggttgttgcagtgaacgacaagaagaagatgggcttgaatttttggataatttggagcccaaatttaggacactagcagaagcatgcatgaagagatgagtgtgttctaataagtctctgaaagccagtggctttatgacttttaaaaaaaattacaaaccaagaattttttaaagcagaagatgctatttgtgggggtttttctctcattatttggatggaatctctttggtcaaatgcacatttacagagagacactataaacaagtacacaaatttttcaatttttacatatttttaaattacttatcttctatccaaggaggtctacagagaaattaaagtctgccttatttgttacatttgggtataatgacaacagccaatttatagtgcaataaaatgtaattaattcaagtccttattatagactatttgaagcacaacctaatggaaaattgtagagaccttgctttaacattatctccagttaattaagtgttcatgtggtgcttggaaactgttgttttcctgaacatctaaagtgtgtagactgcattcttgctattattttattcttgtaatgtgaccttttcactgtgcaaagggagatttctagccaggcattgactattacaatttcattttggtggagtttagttttaggttttattgtatataaaatcctgcactgaatctgtgtctcctctgttacctacttttgccagtgaaatttaagttttaaaatactttcagaatgtatttttactactgcaagtttttggtctttaaaatgtcaagtagcatctctctctttctctctgtctctttctgtttctctctccagttttttttttttttttaatttccatatgggctaaagaatccaaatattttaaaaatctgtctctcttttcttctctcataaagtgaattattccttttttttgttttatgtaagtgtatatattcttagtttttcttgaaatcattgtaatgttaactttgttgtttcaaatatcttggtgattgcttcattatctcttcaacaaaaaaaacctttaattttgccattgaaactgtagaactatgccatgcttttattagaagcagtgctctgtgttaacaacaagaatggtgtaattagaattgggatgtggatatttactgtatgacaacacatttacagttctgtaatgcaaggatgcagtttaaaaatgtgaagtagtgatggtttttgaaataagctttaaaatatagggatcttgaaggctccctggggtaactattttataacttagataaaatggctagtcatatctgtgtgtttgtaaagttatttttttaatattttaagattacaattttaacaaatgtagaaatgagccaaactatttaaattttaaaacagtaaaacaaaatgaaacttaatagctcacaaaattccagtccatgtttcatgacttattttagtcaatgaattttctatttatactaaacatatggacattttaaatgtgtttctaatatttttgattatctataatgtgcctgtcttcaattcacaagattgggttataacaattatttgccagattaacactagggaattatttgataaccagcttatcttatcagtagttttattgctgatcaggcaaaaatagttttccaaagttatttttaataaagtatatacaaaattcttatatattactagtcatgataaagtaaattaagcagtttttaaaacttagtgtgagtttgttcatcacaggtctgatatgagtttaagggatttcgcactccctgaatcagagaagtaagaccccttccttagattcctgttatacattttttaaaatgtagagtttgttttggagacattttcagtgcattgttattgccatatttatataatatgactattctaaaggctgtgaggccatggggtattggttaagttgcttgcttttgctttgtccattttcatcattttaaaatgggggataataacagaacttgtttcctagggccattgtaagtcacttgaataaaaaatagttttgaagcatgagagtcatacagagcggtccacctaaaaggcactcctgataataataaatgattttaaacaagt

SEQ ID NO: 5439 - DNA, 6531 bp, Homo sapiens
acaaaggtcgctcttctgcagccagcttgccacaattccctgagatctcccaggtggcagctgcctccccaagacaggctcactcaccatgaccaagctgagcgcccaagtcaaaggctctctcaacatcaccaccccggggctgcagatatggaggatcgaggccatgcagatggtgcctgttccttccagcacctttggaagcttcttcgatggtgactgctacatcatcctggctatccacaagacagccagcagcctgtcctatgacatccactactggattggccaggactcatccctggatgagcagggggcagctgccatctacaccacacagatggatgacttcctgaagggccgggctgtgcagcaccgcgaggtccagggcaacgagagcgaggccttccgaggctacttcaagcaaggccttgtgatccggaaagggggcgtggcttctggcatgaagcacgtggagaccaactcctatgacgtccagaggctgctgcatgtcaagggcaagaggaacgtggtagctggagaggtagagatgtcctggaagagtttcaaccgaggggatgttttcctcctggaccttgggaagcttatcatccagtggaatggaccggaaagcacccgtatggagagactcaggggcatgactctggccaaggagatccgagaccaggagcggggagggcgcacctatgtaggcgtggtggacggagagaatgaattggcatccccgaagctgatggaggtgatgaaccacgtgctgggcaagcgcagggagctgaaggcggccgtgcccgacacggtggtggagccggcactcaaggctgcactcaaactgtaccatgtgtctgactccgaggggaatctggtggtgagggaagtcgccacacggccactgacacaggacctgctcagtcacgaggactgttacatcctggaccaggggggcctgaagatctacgtgtggaaagggaagaaagccaatgagcaggagaagaagggagccatgagccatgcgctgaacttcatcaaagccaagcagtacccaccaagcacacaggtggaggtgcagaatgatggggctgagtcggccgtctttcagcagctcttccagaagtggacagcgtccaaccggacctcaggcctaggcaaaacccacactgtgggctccgtggccaaagtggaacaggtgaagttcgatgccacatccatgcatgtcaagcctcaggtggctgcccagcagaagatggtagatgatgggagtggggaagtgcaggtgtggcgcattgagaacctagagctggtacctgtggattccaagtggctaggccacttctatgggggcgactgctacctgctgctctacacctacctcatcggcgagaagcagcattacctgctctacgtttggcagggcagccaggccagccaagatgaaattacagcatcagcttatcaagccgtcatcctggaccagaagtacaatggtgaaccagtccagatccgggtcccaatgggcaaggagccacctcatcttatgtccatcttcaagggacgcatggtggtctaccagggaggcacctcccgaactaacaacttggagaccgggccctccacacggctgttccaggtccagggaactggcgccaacaacaccaaggcctttgaggtcccagcgcgggccaatttcctcaattccaatgatgtctttgtcctcaagacccagtcttgctgctatctatggtgtgggaagggttgtagcggggacgagcgggagatggccaagatggttgctgacaccatctcccggacggagaagcaagtggtggtggaagggcaggagccagccaacttctggatggccctgggtgggaaggccccctatgccaacaccaagagactacaggaagaaaacctggtcatcaccccccggctctttgagtgttccaacaagactgggcgcttcctggccacagagatccctgacttcaatcaggatgacttggaagaggatgatgtgttcctactagatgtctgggaccaggtcttcttctggattgggaaacatgccaacgaggaggagaagaaggccgcagcaaccactgcacaggaatacctcaagacccatcccagcgggcgtgaccctgagacccccatcattgtggtgaagcagggacacgagccccccaccttcacaggctggttcctggcttgggatcccttcaagtggagtaacaccaaatcctatgaggacctgaaggcggagcttggcaactctagggactggagccagatcactgctgaggtcacaagccccaaagtggacgtgttcaatgctaacagcaacctcagttctgggcctctgcccatcttccccctggagcagctagtgaacaagcctgtagaggagctccccgagggtgtggaccccagcaggaaggaggaacacctgtccattgaagatttcactcaggcctttgggatgactccagctgccttctctgctctgcctcgatggaagcaacaaaacctcaagaaagaaaaaggactattttgagaagagtagctgtggttgtaaagcagtaccctaccctgattgtagggtctcattttctcaccgatattagtcctacaccaattgaagtgaaattttgcagatgtgcctatgagcacaaacttctgtggcaaatgccagttttgtttaataatgtacctattccttcagaaagatgataccccaaaaggagcctatggtcctcatttcaacttctaaggtcgctagattgtttctatcctgaggtattgcatcaattttaatactcctatagttttctcttcttagaagagcacaaacactccatggaacattagagttctgaggcactaccctagcttgtcctctatcatgactcatttttatctatggcaggtaggctgaagcactttgcaggtttacatcttccccagagtaacagcttttccttttcacatatactttccttactgccttactcagtgggtaagttaaagggctgaaggagagttgaatggtccacaagactaccctcttaagaggtttcacaaattccaaacagtaccagtgagagcagcacttccactggggctaggcttgagacctaaaggcaagtatgaaatgcatatgctacttcactccctctcccaacccttaataatgaggcaaagcaagagcctagtgaaggccaatgctaggtttacaaacttacccagaagcctctgcaaagcttcacaggctcctcagatgaaaataacaggaatcaatggggactacggccagacactggtttgccattctgttccttttaagaagtaacagtgctgcaaggaagtccatgtcagaaagccaacagaaggtgatttccacaactttgaacaggttgttacaagtatcagcaagaatgtgtccttttcagaaataacagtcaaatcaaagaaggttaataaaggctttaatttcatacacacaaaaaaactctatgcataatttaaaaaggaaacaaaaacaaagaaaaaccgtaaaggatacagaggaacagttctgctaaaacacagataaaagtgccgctccatacaaaacataaagaatcagaatcaaaagtcactctgaacataaagaaaaaaaatcatctcacaaataatgtggccacagctgccagaaaacctggtagtggctcaattaggcaaagtgtaggaatctcatttttgtttttctctccttaagtttaaagaaacaacaatgacaataggccagagaagttagggagggaaagaaaagctcaaagggagggaaacctggggacaagaggtgtgcacacccacatgtggtctcactcttcacacaggcccactatttttgaagtagaccagtttagttgactgttcttctttgttctggcatctgactggaccaacctggaacctggtccagaccctcacccactctattcttatgccaatggacatacctatactttgaacctctgtacttttaagaaaagtccaatgttacaaaatcaaatgcttatattcagactggcacactttttaaataaaaactccatacacctcagacatatagcacacatggagacaacttactaattgtgtgtaagtatgatacaatgaatgagactgcctgaagtctagtaatcaaagcatgccataaggtgaatgattgtggttaaacacagcaaaataattgtcacaaaactttcaaggcctaacaaattagaattttccaataaaaaatatatattttttcagatgttaataagacatatcagtagagacaaaattaggattttgaagtaatgcaataaaaagatgttggagggcagaagtctatttagtttttgtatacacttgcaagagtgcattactcagtataaagcaaaatggggaggaaaaagacatccatccattttattggaacacttttatgtgacttgaatctggtgttaggttgttgatttttctaaaaatctcctatatatacaaaatccatatgtacttggagatccagctgttgccccctgtttaaaacaaaagaccacctcggggggtcaattaaattaaaaaggccctccaaccaccctaaatgggataactaagagtatctactgcagtcatttcagaggacagagaaggaaaatattttaatttgctttaatataacctcttttcagtagatcacaaatgagtttacaaactacttttttttctctttaatttaggtgtttgcagataattttcattatatccgtagctgtatgtgtgtatagttacataatggtaactacacacgatacagaagaatcagtaaattcatggattattttgctgaggttttaaattttaaagcctctgtttcagaattttatacttgatcaaggagaaaaataaatgtgtagtctaacatttgctttctggagttaattaactgatctgtaagaaccactgcatatgtcttaaaatgtaaacatatttacatttgttgtatttgttattgagcctttaaggttaggcccagaatgaacagaccatagcaagtaaacaaataatttttagaatcaaagtattaatagaagaccagttcatggatttgcttattctatcctgctgagacaaaactcatgagtgtgcacacacatgtgaatatatccctacgaaacagtctatcttctcataggcttaaattatagtcatggctattaaagaaattaacagcatccagccacatgcaactttccaaccttcagtactattaggtgattaaaatcaacaaatatgaagtttagttcatttttcccttaaaattccaacaaagatcaaaaggttgtatctagaactaattgccatcaagttccaattcaatgtcatttaaagtaatgtaaccacacatttggtattttcaataggaaggttaattaggtattgtgcaaactgcctgcaacggaagcactcagtccttatctaacttgtcccttcctggccccaacatgctaactgccccatccccaattctgggcaaactgatcacaatgtgcaaaaaataatatattatctatttataattttaaaatatatacagccagctcaaaaacaacaacaaaccccatcaacatagtccagctgaaatctccactggtagtcaaagaagtagattaaaggagtaaaggaaggagaaggctgatagggccacaagaatggacagacatcaagtaaaatttgagtcccaaacatgcaagtacatgagcagtgagataacttatatattccaataacctattttcaacaactcctgcccaagacatgaagatcaaatcaggtttctgaggtaagtgtacttctaaaccatacacacatgaaagctatgaaagcaattcaaatgaggctgcttcatgaggcaatctagacttatggcattatttctacttttctccatgttttaattgcagcctgcactttaaatctttcccaataatttttaacagtgcctctcaaatgcaaagacacgtaaaagaattaataactagccaaagaattttatcaccgcttcactcatttataagaaaaccaattatttccaagcaaaatcaaaccaaaccaaagaggctcctggtagaaatgaaacaaaactttaaagctagttttaaaacaaatattttcctctgctctaaactactctggcgttttctaccactctaccattttggaacattcattacaataaggtatataggtagatggtaggaggcaaagcatttatcagtagttgagcaaaactgctgaggccatttataattcaaagaatgaaaacttagaatagtttactacattagaatacatccaagttccaagagtaggactggagctctcttaaggcaatctttcagaaaagatgttgcatcttctgtgatgatggtttgtgttttttttgtttttgttttcgttttttttaatgagatggagtctcac

SEQ ID NO: 5440 - DNA, 7992 bp, Homo sapiens; identical to SEQ ID NO: 653

SEQ ID NO: 5441 - DNA, 2817 bp, Homo sapiens
gcttcacgctaaagccccagagcccgacgcggcagccgcggtagcggagaagactggagctccgaggagctgcatctgcggcaacctgtgtgctgacgctacgtgcctcctggctccgacgtagctcgcagctccccagtctcactccattccttccccacctggcgcgcacctgctcaagaccagggtcctgccaagcgctaggagggcgcgtgccaggggcgctagggaactgcggagcgcgcgcgccatggggccgccgcctggggccggggtctcctgccgcggtggctgcggcttttccagattgctggcatggtgcttcctgctggccctgagtccgcaggcacccggttcccggggggctgaagcagtgtggaccgcgtacctcaacgtgtcctggcgggttccgcacacgggagtgaaccgtacggtgtgggagctgagcgaggagggcgtgtacggccaggactcgccgctggagcctgtggctggggtcctggtaccgcccgacgggcccggggcgcttaacgcctgtaacccgcacacgaatttcacggtgcccacggtttggggaagcaccgtgcaagtctcttggttggccctcatccaacgcggcgggggctgcaccttcgcagacaagatccatctggcttatgagagaggggcgtctggagccgtcatctttaacttccccgggacccgcaatgaggtcatccccatgtctcacccgggtgcagtagacattgttgcaatcatgatcggcaatctgaaaggcacaaaaattctgcaatctattcaaagaggcatacaagtgacaatggtcatagaagtagggaaaaaacatggcccttgggtgaatcactattcaatttttttcgtttctgtgtccttttttattattacggcggcaactgtgggctattttatcttttattctgctcgaaggctacggaatgcaagagctcaaagcaggaagcagaggcaattaaaggcagatgctaaaaaagctattggaaggcttcaactacgcacactgaaacaaggagacaaggaaattggccctgatggagatagttgtgctgtgtgcattgaattgtataaaccaaatgatttggtacgcatcttaacgtgcaaccatattttccataagacatgtgttgacccatggctgttagaacacaggacttgccccatgtgcaaatgtgacatactcaaagctttgggaattgaggtggatgttgaagatggatcagtgtctttacaagtccctgtatccaatgaaatatctaatagtgcctcctcccatgaagaggataatcgcagcgagaccgcatcatctggatatgcttcagtacagggaacagatgaaccgcctctggaggaacacgtgcagtcaacaaatgaaagtctacagctggtaaaccatgaagcaaattctgtggcagtggatgttattcctcatgttgacaacccaacctttgaagaagacgaaactcctaatcaagagactgctgttcgagaaattaaatcttaaaatctgtgtaaatagaaaacttgaaccattagtaataacagaactgccaatcagggcctagtttctattaataaattggataaatttaataaaataagagtgatactgaaagtgctcagatgactaatattatgctatagttaaatggcttaaaatatttaacctgttaacttttttccacaaactcattataatatttttcataggcaagtttcctctcagtagtgataacaacatttttagacattcaaaactgtcttcaagaagtcacgtttttcatttataacaattttcttataaaaacatgttgcttttaaaatgtggagtagctgtaatcactttattttatgatagtatcttaatgaaaaatactacttctttagcttgggctacatgtgtcagggtttttctccaggtgcttatattgatctggaattgtaatgtaaaaagcaatgcaaacttaggcgagtacttcttgaaatgtctatttaagctgctttaagttaatagaaaagattaaagcaaaatattcatttttactttttcttatttttaaaattaggctgaatgtacttcatgtgatttgtcaaccatagtttatcagagattatggacttaattgattggtatattagtgacatcaacttgacacaagattagacaaaaaattccttacaaaaatactgtgtaactatttctcaaacttgtgggatttttcaaaagctcagtatatgaatcatcatactgtttgaaattgctaatgacagagtaagtaacactaatattggtcattgatcttcgttcatgaattagtctacagaaaaaaaatgttctgtaaaattagtctgttgaaaatgttttccaaacaatgttactttgaaaattgagtttatgtttgacctaaatgggctaaaattacattagataaactaaaattctgtccgtgtaactataaattttgtgaatgcattttcctggtgtttgaaaaagaagggggggagaattccaggtgccttaatataaagtttgaagcttcatccaccaaagttaaatagagctatttaaaaatgcactttatttgtactctgtgtggcttttgttttagaattttgttcaaattatagcagaatttaggcaaaaataaaacagacatgtatttttgtttgctgaatggatgaaaccattgcattcttgtacactgatttgaaatgctgtaaatatgtcccaatttgtattgattctctttaaatataaaatgtaaataaaatattccaataaaa

SEQ ID NO: 5442 - DNA, 1349 bp, Homo sapiens
gacggcgcttttgtctccggtgagttttgtggcgggaagcttctgcgctggtgcttagtaaccgactttcctccggactcctgcacgacctgctcctacagccggcgatccactcccggctgttcccccggagggtccagaggcctttcagaaggagaaggcagctctgtttctctgcagaggagtagggtcctttcagccatgaagcatgtgttgaacctctacctgttaggtgtggtactgaccctactctccatcttcgttagagtgatggagtccctagagggcttactagagagcccatcgcctgggacctcctggaccaccagaagccaactagccaacacagagcccaccaagggccttccagaccatccatccagaagcatgtgataagacctccttccatactggccatattttggaacactgacctagacatgtccagatgggagtcccattcctagcagacaagctgagcaccgttgtaaccagagaactattactaggccttgaagaacctgtctaactggatgctcattgcctgggcaaggcctgtttaggccggttgcggtggctcatgcctgtaatcctagcactttgggaggctgaggtgggtggatcacctgaggtcaggagttcgagaccagcctcgccaacatggcgaaaccccatctctactaaaaatacaaaagttagctgggtgtggtggcagaggcctgtaatcccagctccttgggaggctgaggcgggagaattgcttgaacccggggacggaggttgcagtgagccgagatcgcactgctgtacccagcctgggccacagtgcaagactccatctcaaaaaaaaaagaaaagaaaaagcctgtttaatgcacaggtgtgagtggattgcttatggctatgagataggttgatctcgcccttaccccggggtctggtgtatgctgtgctttcctcagcagtatggctctgacatctcttagatgtcccaacttcagctgttgggagatggtgatattttcaaccctacttcctaaacatctgtctggggttcctttagtcttgaatgtcttatgctcaattatttggtgttgagcctctcttccacaagagctcctccatgtttggatagcagttgaagaggttgtgtgggtgggctgttgggagtgaggatggagtgttcagtgcccatttctcattttacattttaaagtcgttcctccaacatagtgtgtattggtctgaagggggtggtgggatgccaaagcctgctcaagttatggacattgtggccaccatgtggcttaaatgattttttctaactaataaagtggaatatatatttc

SEQ ID NO: 5443 - DNA, 6167 bp, Homo sapiens
atcctgggctcccagctggagaggcggaggcagctccagggggctggaagtggaagcgcagcggcagaaggagagggagagagaaagagagagaggctaattaaaaaaggatactccgagggaagagagcaagggcggtgcgccgccaaggaccaactagcggcggagcttcgatcttgcctaggcgcggagagctcccaacctgggctggaaccttgcccagcacaggtggctgctacaccccatgtaaaaagcggaaaataaaatgaagattttccagcgcaagatgcggtactggttgcttccaccttttttggcaattgtttatttctgcaccattgtccaaggtcaagtggctccacccacaaggttaagatataatgtaatatctcatgacagtatacagatttcatggaaggctccaagagggaaatttggtggttacaaacttcttgtgactccaacttcaggtggaaaaactaaccagctgaatctgcagaacactgcaactaaagcaattattcaaggccttatgccagaccagaattacacagttcaaattattgcatacaataaagataaagaaagcaagccagctcaaggccaattcagaattaaagatttagaaaaaagaaaggatccaaagcccagagtcaaagttgtggacagaggaaatgggagtagaccatcttcaccagaagaagtgaaatttgtctgtcaaactccagcaattgctgacattgtaatcctggtcgatggttcatggagtattggaagattcaacttcagactggttcggcatttcttggaaaacctggttacagcattcgatgtgggctcagagaagacacgaattggggtgaaaaacgcggatgtgaatgagctgcaggagatcgcctctgaaccagacagcactcatgtgtacaatgttgccgaattcgatctgatgcacacagttgtggagagtctgaccaggactctctgctctagagtggaagaacaggacagagaaattaaagcctcagcccatgccatcactgggccgcctacggagttgattacttctgaagtcactgccagaagctttatggttaactggactcatgccccaggaaatgtggaaaaatacagagttgtgtattatcctaccaggggtggaaaaccagacgaggtggtggtagatggaactgtatcttccacagtgttgaaaaacttgatgtctttaactgaatatcagatagcagtctttgcaatctatgcccacactgctagtgaaggcctacggggaactgaaactacacttgctttaccgatggcttctgaccttctactgtacgacgtgactgagaacagcatgcgagtcaaatgggatgcagtgcctggggcctcaggttacctgatcctttatgctcctctaacagagggcctggctggggatgaaaaagagatgaaaattggagagacccacacagatattgaattgagtgggttgttgcccaatacagaatacacagtcacagtttatgccatgtttggagaagaggccagtgatcctgttacgggacaagaaacaacattggctttaagtccaccaagaaacctgagaatctccaatgttggctctaacagtgctcgattaacctgggacccaacttcaagacagatcaatggttatcgaattgtatataacaatgcagatgggactgaaatcaatgaggttgaagtcgatcctattactaccttccctctgaagggcttgacacctctcacagagtatactattgctattttctccatctatgatgaaggacagtcagagcctctgactggagtttttaccaccgaggaagttccagcccagcaatacttagaaattgatgaggtgacgacagacagttttagggtgacctggcatcccctctcagctgatgaagggctacacaaattgatgtggattccagtctatggggggaagactgaggaggttgtcctgaaagaagagcaggactcacatgttattgaaggcctggagcccggtacggagtatgaagtttcactattggccgtacttgatgatggaagcgagagtgaggtggtgactgctgtcgggaccacacttgacagtttttggacagaaccagctacaaccatagtgcctaccacatctgtgacttcagttttccagacgggaatcagaaacctagttgtaggtgatgaaactacttctagcctgcgggtaaaatgggacatttctgacagcgatgtgcagcagtttagggtgacctacatgacagctcaaggggaccctgaggaagaagtcataggaacggttatggtgcctggaagccagaacaacctccttctgaagcctctgcttcctgatactgaatacaaagtcacagtgactcccatctacacggatggcgaaggcgtcagcgtctccgctcctggaaaaaccttaccatcctcggggccccagaacttgcgggtgtccgaggaatggtataaccggttgcgcattacgtgggaccccccatcttccccggtgaaaggctatagaattgtctacaaacctgtcagtgttcctggtccaacactggaaacgtttgtgggagctgacattaacaccatccttatcacaaacctcctcagcggaatggactacaatgtgaagatatttgcctcccaggcctcaggcttcagcgacgccctgacaggcatggtgaaaacattgttcttgggtgttaccaatctccaagccaaacatgttgaaatgaccagcttgtgtgcccactggcaggtacatcgccatgccacagcctatagggttgttatagaatccctccaggataggcaaaagcaagaatccactgtgggtggagggacaaccaggcattgcttctatggacttcagcctgattctgaatataaaatcagtgtttatacaaagctccaggagattgaaggacctagtgtgagcataatggaaaaaacacaatcacttcctacacgaccaccaacttttcctccaaccattccaccagcaaaagaagtatgtaaggcggccaaggctgacctggtatttatggtggatggatcctggagcattggagatgaaaatttcaataagatcatcagctttctatacagcactgttggagccctgaacaagattggcacagatggaacccaagttgcaatggttcagttcactgatgatcccagaacagaatttaaactaaatgcttacaaaaccaaagagactcttcttgatgcaattaaacacatttcatacaaaggaggaaatacaaaaacaggaaaagcaattaagtatgttcgagataccttgttcactgcagagtcaggtacaagaaggggcatcccaaaggttatcgtggttataactgatggaagatcacaagatgatgtgaacaaaatctccagggagatgcaattagatggctatagcatttttgcaattggtgtggccgatgcagattactcggagttggttagcattggcagtaagcccagcgcacgccatgtcttctttgtggatgactttgacgcctttaagaaaatcgaagatgagttaattacttttgtctgcgaaacagcatcagcaacctgtccagtggtacacaaggatggcattgatcttgcaggatttaagatgatggaaatgtttggtttggttgaaaaagatttttcatcagtggaaggggtttctatggagcctggtaccttcaatgtgtttccatgttaccaactccataaagatgccctggtttcccagccaaccaggtacttgcacccagaaggattgccctccgactacacaatcagttttctattccggattcttcctgacactccacaggagccatttgctctttgggagattttaaataaaaattctgacccattggttggggttattttagacaatggtgggaaaactctaacatatttcaactatgaccagagtggggattttcaaactgttactttcgaaggacctgaaattaggaaaattttttatggaagctttcacaagctacacattgttgtcagtgagactttggtcaaagtggttattgactgcaagcaagtgggtgagaaggcaatgaacgcatcagctaatatcacgtcagatggtgtagaagtgctagggaaaatggttcgatcaagaggaccaggtggaaactctgcaccgttccagttacagatgtttgatattgtttgctccacatcatgggccaatacagacaaatgctgtgaacttccaggcctgagagatgatgagtcttgcccagaccttccccattcctgctcctgttctgaaaccaatgaagtggctctgggaccagcgggcccaccaggtggtccaggactccgaggaccaaagggccagcaaggtgaaccgggtccaaagggaccagatggccctcggggtgaaattggtctgccaggacctcagggtccacctggacctcaaggaccaagtggtctgtccattcaaggaatgcccggaatgccaggagaaaaaggagagaaaggagatactggccttccaggtccacagggtatcccaggaggcgttggttcaccaggacgtgatggctcaccaggccagaggggccttccgggaaaggatggatcctcgggacctccaggaccaccagggccaataggcattcctggcacccctggagtcccagggatcacaggaagcatgggaccgcaaggcgccctgggaccacctggtgtccctggagcaaagggggaacgaggagagcggggtgacctgcagtctcaagccatggtgagatcagtggcgcgtcaagtatgcgaacagctcatccagagtcacatggccaggtacactgccatcctcaaccagattcccagccactcctcatccatccggactgtccaagggcctcctggggagcctgggaggccaggctcacctggagcccctggtgaacaaggacccccaggcacaccaggcttccccggaaatgcaggcgtgccagggaccccaggagaacgaggtctaactggtatcaaaggagaaaaaggaaatccaggcgttggaacccaaggtccaagaggcccccctggaccagcaggaccttcaggggagagtcggcctggcagccctgggccccctggctctcctggaccaagaggcccaccaggtcatctgggggttcctggaccccaaggtccttctggccagcctggatattgtgacccctcatcatgttctgcctatggtgtgagagctccccatccagatcagccagagttcacccctgtccaagatgagctggaagccatggaactgtggggccctggagtctgatagcctcaggagaaatttgaagaccaactgcaagaactcttaaggaatcttgtttgagaaaatgttgttatgtggtttgtatgctacttttggggggcagggctcatttcagcagcctaaatctcctccttggataatgttaatattattattattattaacaaaaaatatatatttttaaaaagttcccttaatctatgacatggtagcaatgatttccctttggtgtcttaatggcatgtcagataatttgtttttccagagaagagagctcaaagaggaattgggaaaaataaattgaactctggaatcttctctctcaagtcctaaaatgaacaaacagatatgattgtgtttgagggaaatatgtccctagcaggaaaagaattcaaagaggttcaaagaatatgtcacttactcctacttgctgtaggaataaccttgctgataagaaaaaaagggacaatattggagaaactacctcttgtttaattgatctgtccaactctgagatcacttggtaactggtttcatgtgtatccaaaaatcagcatttggatttaagctttctgaatttggtagtttaagaaacagatttagtttttcagtggttttaactcatgtgaaataatgattttccaccagctctgatgcaaagagatataattttaatgaacgatttatccagcagtgtgttccaggggttgcctctccttatctacggggattactttgtacatgcagataagttttcgcaaacctatttccattttcttttgtaagcaaataaaacttt

SEQ ID NO: 5444 - DNA, 8013 bp, Homo sapiens
agggatcctacctcttttgaccggagatgttgaaaagcacgaccaaagtttttggcttggtctcttgctttccacaacgagataaagtctgaagcctgtaactctccctgtcccgcgggagcgtgcaaagggagggaagataagcggcgtgggtgaggggtggcggcgcagaacccaggaagggagcagaggcgagagccagcctccggcaggagggcgtagaccccggtgccagccagaacggctccagccttcccgcggccagagagccagcggcgggaggggacgggcgggacctccgcggacagccccgggtgcggaccagcgggcagcggccggcgagaccctccctggatccgcccagagcttaccggaccctgcgcgcccccgtcccggctcccggccggctcgggggagaaggcgcccgaggggaggcgccggacagatcgcgtttcggaggcggcgcaggtgctgtaaactgcaaaccataatcctgtcttaatactgcaaacaaatcatagtggaactaaggggaacttaatttactgtttccaggttaactaaggtctcagctgtaaaccaaaagtgagaggagacattaagattttcattcttaccgggttgtcttcttcctgaagagcaatggagccgcttttacttggaagaggactaatcgtatatctaatgttcctcctgttaaaattctcaaaagcaattgaaataccatcttcagttcaacaggttccaacaatcataaaacagtcaaaagtccaagttgcctttcccttcgatgagtattttcaaattgaatgtgaagctaaaggaaatccagaaccaacattttcgtggactaaggatggcaaccctttttatttcactgaccatcggataattccatcgaacaattcaggaacattcaggatcccaaacgaggggcacatatctcactttcaagggaaataccgctgctttgcttcaaataaactgggaatcgctatgtcagaagaaatagaatttatagttccaagtgttccaaaattcccaaaagaaaaaattgaccctcttgaagtggaggagggagatccaattgtcctcccatgcaatcctcccaaaggcctcccacctttacacatttattggatgaatattgaattagaacacatcgaacaagatgaaagagtatacatgagccaaaagggagatctatacttcgcaaacgtggaagaaaaggacagtcgcaatgactactgttgctttgctgcatttccaagattaaggactattgtacagaaaatgccaatgaaactaacagttaacagtttaaagcatgctaatgactcaagttcatccacagaaattggttccaaggcaaattccatcaagcaaagaaaacccaaactgctgttgcctcccactgagagtggcagtgagtcttcaattaccatcctcaaaggggaaatcttgctgcttgagtgttttgctgaaggcttgccaactccacaggttgattggaacaaaattggtggtgacttaccaaaggggagagaaacaaaagaaaattatggcaagactttgaagatagagaatgtctcctaccaggacaaaggaaattatcgctgcacagccagcaatttcttgggaacagccactcacgattttcacgttatagtagaagagcctcctcgctggacaaagaagcctcagagtgctgtgtatagcaccggaagcaatggcatcttgttatgtgaggctgaaggagaacctcaacccacaatcaagtggagagtcaatggctccccagttgacaatcatccatttgctggtgatgttgtcttccccagggaaatcagttttaccaaccttcaaccaaatcatactgctgtgtaccagtgtgaagcctcaaatgtccatggaactatccttgccaatgccaatattgatgttgtggatgtccgtccattgatacaaaccaaagatggagaaaattacgctacagtggttgggtacagtgctttcttacattgcgagttctttgcttcacctgaggcagtcgtgtcctggcagaaggtggaagaagtgaaacccctggagggcaggcggtatcatatctatgaaaatggcacattgcagatcaacagaaccaccgaagaagatgctgggtcttactcatgttgggtagaaaatgctataggaaaaactgcagtcacagccaatttggatattagaaatgctacaaaacttagagtttctcctaagaatcctcgtatccccaaattgcatatgcttgaattacattgtgaaagcaaatgtgactcacatttgaaacacagtttgaagttgtcctggagtaaagatggagaagcctttgaaattaatggcacagaagatggcaggataattattgatggagctaatttgaccatatctaatgtaactttagaggaccaaggtatttactgctgttcagctcatactgctctagacagtgctgccgatataactcaagtaactgttcttgatgttccggatccaccagaaaaccttcacttgtctgaaagacagaacaggagtgttcggctgacctgggaagctggagctgaccacaacagcaatattagcgagtatattgttgaatttgaaggaaacaaagaagagcctggaaggtgggaggaactgaccagagtccaaggaaagaaaaccacagttatcttacctttggctccatttgtgagataccagttcagggtcatagccgtgaacgaagtagggagaagtcagcctagccagccgtcagaccatcatgaaacaccaccagcagctccagataggaatccacaaaacataagggttcaagcctctcaacccaaggaaatgattataaagtgggagcctttgaaatccatggagcagaatggaccaggcctagagtacagagtgacctggaagccacagggagccccagtggagtgggaagaagaaacagtcacaaaccacacattgcgggtgatgacgcctgctgtctatgccccttatgatgtcaaggtccaggctatcaatcaactaggatctgggcctgaccctcagtcagtgactctctattctggagaagactatcctgatacagctccagtgatccatggggtggacgttataaacagtacattagttaaagttacctggtcaacagttccaaaggacagagtacatggacgtctgaaaggctatcagataaattggtggaaaacaaaaagtctgttggatggaagaacacatcccaaagaagtgaacattctaagattttcaggacaaagaaactctggaatggttccttccttagatgcctttagtgaatttcatttaacagtcttagcctataactctaaaggagctggtcctgaaagtgagccttatatatttcaaacaccagaaggagtacctgaacagccaacttttctaaaggtcatcaaagttgataaagacactgccactttatcttggggactacctaagaaattaaatggaaacttaactggctatcttttgcaatatcagataataaatgacacctacgagattggagaattaaatgatattaacattacaactccatcaaagcccagctggcacctctcaaacctgaatgcaactaccaagtacaaattctacttgagggcttgcacttcacagggctgtggaaaaccgatcacggaggaaagctccaccttaggagaagggagtaaaggtatcgggaagatatcaggagtaaatcttactcaaaagactcacccaatagaggtatttgagccgggagctgaacatatagttcgcctaatgactaagaattggggcgataatgatagcatttttcaagatgtaattgagacaagagggagagaatatgctggtttatatgatgacatctccactcaaggctggtttattggactgatgtgtgcgattgctcttctcacactactattattaactgtttgctttgtgaagaggaatagaggtggaaagtactcagttaaagaaaaggaagatttgcatccagacccagaaattcagtcagtaaaagatgaaacctttggtgaatacagtgacagtgatgaaaagcctctcaaaggaagccttcggtcccttaatagggatatgcagcctactgaaagtgctgacagcttagtcgaatacggagagggagaccatggtctcttcagtgaagatggatcatttattggtgcctacgctggatctaaggagaagggatctgttgaaagcaatggaagttctacagcaacttttccccttcgggcataaacacaacatatgtaagcaacgctactggttcaccccaaccttccatatttatctgttcaaaggagcaagaactttcatataggaatagaaacatgctggccgaagatttcatccagaagtcaacatcctgcaattatgttgaaaagagtagtactttcttcaaaatataaaatgccaagcacttcaggcctatgttttgcttatattgttttcaggtgctcaaaatgcaaaacacaaaacaaatcctgcatttagatacacctcaactaaatccaaagtccccattcagtatattccatatttgcctgattttactattcggtgtgtttgcatagatgttgctacttggtgggtttttctccgtatgcacattggtatacagtctctgagaactggcttggtgactttgcttcactacaggttaaaagaccataagcaaactggttatttaaaatgtaaaaaggaatatgaaagtcttattaaaacacttcattgaaaatatacagtctaaatttattatttaaattttactagcaaaagtcttaggtgaacaatcaactagtatttgttgagctcctatttgcccagagatggtcatatttaaacagaagtatacgtttttcagtttcaacatgaatttttttatttctgtcagttatgacatccacaagcatcactttttgtgtctgttttttttttttttcttggactaaattcaactgcatggaagcggtggtcagaaggttgttttatacgagaacaggcagaaagtgcccattgttcaggattctaatagctacatctacttaatatcttcatttctaaattgactgcttttacctttttctcatgtttatataatggtatgcttgcatatatttcatgaatacattgtacatattatgttaatatttacacaatttaaaatatagatgtgttttattttgaagtgagaaaatgaacattaacaggcatgtttgtacagctagaatatattagtaagatactgtttttcgtcattccagagctacaactaataacacgaggttccaaagctgaagactttgtataaagtatttgggttttgttcttgtattgctttctttcaacagtttcaaaataaaatatcatataaatattgagggaaatgttttcatatttttcaaaataggtttttattgttgaatgtacatctaccccagcccctcaaaagaaaaactgtttacatagaaattcctacacatacgtttgcgtatatgttattttaaacatctttgtggtgagaattttttccccgatattctccttctgtcaaagtcagaacaaattcagggaatttattttctggcagttgtgctccagtccttttaaaattgtacatgaacatgttttagaaacaatatggaggatgatgcatacatgtcggtcaagttcagcgctcgacattttatggaaagatttttttaaccttaccacgaaatacttaactactgtttaagtgaattgacttatttcactttagtttttgaactgtgattattggtatactgttatatcctcaacttggatttatggtaaccccttatagttcatggagaccaaaatttggggtatttataatagtcagcgcaggaatgcacatggaatatctacttgtccttttgaacctcacgagtcatccagaatgtatagacaggaaaagcatgtcttatttaaaactgtaatttatgggctcaggatctgaccgcagtcccgggagtaagcatttcaaagggggaaggcagtgtggtccctaccctgtgtgaatgtgaggatgtagacatccatcagtgcaactcgagctccatcctcctccgatttctaaggttccagttttctggagggacagtcatcatgttttgatttatctgggagaaaactgtggtgcacagcttgtgaggagggcaaggttgtgacgttcgagcttagttctggtgttattctgtctcctcttctttgtcatcagccaaaacgtggtttttaaagagagtcatgcaggttagaaataatgtcaaaaatatttaggaatttaataacctttaagtcagaaactaaaacaaatactgaaatattagctcttcctacacttcgtgttcccctttagctgcctgaaaatcaagattgctcctgctcagatcttctgagtggctaaaacttatggatatgaaaaatgagattgaatgatgactatgctttgctatcattgttacctttcctcaatactatttggcaactactgggactcttcagcacaaaaggaatagatctatgattgaccctgattttaattgtgaaattatatgattcatatattttatgaatcagaataaccttcaaataaaataaatctaagtcggttaaaatggatttcatgattttccctcagaaaatgagtaacagagtccacggcgtgcaatggtaattataaattggtgatgcttgtttgcaaattgcccactcgtgataagtcaacagccaatatttaaaactttgttcgttactggctttaccctaactttctctagtctactgtcaatatcattttaatgtaattgattgtatatagtctcaagaatggttggtgggcatgagttcctagagaactgtccaagggttgggaaaatccaaattctcttcctggttccagcactgattttgtacataaacattaggcaggttgcttaacctttttatttcaaactctctcaactctaaagtgctaataataatctcagttaccttatctttgtcacagggtgttcttttttatgaagaaaaatttgaaaatgataaaagctaagatgccttctaacttcataagcaaacctttaactaattatgtatctgaaagtcacccccacataccaactcaacttttttcctgtgaacacataaatatatttttatagaaaaacaaatctacataaaataaatctactgtttagtgagcagtatgatttgtacatgccattgaaaattattaatcagaagaaaattaagcagggtctttgctatacaaaagtgttttccactaattttgcatgcgtatttataagaaaaatgtgaatttggtggttttattctatcggtataaaggcattgatattttagatgcacccgtgtttgtaaaaatgtagagcacaatggaattatgctggaagtctcaaataatatttttttcctattttatactcatggaagagataagctaaagaggggacaataatgagaaatgttggtgtgcttttctaagcatttaaaacataattgccaattgaaaccctaaatatgtttacataccattaagatatgattcatgtaacaatgttaaattaattataatgggattgggtttgttatctgtggtagtatatatcctagtgttcctatagtgaaataagtagggttcagccaaagctttctttgttttgtaccttaaattgttcgattacgtcatcaaaagagatgaaaggtatgtagaacaggttcacgtgattacctttttcttttggcttggattaatattcatagtagaactttataaaacgtgtttgtattgtaggtggtgtttgtattatgcttatgactatgtatggtttgaaaatattttcattatacatgaaattcaactttccaaataaaagttctacttcatgt

SEQ ID NO: 5445 - DNA, 4510 bp, Homo sapiens; identical to SEQ ID NO: 1452

SEQ ID NO: 5446 - DNA, 7030 bp, Homo sapiens
cctcagacgctgcgtggagcggcggagccggagggaagcaaaggaccgtctgcgctgctgtccccgccccgcgcgctctgcgcccctcgtccctggcggtcgctccgaagctcagccctcttgcctgccccggagctgtcccgggctagccgagaagagagcggccggcaagtttgggcgcgcgcaggcggcgggccgcgggcactgggcgcctcgctggggcggggggaggtggctaccgctcccggcttggcgtcccgcgcgcacttcggcgatggcttttccgccgcggcgacggctgcgcctcggtccccgcggcctcccgcttcttctctcgggactcctgctacctctgtgccgcgccttcaacctagacgtggacagtcctgccgagtactctggccccgagggaagttacttcggcttcgccgtggatttcttcgtgcccagcgcgtcttcccggatgtttcttctcgtgggagctcccaaagcaaacaccacccagcctgggattgtggaaggagggcaggtcctcaaatgtgactggtcttctacccgccggtgccagccaattgaatttgatgcaacaggcaatagagattatgccaaggatgatccattggaatttaagtcccatcagtggtttggagcatctgtgaggtcgaaacaggataaaattttggcctgtgccccattgtaccattggagaactgagatgaaacaggagcgagagcctgttggaacatgctttcttcaagatggaacaaagactgttgagtatgctccatgtagatcacaagatattgatgctgatggacagggattttgtcaaggaggattcagcattgattttactaaagctgacagagtacttcttggtggtcctggtagcttttattggcaaggtcagcttatttcggatcaagtggcagaaatcgtatctaaatacgaccccaatgtttacagcatcaagtataataaccaattagcaactcggactgcacaagctatttttgatgacagctatttgggttattctgtggctgtcggagatttcaatggtgatggcatagatgactttgtttcaggagttccaagagcagcaaggactttgggaatggtttatatttatgatgggaagaacatgtcctccttatacaattttactggcgagcagatggctgcatatttcggattttctgtagctgccactgacattaatggagatgattatgcagatgtgtttattggagcacctctcttcatggatcgtggctctgatggcaaactccaagaggtggggcaggtctcagtgtctctacagagagcttcaggagacttccagacgacaaagctgaatggatttgaggtctttgcacggtttggcagtgccatagctcctttgggagatctggaccaggatggtttcaatgatattgcaattgctgctccatatgggggtgaagataaaaaaggaattgtttatatcttcaatggaagatcaacaggcttgaacgcagtcccatctcaaatccttgaagggcagtgggctgctcgaagcatgccaccaagctttggctattcaatgaaaggagccacagatatagacaaaaatggatatccagacttaattgtaggagcttttggtgtagatcgagctatcttatacagggccagaccagttatcactgtaaatgctggtcttgaagtgtaccctagcattttaaatcaagacaataaaacctgctcactgcctggaacagctctcaaagtttcctgttttaatgttaggttctgcttaaaggcagatggcaaaggagtacttcccaggaaacttaatttccaggtggaacttcttttggataaactcaagcaaaagggagcaattcgacgagcactgtttctctacagcaggtccccaagtcactccaagaacatgactatttcaagggggggactgatgcagtgtgaggaattgatagcgtatctgcgggatgaatctgaatttagagacaaactcactccaattactatttttatggaatatcggttggattatagaacagctgctgatacaacaggcttgcaacccattcttaaccagttcacgcctgctaacattagtcgacaggctcacattctacttgactgtggtgaagacaatgtctgtaaacccaagctggaagtttctgtagatagtgatcaaaagaagatctatattggggatgacaaccctctgacattgattgttaaggctcagaatcaaggagaaggtgcctacgaagctgagctcatcgtttccattccactgcaggctgatttcatcggggttgtccgaaacaatgaagccttagcaagactttcctgtgcatttaagacagaaaaccaaactcgccaggtggtatgtgaccttggaaacccaatgaaggctggaactcaactcttagctggtcttcgtttcagtgtgcaccagcagtcagagatggatacttctgtgaaatttgacttacaaatccaaagctcaaatctatttgacaaagtaagcccagttgtatctcacaaagttgatcttgctgttttagctgcagttgagataagaggagtctcgagtcctgatcatgtctttcttccgattccaaactgggagcacaaggagaaccctgagactgaagaagatgttgggccagttgttcagcacatctatgagctgagaaacaatggtccaagttcattcagcaaggcaatgctccatcttcagtggccttacaaatataataataacactctgttgtatatccttcattatgatattgatggaccaatgaactgcacttcagatatggagatcaaccctttgagaattaagatctcatctttgcaaacaactgaaaagaatgacacggttgccgggcaaggtgagcgggaccatctcatcactaagcgggatcttgccctcagtgaaggagatattcacactttgggttgtggagttgctcagtgcttgaagattgtctgccaagttgggagattagacagaggaaagagtgcaatcttgtacgtaaagtcattactgtggactgagacttttatgaataaagaaaatcagaatcattcctattctctgaagtcgtctgcttcatttaatgtcatagagtttccttataagaatcttccaattgaggatatcaccaactccacattggttaccactaatgtcacctggggcattcagccagcgcccatgcctgtgcctgtgtgggtgatcattttagcagttctagcaggattgttgctactggctgttttggtatttgtaatgtacaggatgggcttttttaaacgggtccggccacctcaagaagaacaagaaagggagcagcttcaacctcatgaaaatggtgaaggaaactcagaaacttaactgcagtttttaagttatgctacatcttgacccactagaattagcaactttattatagatttaaactttcttcatgaggagtaaaaatccaaggctttactgctgatagtgctaattggcattaaccacaaaatgagaattatatttgtcaaccttctccttataaataagttcagacatacatttaataacatagggtgacttgtgtttttaggtatttaaataataaaatttcaagggatagtttttattcaatgtatataagacaggtagtgcctgatttactactttatataaaatagtacctccttcagttactgtttctgatttaatgtacggaactttatttgttgttgttgttgttgttgttgttgttgttttaaagcagtccaaatttggaccttagcaatcatgtcttttgtataggtacttaatgttaatacatattacactacagtttacttttcagaatactaaagactttataactgcatgaacttggatttttttaatcactcatatggtagaattttataaacacatacatgataccatccaaattcttgcttttaataacaaaggtacaatattttgttttagtatgaaaatctggtagatcctattacacttctgtttatattaaatccacaatattttattacatttttaacttgtataaattttaggtcaaatccttcaagccaacctatactaaaaattagttccataatcacaaatggctcttttgtgtaattgtttaatttcacctgaatatcataatgcttaaagccatatggagttggaaattatttccaaagcatatttattccattgttttagtctggctatttacagtataaaaaaagcatttttattaaaatactgtgtagttctttgagatagttgcttatgcatatagtaagtattacattcttagagtagagcagagtttttagttagtattaatttattttcctccattcatgtacttttccttatatttccaaaactgttactgagaatgggtcaagatcagtgagaaatctttacagttgacaggaacctggaccccttaccccaactttatgagtaatgcttggaataaaaactcttaaggcaactcactgatttacttctagcaatagcatgatgttacaggaatattacctctgtttaagcaaggtaatgtgtaaaatcagtctcggctgtcagaataacttctaaaaggtatttttataagcagttcaagttactgaaaaccttttaaacctttctgaagttcgttagtataaattacttttctaggattattaataaaagccacataggtggcaagttgtagttttatatggctctgtagagtggtgaaccttctagaggaatatatgatttattcacagttcctcaaggcctggggatgatgatcagttatacctatttttgtgcaattacatcatgttgtacattagaaatggagagtttaatagctctttaactgctgtcctcattaggtaatgataaatatttcccttaaataattgactattttgctgtgttttaaaaatgattgaaatttatcttgccatatctcataatttcatgcacaagttgactgagctaatcttgagaatatattcgtaaaataggagcacatttagttgaggtatacaaggtaggactctagacaaaaccttctattttagctttagtgaatttcaaaagtaatgggtcttggagtatagatttttattagtagcttgaaagagcttaatcatatgcagtaagtatttttattaccaataaatttaaaattttttaagaaaaatatttttatcctagggccaagtgttgcctgccaccaatcagtaagttagtctataacaaattttaccctaacagttttaccacctagtaacagtcatttctgaaaatatgttggatagaaagtcactctttggcaaaagtgttagaatttgcttttgtgccatctattccttttatggcatctatcttgaaagtaatcttgtattggagattgaaagatgctgtaatttagaaattaacatgatatcttaaattacctttatgaaatatagttttgtataatagcatagattttccttcaaaaaatgaacatttatatatctacaaaaatatggagaagagtaatttgaaagcctactttctgaagaaaatggtgggatttttttttatcatgattaaatatcaaaaaattgccctatgaaaactttaaatctctaaaacatttgaaatactaccatatttgtgatttattgagaataaaaatccattttgaaatgtaaaatttttatgatctgattcagttttaagaaaacatgaatgaactagaagatattaaaaacatttgacattggtaagaaatattgatactgatattgatttttatataggtatttatttcagaattgatattttgagaaaaatacatgtgagtcattttttctgtttctcttttctcttaacgattatcactgtaattctgaatctgaaaggtaaaacaattagtcaaaatattattgccatcattctacctgtgttatgaaactacttattcatagttaattctcattaacacttacatttccataaagaaaactcaagtattaataaaagagactttactggcttaagagggctgtgaaagatttttgatagtgaatcatgaccctaagggagagatttgtgtgataaaagtattgtatataatagatcagcgatttttgtaaggcaaacagaatttgtaagttggcagatcttcctaagttgcaaaatgtaatgatgagcttggtggagaagaatgagtcgttcttggaatacctatgtgcagccactacccatctcaatgtcaccttgtttgcattcttggatagcttgtatatgtagtagtttgatgaataatttaaagaaaaacacctaaaatttgaaaaatgattgtaggatcaaaaaaggcagatgaaattacttaatactcagtgttttggagagtattccttttagtttgttggttggctggtttgaacgatagaaatatgcagcatgcaatatatgcttatatttcattttaatttctgatatataatgaacttcttgggagaggtactgaatctttgatgttttttgtcattgttctcaagtgcaatataacaatgtaaccaaatctagataatttcaaagttgtcattaatttagtaagcctaatataaacaaatatttgtattatttttgttagcaggaaagagtgattaagtgaggttatttacccctaaatggtccattctgcattgtatttcaggctggaaatgaattattctttaccagttttgaaacactttgaaatatcctaaggtaacttggaagctgtgtagtatatcaaattaatttgctacctaataacatagaaagtaaatatctttgtggtcacccacattgggtgagacagaaaatgaatctgttctaaaatttgtaatttgctaacttgatttgagttagtgaaaactggtacagtgttctgcttgatttacaacatgtaacttgtgactgtacaataaacataagcatatggtacca

SEQ ID NO: 5447 - DNA, 765 bp, Homo sapiens
gttcagggaccacgcttggagaaccactacactagggcaagcaggaagagagtcctccttctggaactgaagcaggcagtgtgaagacccatgtggaacaccttaacccgaagcctctctgaccatccagttggcaaagaccctcaggccatgaggactggccaaagacagaacaaagggatgaggactcgactgggatgcctgtctcacaagtcagactcgtgtagtgatttcacagctattcttccagacaaacccaaccgcgctctcaagagattatcgacagaagaagctacgaggtgggcagattcctttgatgtgcttctctctcataagtatggggtggctgcattccgtgccttcttgaagacggagttcagtgaggagaacctggaattctggttggcctgtgaggagttcaagaagaccaggtcaactgcaaaactggtctctaaggcccataggatctttgaggagtttgtggatgtgcaggctccacgggaggtaaacattgacttccagacccgagaagccacgaggaagaacctgcaggagccatccctgacttgctttgaccaagcccaaggaaaagtacacagcctcatggagaaagactcttaccccaggttcctgaggtccaaaatgtacttagatctgctgtcccaaagccagaggaggctcagttagacctcagaagggaactcctggaaatcaccggctttcccctccacttgctgccaagatcatattctaatgtgaaatgtc

SEQ ID NO: 5448 - DNA, 5703 bp, Homo sapiens
gcacatccctgcactagtggccgcaaccgaggcgccgcgctccagcagctgctgccgcccagcccggccccgccgccgccccccagccctgcagccccgcagccccggccgcgcccagcccggcgaggacagcaccaggaggcggcccccagcgcggccacaaagacccccggcggcgtctctccgcggaccggtcctacttgaagtccatcatgtccttcggcagagacatggagctggagcacttcgacgagcgggataaggcgcagagatacagccgagggtcgcgggtgaacggcctgccgagcccgacgcacagcgcccactgcagcttctaccgcacccgcacgctgcagacgctcagctccgagaagaaggccaagaaagttcgtttctatcgaaacggagatcgatacttcaaagggattgtgtatgccatctccccagaccggttccgatcttttgaggccctgctggctgatttgacccgaactctgtcggataacgtgaatttgccccagggagtgagaacaatctacaccattgatgggctcaagaagatttccagcctggaccaactggtggaaggagagagttatgtatgtggctccatagagcccttcaagaaactggagtacaccaagaatgtgaaccccaactggtcggtgaacgtcaagaccacctcggcttctcgggcagtgtcttcactggccactgccaaaggaagcccttcagaggtgcgagagaataaggatttcattcggcccaagctggtcaccatcatcagaagtggcgtgaagccacggaaagctgtcaggattctgctgaacaagaaaacggctcattcctttgagcaggtcctcaccgatatcaccgatgccatcaagctggactcgggagtggtgaaacgcctgtacacgttggatgggaaacaggtgatgtgccttcaggacttttttggtgatgatgacatttttattgcatgtggaccggagaagttccgttaccaggatgatttcttgctagatgaaagtgaatgtcgagtggtaaagtccacttcttacaccaaaatagcttcatcatcccgcaggagcaccaccaagagcccaggaccgtccaggcgtagcaagtcccctgcctccaccagctcagttaatggaacccctggtagtcagctctctactccgcgctcaggcaagtcgccaagcccatcacccaccagcccaggaagcctgcggaagcagaggagctctcagcatggcggctcctctacgtcacttgcgtccaccaaagtctgcagctcgatggatgagaacgatggccctggagaagaagtgtcggaggaaggcttccagattccagctacaataacagaacgatataaagtcggaagaacaataggagatggaaattttgctgttgtcaaggaatgtgtagaaagatcgactgctagagagtatgctctgaaaattatcaagaaaagcaaatgtcgaggcaaagagcacatgatccagaatgaagtgtctattttaagaagagtgaagcatcccaatatcgttcttctgattgaggagatggatgtgccaactgaactgtatcttgtcatggaattagtaaaggggggagacctttttgatgccattacttccactaacaaatacaccgagagagacgccagtgggatgctgtacaacctagccagcgccatcaaatacctgcatagcctgaacatcgtccaccgtgatatcaagccagagaacctgctggtgtatgagcaccaagatggcagcaaatcactgaagctgggtgactttggactggccaccattgtagacggccccctgtacacagtctgtggcaccccaacatacgtggctccagaaatcattgcagagactggatacggcctcaaggtggacatctgggcagcaggtgtaatcacttatatcctgctgtgtggtttccctccattccgtggaagtggtgatgaccaggaggtgctttttgatcagattttgatggggcaggtggactttccttctccatactgggataatgtttccgattctgcaaaggagctcattaccatgatgctgttggtcgatgtagatcagcgattttctgctgttcaagtacttgagcatccctgggttaatgatgatggcctcccagaaaatgaacatcagctgtcagtagctggaaagataaagaagcatttcaacacaggccccaagccgaatagcacagcagctggagtttctgtcatagcactggaccacgggtttaccatcaagagatcagggtctttggactactaccagcaaccaggaatgtattggataagaccaccgctcttgataaggagaggcaggttttccgacgaagacgcaaccaggatgtgaggagccggtacaaggcgcagccagctcctcccgaactcaactcggaatcggaagactactccccaagctcctccgagactgttcgctcccctaactcgcccttttaataagacccttttactcaaagtcctagcttaaccctttgagactctgagatttttttcccccaaatttgtgtaaaacagtttcatctgatctatctagcgctcaatgcttgaatggcagaactgaaagtgttttcaggtatctttgtagcggtttccctttactgaataagatgacacgtggtgattgtgaagatggtaatttgctgctaatagagtcctcaaagggttaaggccaatttgcaatttttttttaaacttagaagcaatgaatgttttcatcagtcaagctaggatctgcagtatgtaatatagcacttgttaaccctctgagtgcatagaattttattgagaattcttgtttgggaatttttcaggcctttggatgtatacacacatgtttcttgattttactgcagatcaaggggtgttgttagatgctgaaatgtccagaaaagaaggacatttagaatgatatcttgtttgtccttttctgtgggtttagaacgtggcaggtttataacttcgacacacgcacggttctttcttcttcacaatcctattcagaaacagattttttttttcattagagatatgactgtcagttgcagtgagttctgcatcccaagtggagggaattgggtttgtggcaaagagcttgacccaggaaatagatggtgccccccaaattgtctccacatgaagatgtactgatgacgccccagaaatgctgcttccatatcagctgctgctagcgccagcgcagactctcagggagtcaccacagcttgtcttgtgcttggtgagtgagggtctctctactcagtgtcagacatctacaggaaagaaacaactggtggaaaagagcaataaattgcccggtgctctgcagggctggaatttcaaacagaaagagggaataagatcctgtgatttttctcacctgcttttccacgcactgtggtcatcactgtgcaatctacatctagtatgaaatccacacataggagagctggggcacaaggggactggaggcagttgctttgcaagatggctgaggagaaagcacactgggaacacaatccagaatgttctaacaataagttttcagtgaataaaccactggcaagacaattccatgtgcacctttaggttacctatatagtctcctaggaagatcaggatgaaagacctagatgatacccctgaggataaaacctccatcccctaaaatgattttttttaaataccactgtctttagctgtccaggaggtcagagtgttttttctgtctttgggccaagtcctgtctgagacctgtattttcactcttgttaccaaatctatctccctagtgcagtgtctccaggcctgagtttcttctggaacagattccattttagaatggggattcacaggttctgtgcatcaccacagtgctcagagaggattctcctggggtgtcttagaggcaggtgcccaactcaaatgtattcccaaggtttgctgggctctgggatccacgagacaaccagagagggatatctcatgaaatttgcatctggtggctgaacagtacctatgttctctgttttgaatatactttaatacctgagagtcttaaaatttgtgaacaacgtttctatagtcctttattttcaaatgcacattgatcttcacttgctgcatttttactcttcaaccctgaaactatggtctacattaatatggatttttaaatcacatgtcattacttttgcaacaccatcaccaaaattttttgctcttttacatttaggttcatctctgtggtctgtgttgtcctgacatgtaaaaagcatatcgtttattgaggtttttttcccccccttttagagcatccggaagtgataacacgcaaaatcacaaagtagcataaatcagtaaattagttgagttgtttttgggggggaggtgggggtagggggcacagaacaccagaaagagtgttggtgtgtaggtagattccatattaatgaggaacactgaactagttggaaattactgctttctctagaaatataaagcaaagcactattccaaggctatggagtagctctacagcctggcctcaactctaaaagtgtgaagaatgcaatgggcagagacctacctgcagtggactgtcattttcctttctttctctgaattactgctttttctgtgggcattaactatattgctacagcatctagtgtactgagcctgcggtgcatggctcaggccttttcccatcgacgtctagggggactctggaccgtgtgaagctagggggtgtttctcagcacactgcagaagggcagctcagaagaatgcagggcccattcagcatggggatcccagcacatcactgtagaatttgagtgatctatgctgaataaacagtggaatgtgaccagtcaagtagaaatcttgagtaatcagatggaatgcaatctttctaacattaagctaccaagatcctgaatgtcagagatgtactcagagggttaacagacaagcacaaggcatgctgactacattggtgtatccagattgctttgcttttagccagtgctttctaatttttttctcgacattcttgggatagttcaagtttgaaataattaagtggtggtgttctttaaggaatttctataaccaaattgatcttatttttgatttcacttatcatagaacaaatatgtatcattatggcagtgtatctatgtaattatcaatttaatcatcaccaccggtgtttccatattttttcccaagtatttaatatagctctcttatggtggtggcctggtgatggggaccgtctttcttttactgacacatgaccaatcatatggtattttcaagggaattttaagattcatcttttcagtttgatagtagactagttaaggaagaactctttcattacttgcatcgtgtaaatcatctctgtagacatgtgttcatattaatgaacacattttttctcaacattgtagcagaaatcattttattcgtcatgatcaatgaatatgtgatttgctccagatcgttagaaggaaaagtaagatttcagtcatcaaaaatgtttttaccgtagccctcatctaacttacacgtggtgcatattaaaataagcagagaaaaaaaaatgtgaataaactactgaaaac

SEQ ID NO: 5449 - DNA, 3330 bp, Homo sapiens
ggagcggagcctccgcctggggggccccccatccctggctgtcccccagctgcgcgtccccgccccacccccgcggctgagccaccaccggtgcagtggtctccgcttggcggagcgagccttgagcttcgttccacagcttctttgcatcttggatttcggggcggccccctcccccacctctctctgcctttttgtaccccgctttttttctgcgttctgctcggtttttgtagccgtctgtttttgcaccccatttcgttttgtttctagacggtttggtggggggtgaagctgcattcataccccttcctcttgttattctcccctgctctgacagcaccccttttcatcgcagttggggggcctaggatcggtgcatcttccgccgcgctgccagcaccccgcagcgcgtggtcgtgcaccccggaatctgcagcagctgcatatctgaggggggtctcctttgcccgcgccgccttcgctccccgtgcttttgggtgtgtggagggcttcagcgcgcggcgcccccgcttctccgcaaccccccgccccgcgcccggactcgccccgcgccaccaagatggtcatccagaaagagaagaagagctgcgggcaggtggttgaggagtggaaggagttcgtgtggaacccgaggacgcaccagtttatgggccgcaccgggaccagctgggcctttatcctcctcttctacctcgttttttatgggttcctcaccgccatgttcaccctcaccatgtgggtgatgctgcagactgtctccgaccatacccccaagtaccaggaccgactggccacaccgggcttgatgattcgccccaagactgagaaccttgatgtcattgtcaatgtcagtgacactgaaagctgggaccagcatgttcagaagctcaacaagttcttggagccttacaacgactctatccaagcccaaaagaatgatgtctgccgccctggacgctattacgaacagccagataatggagtcctcaactaccccaaacgtgcctgccaattcaaccggacccagctgggcaactgctccggcattggggactccacccactatggttacagcactgggcagccctgtgtcttcatcaagatgaaccgggtcatcaacttctatgcaggagcaaaccagagcatgaatgttacctgtgctgggaagcgagatgaagatgctgagaatctcggcaacttcgtcatgttccccgccaacggcaacatcgacctcatgtacttcccctactatggcaaaaagttccacgtgaactacacacagcccctggtggctgtgaagttcctgaatgtgacccccaacgtggaggtgaatgtagaatgtcgcatcaacgccgccaacatcgccacagacgatgagcgagacaagttcgccggccgcgtggccttcaaactccgcatcaacaaaacctgaggccccttcctcccaccccatctctctcctgtggatgctcctggaatgtccctgaccctgcctgatccctccctcacccaccccaaaggtatttttgataacagagctatgacttgtctgagcctcacatccttttccttgacttctcaacccagcctgaagtccattgcggttccgtcactcgcctttcccaccaacttctcccaacctcagatcagtcagacagggagctgggctaagatggccacggaggagttaggagcctttctagttctggtttagctgtgagagctatccactctcctgcctgcatatcccctgagagttataggaagtgcccactgacccacccacccacctacaccccccgccacacacacacacaaacgtgcacacgcgtctcatttgacccctttgcttccagagatgaatgtggcactccctccttccattcctaagctctggccaccgtcccttgatctctcatactttctccctgtctacacagtcgccatcttggtgactttgaatttatctggctcctgggcaggtcttctcctcctctccatccctattccctcctctgaaatgcacccctttgtaattgaggacaaggtggttctgtggccttttccctctttgctggcacgttctgcttctcaccctctggtgactctgtgagctgggaaatgagggactggaagtgaggcctgtgttgacccttcctgaaaatcctctagcagcccccgacttcagcagtttctttctttgtttttttgagatggagtttcgctcttgttgcccaggctggagtgcaatggtgcaatctcagctcactgcaacttccgcatcccaggttcaagcgattctcccgcctcaggttcccgagtagctgggactacaggcatgtgccaccatgcccggctaatttctttctttctttttttttttttttgcattttttagtagagatgggggtttctccttgttggtcaggctggtctcgaactcccgacctcaggtgatccacctgcctcggcctcccaaagtgttgggattacaggcgtgagccaccgcgcccggccttcagtttcttcctaggccgttctgtcacccaaatagctgctacccagaggggcggggttgacctaggctgaatatccactttgtttttatggatggctcccttcccccattcgccttcccagaatatccttcaagttccacttcccagggagctctgggggaggggcggccattctggctccgtccccagtggccaccttggaaacatcggctggctttgggactattccacctccttcccctgagcccagatctgcccccaccatcctttctctggcttcttttagcaagttatcaactaatcactaactccttccttttcctctgcatgccagcctgaaaattccaaatctagcctctgaatgtcttggctccatctcttcagacccctttgcctttaaaaaaaaaacaaaaacaaaaacaaaaaaacccataatgcccacagaatgtcaaatgaggggcctcctgcctcctgctctgaatattctgtagctgtagaggcattttaaccctttgtcctccagcatcccttcacttcctcatcctctctaacctcctttttctttttttaatgctgcagcctccacactccacccacaggtggacccttccctttttctctagctggatctgtgtttcttcccttcgggcccccatgttttcctgcacccgccctaccatggtctctctctgcagttatttaatgcctgtgtcagatctactgtaaaaagaggattaagtaaaataaaatgagagcaattatatatataaatatatatcatacacag

SEQ ID NO: 5450 - DNA, 1546 bp, Homo sapiens
ggtaggcgcgcccagacctgagacgggttgggactgggctgcgtcacgcgcgggctctaagcgcccggggccccgcccagtggccggcacagccaatcgcagcgcgggaaggcggtgggggcggggaaggccgcctggaaacttaaatcccgaggcgggcgaacctgcaccagaccgcggacgtctgtaatctcagaggcttgtttgctgagggtgcctgcgcagctgcgacggctgctggttttgaaacatgaatctttcgctcgtcctggctgccttttgcttgggaatagcctccgctgttccaaaatttgaccaaaatttggatacaaagtggtaccagtggaaggcaacacacagaagattatatggcgcgaatgaagaaggatggaggagagcagtgtgggaaaagaatatgaaaatgattgaactgcacaatggggaatacagccaagggaaacatggcttcacaatggccatgaatgcttttggtgacatgaccaatgaagaattcaggcagatgatgggttgctttcgaaaccagaaattcaggaaggggaaagtgttccgtgagcctctgtttcttgatcttcccaaatctgtggattggagaaagaaaggctacgtgacgccagtgaagaatcagaaacagtgtggttcttgttgggcttttagtgcgactggtgctcttgaaggacagatgttccggaaaactgggaaacttgtctcactgagcgagcagaatctggtggactgttcgcgtcctcaaggcaatcagggctgcaatggtggcttcatggctagggccttccagtatgtcaaggagaacggaggcctggactctgaggaatcctatccatatgtagcagtggatgaaatctgtaagtacagacctgagaattctgttgctaatgacactggcttcacagtggtcgcacctggaaaggagaaggccctgatgaaagcagtcgcaactgtggggcccatctccgttgctatggatgcaggccattcgtccttccagttctacaaatcaggcatttattttgaaccagactgcagcagcaaaaacctggatcatggtgttctggtggttggctacggctttgaaggagcaaattcgaataacagcaagtattggctcgtcaaaaacagctggggtccagaatggggctcgaatggctatgtaaaaatagccaaagacaagaacaaccactgtggaatcgccacagcagccagctaccccaatgtgtgagctgatggatggtgaggaggaaggacttaaggacagcatgtctggggaaattttatcttgaaactgaccaaacgcttattgtgtaagataaaccagttgaatcattgaggatccaagttgagattttaattctgtgacatttttacaagggtaaaatgttaccactactttaattattgttatacacagctttatgatatcaaagactcattgcttaattctaagacttttgaattttcattttttaaaaagatgtacaaaacagtttgaaataaattttaattcgtatat

SEQ ID NO: 5451 - DNA, 2002 bp, Homo sapiens; identical to SEQ ID NO: 934

SEQ ID NO: 5452 - DNA, 2632 bp, Homo sapiens; identical to SEQ ID NO: 663

SEQ ID NO: 5453 - DNA, 1530 bp, Homo sapiens
ttccagacctaccagcagctcaatggccttcccaaagaagaaacttcagggtcttgtggctgcaaccatcacgccaatgactgagaatggagaaatcaacttttcagtaattggtcagtatgtggattatcttgtgaaagaacagggagtgaagaacatttttgtgaatggcacaacaggagaaggcctgtccctgagcgtctcagagcgtcgccaggttgcagaggagtgggtgacaaaagggaaggacaagctggatcaggtgataattcacgtaggagcactgagcttgaaggagtcacaggaactggcccaacatgcagcagaaataggagctgatggcatcgctgtcattgcaccgttcttcctcaagccatggaccaaagatatcctgattaatttcctaaaggaagtggctgctgccgcccctgccctgccattttattactatcacattcctgccttgacaggggtaaagattcgtgctgaggagttgttggatgggattctggataagatccccaccttccaagggctgaaattcagtgatacagatctcttagacttcgggcaatgtgttgatcagaatcgccagcaacagtttgctttcctttttggggtggatgagcaactgttgagtgctctggtgatgggagcaactggagcagtgggcagtacctataactacctgggaaaaaagacaaaccagatgttggaggcttttgaacaaaaggacttctctttagccctgaactatcagttttgtatccagagatttatcaactttgttgtcaaactaggttttggagtgtcacagaccaaagccatcatgactctggtctctgggattccaatgggcccaccccggcttccactgcagaaagcctccagggagtttactgatagtgctgaagctaaactgaagagcctggatttcctttctttcactgatttaaaggatggaaacttggaagctggtagctagtgcctctctatcaaatcagggtttgcaccttgagacataatctaccttaaatagtgcatttttttctcagggaattttagatgaacttgaataaactctcctagcaaatgaaatctcacaataagcattgaggtaccttttgtgagccttaaaaagtcttattttgtgaaggggcaaaaactctaggagtcacaactctcagtcattcatttcacagatttttttgtggagaaatttctgtttatatggatgaaatggaatcaagaggaaaattgtaattgattaattccatctgtctttaggagctctcattatctcggtctctggttcctaatcctattttaaagttgtctaattttaaaccactataatatgtcttcattttaataaatattcatttggaatctaggaaaactctgagctactgcatttaggcaggcactttaataccaaactgtaacatgtctcaactgtatacaactcaaaatacaccagctcatttggctgctcagtctaactctagaatggatgcttttgaattcatt

SEQ ID NO: 5454 - DNA, 2906 bp, Homo sapiens
aaaaaatgcataaagagccaagtgcttatattctggccaagttatgaggctctgagaacaagagcttgaggggaagactgttaaccccatccacgccaccagaattagctctttcccttttggtttgcaagcactgcctgtaaagccctcgcatgagaggccagcctgctagggaaatccaggaatctgcaacaaaaacgatgacagtctgaaatactctctggtgccaacctccaaattctcgtctgtcacttcagacccccactagttgacagagcagcagaatttcaactccagtagacttgaatatgcctctgggcaaagaagcagagctaacgaggaaagggatttaaagagtttttcttgggtgtttgtcaaacttttattccctgtctgtgtgcagaggggattcaacttcaatttttctgcagtggctctgggtccagccccttacttaaagatctggaaagcatgaagactgggctttttttcctatgtctcttgggaactgcagctgcaatcccgacaaatgcaagattattatctgatcattccaaaccaactgctgaaacggtagcacctgacaacactgcaatccccagtttaagggctgaagctgaagaaaatgaaaaagaaacagcagtatccacagaagacgattcccaccataaggctgaaaaatcatcagtactaaagtcaaaagaggaaagccatgaacagtcagcagaacagggcaagagttctagccaagagctgggattgaaggatcaagaggacagtgatggtcacttaagtgtgaatttggagtatgcaccaactgaaggtacattggacataaaagaagatatgagtgagcctcaggagaaaaaactctcagagaacactgattttttggctcctggtgttagttccttcacagattctaaccaacaagaaagtatcacaaagagagaggaaaaccaagaacaacctagaaattattcacatcatcagttgaacaggagcagtaaacatagccaaggcctaagggatcaaggaaaccaagagcaggatccaaatatttccaatggagaagaggaagaagaaaaagagccaggtgaagttggtacccacaatgataaccaagaaagaaagacagaattgcccagggagcatgctaacagcaagcaggaggaagacaatacccaatctgatgatattttggaagagtctgatcaaccaactcaagtaagcaagatgcaggaggatgaatttgatcagggtaaccaagaacaagaagataactccaatgcagaaatggaagaggaaaatgcatcgaacgtcaataagcacattcaagaaactgaatggcagagtcaagagggtaaaactggcctagaagctatcagcaaccacaaagagacagaagaaaagactgtttctgaggctctgctcatggaacctactgatgatggtaataccacgcccagaaatcatggagttgatgatgatggcgatgatgatggcgatgatggcggcactgatggccccaggcacagtgcaagtgatgactacttcatcccaagccaggcctttctggaggccgagagagctcaatccattgcctatcacctcaaaattgaggagcaaagagaaaaagtacatgaaaatgaaaatataggtaccactgagcctggagagcaccaagaggccaagaaagcagagaactcatcaaatgaggaggaaacgtcaagtgaaggcaacatgagggtgcatgctgtggattcttgcatgagcttccagtgtaaaagaggccacatctgtaaggcagaccaacagggaaaacctcactgtgtctgccaggatccagtgacttgtcctccaacaaaaccccttgatcaagtttgtggcactgacaatcagacctatgctagttcctgtcatctattcgctactaaatgcagactggaggggaccaaaaaggggcatcaactccagctggattattttggagcctgcaaatctattcctacttgtacggactttgaagtgattcagtttcctctacggatgagagactggctcaagaatatcctcatgcagctttatgaagccaactctgaacacgctggttatctaaatgagaagcagagaaataaagtcaagaaaatttacctggatgaaaagaggcttttggctggggaccatcccattgatcttctcttaagggactttaagaaaaactaccacatgtatgtgtatcctgtgcactggcagtttagtgaacttgaccaacaccctatggatagagtcttgacacattctgaacttgctcctctgcgagcatctctggtgcccatggaacactgcataacccgtttctttgaggagtgtgaccccaacaaggataagcacatcaccctgaaggagtggggccactgctttggaattaaagaagaggacatagatgaaaatctcttgttttgaacgaagattttaaagaactcaactttccagcatcctcctctgttctaaccacttcagaaatatatgcagctgtgatacttgtagatttatatttagcaaaatgttagcatgtatgacaagacaatgagagtaattgcttgacaacaacctatgcaccaggtatttaacattaactttggaaacaaaaatgtacaattaagtaaagtcaacatatgcaaaatactgtacattgtgaacagaagtttaattcatagtaatttcactctctgcattgacttatgagataattaatgattaaactattaatgataaaaataatgcatttgtattgttcataatatcatgtgcacttcaagaaaatggaatgctactcttttgtggtttacgtgtattattttcaatatcttaataccctaataaagagtccataaaaatccaaa

SEQ ID NO: 5455 - DNA, 10724 bp, Homo sapiens; identical to SEQ ID NO: 2476

SEQ ID NO: 5456 - DNA, 15808 bp, Homo sapiens
aaagtgcagggggcgggccgggcggcagggggcctgcccgctggattcccgcatgcttgttccggggcggtcgggtctaaagggctttatgcactgtctggagggtggggactggcgcgggtagaaaacgggatgcctcgggcgtgggggcaggcttttggccactaggagctggcggaggtgcagacctaaaggagcgttcgctagcagaggcgctgccggtgcggtgtgctacgcgcgcccacctcccggggaaggaacggcgaggccggggaccgtcgcggagatggatcgcgggccggcagcagtggcgtgcacgctgctcctggctctcgtcgcctgcctagcgccggccagtggccaagaatgtgacagtgcgcattttcgctgtggaagtgggcattgcatccctgcagactggaggtgtgatgggaccaaagactgttcagatgacgcggatgaaattggctgcgctgttgtgacctgccagcagggctatttcaagtgccagagtgagggacaatgcatccccaactcctgggtgtgtgaccaagatcaagactgtgatgatggctcagatgaacgtcaagattgctcacaaagtacatgctcaagtcatcagataacatgctccaatggtcagtgtatcccaagtgaatacaggtgcgaccacgtcagagactgccccgatggagctgatgagaatgactgccagtacccaacatgtgagcagcttacttgtgacaatggggcctgctataacaccagtcagaagtgtgattggaaagttgattgcagggactcctcagatgaaatcaactgcactgagatatgcttgcacaatgagttttcatgtggcaatggagagtgtatccctcgtgcttatgtctgtgaccatgacaatgattgccaagacggcagtgacgaacatgcttgcaactatccgacctgcggtggttaccagttcacttgccccagtggccgatgcatttatcaaaactgggtttgtgatggagaagatgactgtaaagataatggagatgaagatggatgtgaaagcggtcctcatgatgttcataaatgttccccaagagaatggtcttgcccagagtcgggacgatgcatctccatttataaagtttgtgatgggattttagattgcccaggaagagaagatgaaaacaacactagtaccggaaaatactgtagtatgactctgtgctctgccttgaactgccagtaccagtgccatgagacgccgtatggaggagcgtgtttttgtcccccaggttatatcatcaaccacaatgacagccgtacctgtgttgagtttgatgattgccagatatggggaatttgtgaccagaagtgtgaaagccgacctggccgtcacctgtgccactgtgaagaagggtatatcttggagcgtggacagtattgcaaagctaatgattcctttggcgaggcctccattatcttctccaatggtcgggatttgttaattggtgatattcatggaaggagcttccggatcctagtggagtctcagaatcgtggagtggccgtgggtgtggctttccactatcacctgcaaagagttttttggacagacaccgtgcaaaataaggttttttcagttgacattaatggtttaaatatccaagaggttctcaatgtttctgttgaaaccccagagaacctggctgtggactgggttaataataaaatctatctagtggaaaccaaggtcaaccgcatagatatggtaaatttggatggaagctatcgggttacccttataactgaaaacttggggcatcctagaggaattgccgtggacccaactgttggttatttatttttctcagattgggagagcctttctggggaacctaagctggaaagggcattcatggatggcagcaaccgtaaagacttggtgaaaacaaagctgggatggcctgctggggtaactctggatatgatatcgaagcgtgtttactgggttgactctcggtttgattacattgaaactgtaacttatgatggaattcaaaggaagactgtagttcatggaggctccctcattcctcatccctttggagtaagcttatttgaaggtcaggtgttctttacagattggacaaagatggccgtgctgaaggcaaacaagttcacagagaccaacccacaagtgtactaccaggcttccctgaggccctatggagtgactgtttaccattccctcagacagccctatgctaccaatccgtgtaaagataacaatgggggctgtgagcaggtctgtgtcctcagccacagaacagataatgatggtttgggtttccgttgcaagtgcacattcggcttccaactggatacagatgagcgccactgcattgctgttcagaatttcctcattttttcatcccaagttgctattcgtgggatcccgttcaccttgtctacccaggaagatgtcatggttccagtttcggggaatccttctttctttgtcgggattgattttgacgcccaggacagcactatctttttttcagatatgtcaaaacacatgatttttaagcaaaagattgatggcacaggaagagaaattctcgcagctaacagggtggaaaatgttgaaagtttggcttttgattggatttcaaagaatctctattggacagactctcattacaagagtatcagtgtcatgaggctagctgataaaacgagacgcacagtagttcagtatttaaataacccacggtcggtggtagttcatccttttgccgggtatctattcttcactgattggttccgtcctgctaaaattatgagagcatggagtgacggatctcacctcttgcctgtaataaacactactcttggatggcccaatggcttggccatcgattgggctgcttcacgattgtactgggtagatgcctattttgataaaattgagcacagcacctttgatggtttagacagaagaagactgggccatatagagcagatgacacatccgtttggacttgccatctttggagagcatttattttttactgactggagactgggtgccattattcgagtcaggaaagcagatggtggagaaatgacagttatccgaagtggcattgcttacatactgcatttgaaatcgtatgatgtcaacatccagactggttctaacgcctgtaatcaacccacgcatcctaacggtgactgcagccacttctgcttcccggtgccaaatttccagcgagtgtgtgggtgcccttatggaatgaggctggcttccaatcacttgacatgcgagggggacccaaccaatgaaccacccacagagcagtgtggcttattttccttcccctgtaaaaatggcagatgtgtgcccaattactatctctgtgatggagtcgatgattgtcatgataacagtgatgagcaactatgtggcacacttaataatacctgttcatcttcggcgttcacctgtggccatggggagtgcattcctgcacactggcgctgtgacaaacgcaacgactgtgtggatggcagtgatgagcacaactgccccacccacgcacctgcttcctgccttgacacccaatacacctgtgataatcaccagtgtatctcaaagaactgggtctgtgacacagacaatgattgtggggatggatctgatgaaaagaactgcaattcgacagagacatgccaacctagtcagtttaattgccccaatcatcgatgtattgacctatcgtttgtctgtgatggtgacaaggattgtgttgatggatctgatgaggttggttgtgtattaaactgtactgcttctcaattcaagtgtgccagtggggataaatgtattggcgtcacaaatcgttgtgatggtgtttttgattgcagtgacaactcggatgaagcaggctgtccaaccaggcctcctggtatgtgccactcagatgaatttcagtgccaagaagatggtatctgcatcccgaacttctgggaatgtgatgggcatccagactgcctctatggatctgatgagcacaatgcctgtgtccccaagacttgcccttcatcatatttccactgtgacaacggaaactgcatccacagggcatggctctgtgatcgggacaatgactgcggggatatgagtgatgagaaggactgccctactcagccctttcgctgtcctagttggcaatggcagtgtcttggccataacatctgtgtgaatctgagtgtagtgtgtgatggcatctttgactgccccaatgggacagatgagtccccactttgcaatgggaacagctgctcagatttcaatggtggttgtactcacgagtgtgttcaagagccctttggggctaaatgcctatgtccattgggattcttacttgccaatgattctaagacctgtgaagacatagatgaatgtgatattctaggctcttgtagccagcactgttacaatatgagaggttctttccggtgctcgtgtgatacaggctacatgttagaaagtgatgggaggacttgcaaagttacagcatctgagagtctgctgttacttgtggcaagtcagaacaaaattattgccgacagtgtcacctcccaggtccacaatatctattcattggtcgagaatggttcttacattgtagctgttgattttgattcaattagtggtcgtatcttttggtctgatgcaactcagggtaaaacctggagtgcgtttcaaaatggaacggacagaagagtggtatttgacagtagcatcatcttgactgaaactattgcaatagattgggtaggtcgtaatctttactggacagactatgctctggaaacaattgaagtctccaaaattgatgggagccacaggactgtgctgattagtaaaaacctaacaaatccaagaggactagcattagatcccagaatgaatgagcatctactgttctggtctgactggggccaccaccctcgcatcgagcgagccagcatggacggcagcatgcgcactgtcattgtccaggacaagatcttctggccctgcggcttaactattgactaccccaacagactgctctacttcatggactcctatcttgattacatggacttttgtgattataatggacaccatcggagacaggtgatagccagtgatttgattatacggcacccctatgccctaactctctttgaagactctgtgtactggactgaccgtgctactcgtcgggttatgcgagccaacaagtggcatggagggaaccagtcagttgtaatgtataatattcaatggccccttgggattgttgcggttcatccttcgaaacaaccaaattccgtgaatccatgtgccttttcccgctgcagccatctctgcctgctttcctcacaggggcctcatttttactcctgtgtttgtccttcaggatggagtctgtctcctgatctcctgaattgcttgagagatgatcaacctttcttaataactgtaaggcaacatataatttttggaatctcccttaatcctgaggtgaagagcaatgatgctatggtccccatagcagggatacagaatggtttagatgttgaatttgatgatgctgagcaatacatctattgggttgaaaatccaggtgaaattcacagagtgaagacagatggcaccaacaggacagtatttgcttctatatctatggtggggccttctatgaacctggccttagattggatttcaagaaacctttattctaccaatcctagaactcagtcaatcgaggttttgacactccacggagatatcagatacagaaaaacattgattgccaatgatgggacagctcttggagttggctttccaattggcataactgttgatcctgctcgtgggaagctgtactggtcagaccaaggaactgacagtggggttcctgccaagatcgccagtgctaacatggatggcacatctgtgaaaactctctttactgggaacctcgaacacctggagtgtgtcactcttgacatcgaagagcagaaactctactgggcagtcactggaagaggagtgattgaaagaggaaacgtggatggaacagatcgaatgatcctggtacaccagctttcccacccctggggaattgcagtccatgattctttcctttattatactgatgaacagtatgaggtcattgaaagagttgataaggccactggggccaacaaaatagtcttgagagataatgttccaaatctgaggggtcttcaagtttatcacagacgcaatgccgccgaatcctcaaatggctgtagcaacaacatgaatgcctgtcagcagatttgcctgcctgtaccaggaggattgttttcctgcgcctgtgccactggatttaaactcaatcctgataatcggtcctgctctccatataactctttcattgttgtttcaatgctgtctgcaatcagaggctttagcttggaattgtcagatcattcagaaaccatggtgccggtggcaggccaaggacgaaacgcactgcatgtggatgtggatgtgtcctctggctttatttattggtgtgattttagcagctcagtggcatctgataatgcgatccgtagaattaaaccagatggatcttctctgatgaacattgtgacacatggaataggagaaaatggagtccggggtattgcagtggattgggtagcaggaaatctttatttcaccaatgcctttgtttctgaaacactgatagaagttctgcggatcaatactacttaccgccgtgttcttcttaaagtcacagtggacatgcctaggcatattgttgtagatcccaagaacagatacctcttctgggctgactatgggcagagaccaaagattgagcgttctttccttgactgtaccaatcgaacagtgcttgtgtcagagggcattgtcacaccacggggcttggcagtggaccgaagtgatggctacgtttattgggttgatgattctttagatataattgcaaggattcgtatcaatggagagaactctgaagtgattcgttatggcagtcgttacccaactccttatggcatcactgtttttgaaaattctatcatatgggtagataggaatttgaaaaagatcttccaagccagcaaggaaccagagaacacagagccacccacagtgataagagacaatatcaactggctaagagatgtgaccatctttgacaagcaagtccagccccggtcaccagcagaggtcaacaacaacccttgcttggaaaacaatggtgggtgctctcatctctgctttgctctgcctggattgcacaccccaaaatgtgactgtgcctttgggaccctgcaaagtgatggcaagaattgtgccatttcaacagaaaatttcctcatctttgccttgtctaattccttgagaagcttacacttggaccctgaaaaccatagcccacctttccaaacaataaatgtggaaagaactgtcatgtctctagactatgacagtgtaagtgatagaatctacttcacacaaaatttagcctctggagttggacagatttcctatgccaccctgtcttcagggatccatactccaactgtcattgcttcaggtatagggactgctgatggcattgcctttgactggattactagaagaatttattacagtgactacctcaaccagatgattaattccatggctgaagatgggtctaaccgcactgtgatagcccgcgttccaaaaccaagagcaattgtgttagatccctgccaagggtacctgtactgggctgactgggatacacatgccaaaatcgagagagccacattgggaggaaacttccgcgtacccattgtgaacagcagtctggtcatgcccagtgggctgactctggactatgaagaggaccttctctactgggtggatgctagtctgcagaggattgaacgcagcactctgacgggcgtggatcgtgaagtcattgtcaatgcagccgttcatgcttttggcttgactctctatggccagtatatttactggactgacttgtacacacaaagaatttaccgagctaacaaatatgacgggtcaggtcagattgcaatgaccacaaatttgctctcccagcccaggggaatcaacactgttgtgaagaaccagaaacaacagtgtaacaatccttgtgaacagtttaatgggggctgcagccatatctgtgcaccaggtccaaatggtgccgagtgccagtgtccacatgagggcaactggtatttggccaacaacaggaagcactgcattgtggacaatggtgaacgatgtggtgcatcttccttcacctgctccaatgggcgctgcatctcggaagagtggaagtgtgataatgacaacgactgtggggatggcagtgatgagatggaaagtgtctgtgcacttcacacctgctcaccgacagccttcacctgtgccaatgggcgatgtgtccaatactcttaccgctgtgattactacaatgactgtggtgatggcagtgatgaggcagggtgcctgttcagggactgcaatgccaccacggagtttatgtgcaataacagaaggtgcatacctcgtgagtttatctgcaatggtgtagacaactgccatgataataacacttcagatgagaaaaattgccctgatcgcacttgccagtctggatacacaaaatgtcataattcaaatatttgtattcctcgcgtttatttgtgtgacggagacaatgactgtggagataacagtgatgaaaaccctacttattgcaccactcacacgtgcagcagcagtgagttccaatgcgcatctgggcgctgtattcctcaacattggtattgtgatcaagaaacagattgttttgatgcctctgatgaacctgcctcttgtggtcactctgagcgaacatgcctagctgatgagttcaagtgtgatggtgggaggtgcatcccaagcgaatggatctgtgacggtgataatgactgtggggatatgagtgacgaggataaaaggcaccagtgtcagaatcaaaactgctcggattccgagtttctctgtgtaaatgacagacctccggacaggaggtgcattccccagtcttgggtctgtgatggcgatgtggattgtactgacggctacgatgagaatcagaattgcaccaggagaacttgctctgaaaatgaattcacctgtggttacggactgtgtatcccaaagatattcaggtgtgaccggcacaatgactgtggtgactatagcgacgagaggggctgcttataccagacttgccaacagaatcagtttacctgtcagaacgggcgctgcattagtaaaaccttcgtctgtgatgaggataatgactgtggagacggatctgatgagctgatgcacctgtgccacaccccagaacccacgtgtccacctcacgagttcaagtgtgacaatgggcgctgcatcgagatgatgaaactctgcaaccacctagatgactgtttggacaacagcgatgagaaaggctgtggcattaatgaatgccatgacccttcaatcagtggctgcgatcacaactgcacagacaccttaaccagtttctattgttcctgtcgtcctggttacaagctcatgtctgacaagcggacttgtgttgatattgatgaatgcacagagatgccttttgtctgtagccagaagtgtgagaatgtaataggctcctacatctgtaagtgtgccccaggctacctccgagaaccagatggaaagacctgccggcaaaacagtaacatcgaaccctatctcatttttagcaaccgttactatttgagaaatttaactatagatggctatttttactccctcatcttggaaggactggacaatgttgtggcattagattttgaccgagtagagaagagattgtattggattgatacacagaggcaagtcattgagagaatgtttctgaataagacaaacaaggagacaatcataaaccacagactaccagctgcagaaagtctggctgtagactgggtttccagaaagctctactggttggatgcccgcctggatggcctctttgtctctgacctcaatggtggacaccgccgcatgctggcccagcactgtgtggatgccaacaacaccttctgctttgataatcccagaggacttgcccttcaccctcaatatgggtacctctactgggcagactggggtcaccgcgcatacattgggagagtaggcatggatggaaccaacaagtctgtgataatctccaccaagttagagtggcctaatggcatcaccattgattacaccaatgatctactctactgggcagatgcccacctgggttacatagagtactctgatttggagggccaccatcgacacacggtgtatgatggggcactgcctcaccctttcgctattaccatttttgaagacactatttattggacagattggaatacaaggacagtggaaaagggaaacaaatatgatggatcaaatagacagacactggtgaacacaacacacagaccatttgacatccatgtgtaccatccatataggcagcccattgtgagcaatccctgtggtaccaacaatggtggctgttctcatctctgcctcatcaagccaggaggaaaagggttcacttgcgagtgtccagatgacttccgcacccttcagctgagtggcagcacctactgcatgcccatgtgctccagcacccagttcctgtgcgctaacaatgaaaagtgcattcctatctggtggaaatgtgatggacagaaagactgctcagatggctctgatgaactggccctttgcccgcagcgcttctgccgactgggacagttccagtgcagtgacggcaactgcaccagcccgcagactttatgcaatgctcaccaaaattgccctgatgggtctgatgaagaccgtcttctttgtgagaatcaccactgtgactccaatgaatggcagtgcgccaacaaacgttgcatcccagaatcctggcagtgtgacacatttaacgactgtgaggataactcagatgaagacagttcccactgtgccagcaggacctgccggccgggccagtttcggtgtgctaatggccgctgcatcccgcaggcctggaagtgtgatgtggataatgattgtggagaccactcggatgagcccattgaagaatgcatgagctctgcccatctctgtgacaacttcacagaattcagctgcaaaacaaattaccgctgcatcccaaagtgggccgtgtgcaatggtgtagatgactgcagggacaacagtgatgagcaaggctgtgaggagaggacatgccatcctgtgggggatttccgctgtaaaaatcaccactgcatccctcttcgttggcagtgtgatgggcaaaatgactgtggagataactcagatgaggaaaactgtgctccccgggagtgcacagagagcgagtttcgatgtgtcaatcagcagtgcattccctcgcgatggatctgtgaccattacaacgactgtggggacaactcagatgaacgggactgtgagatgaggacctgccatcctgaatattttcagtgtacaagtggacattgtgtacacagtgaactgaaatgcgatggatccgctgactgtttggatgcgtctgatgaagctgattgtcccacacgctttcctgatggtgcatactgccaggctactatgttcgaatgcaaaaaccatgtttgtatcccgccatattggaaatgtgatggcgatgatgactgtggcgatggttcagatgaagaacttcacctgtgcttggatgttccctgtaattcaccaaaccgtttccggtgtgacaacaatcgctgcatttatagtcatgaggtgtgcaatggtgtggatgactgtggagatggaactgatgagacagaggagcactgtagaaaaccgacccctaaaccttgtacagaatatgaatataagtgtggcaatgggcattgcattccacatgacaatgtgtgtgatgatgccgatgactgtggtgactggtccgatgaactgggttgcaataaaggaaaagaaagaacatgtgctgaaaatatatgcgagcaaaattgtacccaattaaatgaaggaggatttatctgctcctgtacagctgggttcgaaaccaatgtttttgacagaacctcctgtctagatatcaatgaatgtgaacaatttgggacttgtccccagcactgcagaaataccaaaggaagttatgagtgtgtctgtgctgatggcttcacgtctatgagtgaccgccctggaaaacgatgtgcagctgagggtagctctcctttgttgctactgcctgacaatgtccgaattcgaaaatataatctctcatctgagaggttctcagagtatcttcaagatgaggaatatatccaagctgttgattatgattgggatcccaaggacataggcctcagtgttgtgtattacactgtgcgaggggagggctctaggtttggtgctatcaaacgtgcctacatccccaactttgaatccggccgcaataatcttgtgcaggaagttgacctgaaactgaaatacgtaatgcagccagatggaatagcagtggactgggttggaaggcatatttactggtcagatgtcaagaataaacgcattgaggtggctaaacttgatggaaggtacagaaagtggctgatttccactgacctggaccaaccagctgctattgctgtgaatcccaaactagggcttatgttctggactgactggggaaaggaacctaaaatcgagtctgcctggatgaatggagaggaccgcaacatcctggttttcgaggaccttggttggccaactggcctttctatcgattatttgaacaatgaccgaatctactggagtgacttcaaggaggacgttattgaaaccataaaatatgatgggactgataggagagtcattgcaaaggaagcaatgaacccttacagcctggacatctttgaagaccagttatactggatatctaaggaaaagggagaagtatggaaacaaaataaatttgggcaaggaaagaaagagaaaacgctggtagtgaacccttggctcactcaagttcgaatctttcatcaactcagatacaataagtcagtgcccaacctttgcaaacagatctgcagccacctctgccttctgagacctggaggatacagctgtgcctgtccccaaggctccagctttatagaggggagcaccactgagtgtgatgcagccatcgaactgcctatcaacctgccccccccatgcaggtgcatgcacggaggaaattgctattttgatgagactgacctccccaaatgcaagtgtcctagcggctacaccggaaaatattgtgaaatggcgttttcaaaaggcatctctccaggaacaaccgcagtagctgtgctgttgacaatcctcttgatcgtcgtaattggagctctggcaattgcaggattcttccactatagaaggaccggctcccttttgcctgctctgcccaagctgccaagcttaagcagtctcgtcaagccctctgaaaatgggaatggggtgaccttcagatcaggggcagatcttaacatggatattggagtgtctggttttggacctgagactgctattgacaggtcaatggcaatgagtgaagactttgtcatggaaatggggaagcagcccataatatttgaaaacccaatgtactcagccagagacagtgctgtcaaagtggttcagccaatccaggtgactgtatctgaaaatgtggataataagaattatggaagtcccataaacccttctgagatagttccagagacaaacccaacttcaccagctgctgatggaactcaggtgacaaaatggaatctcttcaaacgaaaatctaaacaaactaccaactttgaaaatccaatctatgcacagatggagaacgagcaaaaggaaagtgttgctgcgacaccacctccatcaccttcgctccctgctaagcctaagcctccttcgagaagagacccaactccaacctattctgcaacagaagacacttttaaagacaccgcaaatcttgttaaagaagactctgaagtatagctataccagctatttagggaataattagaaacacacttttgcacatatattttttacaaacagatgaaaaaagttaacattcagtactttatgaaaaaaatatatttttccctgtttgcctatagttggaggtatcctgtgtgtctttttttacttatgccgtctcatatttttacaaataattatcacaatgtactatatgtatatctttgcactgaagttgtctgaaggtaatactataaatatattgtatatttgtaaattttggaaagattatcctgttactgaatttgctaataaagatgtctgctgatttggttggtgatcattatagtaaatgatccaacaagaaaaggaattgactggggacctttagccgtgtctaaagaagaggcaccactcatatttcctataaaattatctaggaaaggaatccaggccccgctcttgggtccatttttacacattagcacttaattaatgttcaatattacatgtcaatttgattaatggctatgttgataggggccactatgtgttgtatagacatctggacttgactgtagactcctcagataatacagaaggtaggaaaagcaattcagtttggcccttctgtgtgttggcattgtctaaccagaactctctgtttcatgtgtgttctctcactagctgccaagacaacatttttatttgtgatgtctatgaggaaatcccatatcattaagtgccagtgtcctgcattgagtttgtggttaattaaatgagctcttctgctgatggaccctggagcaatttctcccctcacctgacattcaaggtggtcacctgccctagtagttggagctcagtagctgaatttctgaaaccaaatctgtgtcttcataaaataaggtgcaaaaaaaaaaaataccagttaagtaaagcctcaactgggtttttgtttctatgaaaatatcattataatcactatttatttcctaagttgaacctgaatagaaagggaaaccattcttattaagctttttattaggccctgtggctaaatgtgtacatttatattagaatgtactgtacagtccagatcttttctttaattcttattggttttttttttttttttttttttagagatggagtcttgctatattgccaaggctgatcttgaagtcctgggctcaagtgatcctcccacctcagcctcctgagtggttggggttacgggcgtgagccactgtgcctggcttccagctctcctcttaaatagtgggtatagtctgcacaacaggaaccatggcaggaatatacactttcccatagcaaatagcatacctgactctctgtgctaatattgcacatttgttaaacaatgaatgaatggatggatggatggatggatgaatgaatgaaacatatactactgattattttattccagagttctcaaaatatttgttgctgatattttgagtgctgactgtaattactttgattagataaacaactggaaataatgctgctgaaaaagttctaataaatgtgtattttatcaga

SEQ ID NO: 5457 - DNA, 2203 bp, Homo sapiens
acacttgtgcaggaaacaacagactagtgaggtttacaagaggggggtgtgtgtgtgtgtgtgtctgcctgtgggatgggggtggcacgggggagagagagatgtgggttacaaagctgccatctagaggctagaggctcctttctgcagtgtatataatgcaagtctgcagccagcagagctcacagttgttgcaaagtgctcagcactaagggagccagcgcacagcacagccaggaaggcgagcgagcccagccagcccagccagcccagccagcccggaggtcatttgattgcccgcctcagaacgatggatctgcatctcttcgactactcagagccagggaacttctcggacatcagctggccatgcaacagcagcgactgcatcgtggtggacacggtgatgtgtcccaacatgcccaacaaaagcgtcctgctctacacgctctccttcatttacattttcatcttcgtcatcggcatgattgccaactccgtggtggtctgggtgaatatccaggccaagaccacaggctatgacacgcactgctacatcttgaacctggccattgccgacctgtgggttgtcctcaccatcccagtctgggtggtcagtctcgtgcagcacaaccagtggcccatgggcgagctcacgtgcaaagtcacacacctcatcttctccatcaacctcttcggcagcattttcttcctcacgtgcatgagcgtggaccgctacctctccatcacctacttcaccaacacccccagcagcaggaagaagatggtacgccgtgtcgtctgcatcctggtgtggctgctggccttctgcgtgtctctgcctgacacctactacctgaagaccgtcacgtctgcgtccaacaatgagacctactgccggtccttctaccccgagcacagcatcaaggagtggctgatcggcatggagctggtctccgttgtcttgggctttgccgttcccttctccattatcgctgtcttctacttcctgctggccagagccatctcggcgtccagtgaccaggagaagcacagcagccggaagatcatcttctcctacgtggtggtcttccttgtctgctggctgccctaccacgtggcggtgctgctggacatcttctccatcctgcactacatccctttcacctgccggctggagcacgccctcttcacggccctgcatgtcacacagtgcctgtcgctggtgcactgctgcgtcaaccctgtcctctacagcttcatcaatcgcaactacaggtacgagctgatgaaggccttcatcttcaagtactcggccaaaacagggctcaccaagctcatcgatgcctccagagtctcagagacggagtactctgccttggagcagagcaccaaatgatctgccctggagaggctctgggacgggtttacttgtttttgaacagggtgatgggccctatggttttctagagcaaagcaaagtagcttcgggtcttgatgcttgagtagagtgaagaggggagcacgtgccccctgcatccattctctctttctcttgatgacgcagctgtcatttggctgtgcgtgctgacagttttgcaacaggcagagctgtgtcgcacagcagtgctgtgcgtcagagccagctgaggacaggcttgcctggacttctgtaagataggattttctgtgtttcctgaattttttatatggtgatttgtatttaaattttaagactttattttctcactattggtgtaccttataaatgtatttgaaagttaaatatattttaaatattgtttgggaggcatagtgctgacatatattcagagtgttgtagttttaaggttagcgtgacttcagttttgactaaggatgacactaattgttagctgttttgaaattatatatatataaatatatataaatatataaatatatgccagtcttggctgaaatgttttatttaccatagttttatatctgtgtggtgttttgtaccggcacgggatatggaacgaaaactgctttgtaatgcagtttgtgacattaatagtattgtaaagttacattttaaaataaacaaaaaactgttctggactgcaaatctgcacacacaacgaacagttgcatttcagagagttctctcaatttgtaagttatttttttttaataaagatttttgtttcctaaaaatgca

SEQ ID NO: 5458 - DNA, 3513 bp, Homo sapiens; identical to SEQ ID NO: 485

SEQ ID NO: 5459 - DNA, 4186 bp, Homo sapiens
gtctctccaagggaatgaaaggtgaggggagcgtgagtgcaggcatgatgggaatctccgtgacttgtgaaccaaggactgggttttgctctggaagcctgtcctgattgcttctgtaatctggcgctatgcatccggatcttggacccttatgtacactgctgtatgttactcttacaattctgtgctcttctgtgagttcagacttggcaccttattttacttctgagccgctctctgctgtccagaaacttggtggacctgtagtactgcattgttctgctcaacctgtgaccactcgtatctcatggctgcataacggaaaaacattggatggaaacctggaacatgttaagattcatcaggggactctgacaattctttctctcaactcctctcttttgggttactaccagtgccttgccaacaatagcatcggtgccattgtgagtggccctgcgacagtatctgtggcagttcttggtgattttggttcatccacaaagcatgttattacagcagaagaaaaaagtgctggtttcattggctgcagggtaccggagagtaaccccaaagctgaggtgcgctataaaatccggggaaaatggctggaacattccacagagaattacttaatccttccatcaggaaatcttcagattttgaatgtatccttagaggacaagggatcatacaaatgtgcagcttataatcctgtcacacatcaattaaaagttgaacctattggccgaaagctccttgtgagtcgtccttcttcagatgatgttcacattcttcaccccacccattcacaggcattagctgttctttctcgtagccctgtaaccttggagtgtgtggtgagtggggtcccggctcctcaagtgtattggctaaaggacgggcaggacattgcaccaggaagcaactggagaaggttgtattctcatcttgccactgatagcgttgacccggcggactccggaaactattcctgcatggcgggaaacaagtctggagatgtaaaatatgtgacttacatggttaatgtacttgaacatgcttccatttctaaaggactacaggatcagatagtgtctctgggtgccacagtacactttacctgcgacgttcatgggaacccagcccccaactgtacctggtttcacaatgcacagcctattcatccttctgcacgacatctaactgcaggaaacggactgaaaatcagtggggttactgtggaagatgttgggatgtatcagtgtgtagcagataatgggattggatttatgcactctactggaagacttgaaattgaaaatgacggtggattcaagccagttataattacggcaccagtaagtgcaaaggttgcagacggagactttgttactctgtcctgcaatgccagtgggctgccggttccggtcattcgttggtatgacagccatggattgataaccagccatccatctcaagtcctgagatcgaaatcccgaaaatcacagttatcaagacctgagggcttgaacctggagcctgtgtacttcgtcctgtcccaagctggtgcaagctctctccatattcaggctgtgactcaggaacatgcggggaaatacatctgcgaagctgcaaatgaacatggtaccacacaggcagaagcatctctcatggttgttccttttgaaacaaatacaaaagcagagacagtcacacttcctgatgctgctcagaatgatgacagaagtaagagagatggttcagaaactgggttactgagctcatttccggtgaaggtccatcccagtgcagtggaatcagcaccagagaaaaacgccagcggcatctctgttcctgatgcccccatcatactgagccccccacagacccacacaccagacacgtacaacctggtgtggagggcaggcaaggatggtgggctgcccatcaatgcttactttgtgaagtatcgaaagctggatgatggggttggcatgctgggaagctggcacacggttcgagtcccaggaagtgaaaatgagctccatttagctgagctggagccatctagtctttatgaagtcttgatggtagcaagaagcgcagcaggtgaaggccaacctgccatgcttaccttccgaaccagcaaagaaaaaacagcgtcatcaaaaaacacccaggcatcctctccacccgtgggcatccctaagtatcccgttgtttcagaggctgcaaacaacaattttggagtggtacttacagattcctctaggcacagtggagttccagaggcaccagatcggcctaccatctccactgcatcagagacatcagtctatgtcacttggattcctcgggcaaacgggggttctccaatcactgccttcaaagtcgaatataaacggatgaggaccagcaattggctggtggcagctgaagacatccctccttccaaactttcagtggaagttcgtagtttagaaccaggttcaacatacaaatttagggtcattgccatcaaccattatggtgagagttttcggagttcagcatctcgtccttatcaagtggttgggttccccaatcgcttttccagccgtccaataactggacctcacattgcatacacagaggctgtcagcgatactcagatcatgctaaagtggacgtacattccatcaagtaacaataacactcccattcaaggattttatatctattaccgaccaacagatagtgacaatgacagtgattacaagagggatgttgtagaaggttcaaagcagtggcacatgattggccacctgcagccagaaacctcctatgacattaaaatgcaatgcttcaatgaaggaggagaaagtgaatttagcaatgtgatgatctgcgagactaaagtgaaacgtgttcctggagcttctgaatatcctgtcaaagacttgagtacccctccaaattctttgggaagtggaggaaatgtggggcctgcaaccagccctgccagaagcagtgacatgttatatctgatcgttggctgtgtgctgggcgtcatggtcctcattctgatggttttcattgcaatgtgcctgtggaagaatcgccagcagaataccatacaaaaatatgacccaccaggatatctctaccaaggatcagatatgaacgggcagatggtggactacaccactctctcaggagcaagtcagataaatggaaatgttcacggaggcttcctaaccaatggcggtctcagcagtggctattcccaccttcaccataaggtccccaatgcagtcaatggaattgtgaatgggagcctaaatggagggctttactccgggcacagcaactctctaaccaggacacacgtggattttgaacatcctcatcatctagtgaatggtggtggaatgtacacggccgtgcctcagattgaccctctggagtgtgttaactgccgaaattgtcgaaacaacaataggtgtttcaccaaaaccaacagcactttcagcagcagccctcctcctgtggtccctgtggtagcaccttatcctcaggatggtttggaaatgaagcccctcagtcacgtgaaggtgcctgtatgcctgacttccgcagtccctgattgtggccagttgccggaggagagcgtcaaggacaatgtggaaccagtccctactcagcgtacctgctgtcaggacattgtaaatgacgtcagctctgatggctcagaagatccagcagagttcagcagaggagacagctgtgcccattcagaaacagagatcaacattgtaagttggaatgctcttattttgccacctgtccccgagggctgtgctgagaagacaatgtggtctccacctggcattcctttagacagcccgacagaggtccttcagcagccccgggaaacctgaggacatgcaaacaaccagtcatgttccaacttcaagccggtaactgcacacaacaggcctgggagcgaactgtgtgaaggaccttaattcaaatcagagaaaatcattatttatttttttgtagtagtaatgtcatatgaatgtatcttaaaacgtgtgcccttttatattatttatgccttaaatgttttcttccccattccttcctccccctcggtaggaaacaaccttgttttgcatagtattcagtcacctggagggca

SEQ ID NO: 5460 - DNA, 1657 bp, Homo sapiens
attgcagtacatttgagaaagtaaaggtgtagtggaaaccgagagcgaaatgagggcgtagggagaaaagggtggggaagcttagagaccggtgagggagcagagctggggcgcctgtgtacagggatagagcccggcggcagcagggcgcggcttccctttcccggggcctggggccgcaatcaggtggagtcgagaggccggaggaggggcaggaggaaggggtgcggtcgcgatccggacccggagccagcgcggagcacctgcgcccgcggctgacaccttcgctcgcagtttgttcgcagtttactcgcacaccagtttcccccaccgcgctttggattagtgtgatctcagctcaaggcaaaggtgggatatcatggcatctatctgggttggacaccgaggaacagtaagagattatccagactttagcccatcagtggatgctgaagctattcagaaagcaatcagaggaattggaactgatgagaaaatgctcatcagcattctgactgagaggtcaaatgcacagcggcagctgattgttaaggaatatcaagcagcatatggaaaggagctgaaagatgacttgaagggtgatctctctggccactttgagcatctcatggtggccctagtgactccaccagcagtctttgatgcaaagcagctaaagaaatccatgaagggcgcgggaacaaacgaagatgccttgattgaaatcttaactaccaggacaagcaggcaaatgaaggatatctctcaagcctattatacagtatacaagaagagtcttggagatgacattagttccgaaacatctggtgacttccggaaagctctgttgactttggcagatggcagaagagatgaaagtctgaaagtggatgagcatctggccaaacaagatgcccagattctctataaagctggtgagaacagatggggcacggatgaagacaaattcactgagatcctgtgtttaaggagctttcctcaattaaaactaacatttgatgaatacagaaatatcagccaaaaggacattgtggacagcataaaaggagaattatctgggcattttgaagacttactgttggccatagttaattgtgtgaggaacacgccggcctttttagccgaaagactgcatcgagccttgaagggtattggaactgatgagtttactctgaaccgaataatggtgtccagatcagaaattgaccttttggacattcgaacagagttcaagaagcattatggctattccctatattcagcaattaaatcggatacttctggagactatgaaatcacactcttaaaaatctgtggtggagatgactgaaccaagaagataatctccaaaggtccacgatgggctttcccaacagctccaccttacttcttctcatactatttaagagaacaagcaaatataaacagcaacttgtgttcctaacaggaattttcattgttctataacaacaacaacaaaagcgattattattttagagcatctcatttataatgtagcagctcataaatgaaattgaaaatggtattaaagatctgcaactactatccaacttatatttctgctttcaaagttaagaatctttatagttctactccattaaatataaagcaagat

SEQ ID NO: 5461 - DNA, 4589 bp, Homo sapiens
gagaagaaagccagtgcgtctctgggcgcaggggccagtggggctcggaggcacaggcaccccgcgacactccaggttccccgacccacgtccctggcagccccgattatttacagcctcagcagagcacggggcgggggcagaggggcccgcccgggagggctgctacttcttaaaacctctgcgggctgcttagtcacagccccccttgcttgggtgtgtccttcgctcgctccctccctccgtcttaggtcactgttttcaacctcgaataaaaactgcagccaacttccgaggcagcctcattgcccagcggaccccagcctctgccaggttcggtccgccatcctcgtcccgtcctccgccggcccctgccccgcgcccagggatcctccagctcctttcgcccgcgccctccgttcgctccggacaccatggacaagttttggtggcacgcagcctggggactctgcctcgtgccgctgagcctggcgcagatcgatttgaatataacctgccgctttgcaggtgtattccacgtggagaaaaatggtcgctacagcatctctcggacggaggccgctgacctctgcaaggctttcaatagcaccttgcccacaatggcccagatggagaaagctctgagcatcggatttgagacctgcaggtatgggttcatagaagggcacgtggtgattccccggatccaccccaactccatctgtgcagcaaacaacacaggggtgtacatcctcacatccaacacctcccagtatgacacatattgcttcaatgcttcagctccacctgaagaagattgtacatcagtcacagacctgcccaatgcctttgatggaccaattaccataactattgttaaccgtgatggcacccgctatgtccagaaaggagaatacagaacgaatcctgaagacatctaccccagcaaccctactgatgatgacgtgagcagcggctcctccagtgaaaggagcagcacttcaggaggttacatcttttacaccttttctactgtacaccccatcccagacgaagacagtccctggatcaccgacagcacagacagaatccctgctaccagagaccaagacacattccaccccagtggggggtcccataccactcatggatctgaatcagatggacactcacatgggagtcaagaaggtggagcaaacacaacctctggtcctataaggacaccccaaattccagaatggctgatcatcttggcatccctcttggccttggctttgattcttgcagtttgcattgcagtcaacagtcgaagaaggtgtgggcagaagaaaaagctagtgatcaacagtggcaatggagctgtggaggacagaaagccaagtggactcaacggagaggccagcaagtctcaggaaatggtgcatttggtgaacaaggagtcgtcagaaactccagaccagtttatgacagctgatgagacaaggaacctgcagaatgtggacatgaagattggggtgtaacacctacaccattatcttggaaagaaacaaccgttggaaacataaccattacagggagctgggacacttaacagatgcaatgtgctactgattgtttcattgcgaatcttttttagcataaaattttctactctttttgttttttgtgttttgttctttaaagtcaggtccaatttgtaaaaacagcattgctttctgaaattagggcccaattaataatcagcaagaatttgatcgttccagttcccacttggaggcctttcatccctcgggtgtgctatggatggcttctaacaaaaactacacatatgtattcctgatcgccaacctttcccccaccagctaaggacatttcccagggttaatagggcctggtccctgggaggaaatttgaatgggtccattttgcccttccatagcctaatccctgggcattgctttccactgaggttgggggttggggtgtactagttacacatcttcaacagaccccctctagaaatttttcagatgcttctgggagacacccaaagggtgaagctatttatctgtagtaaactatttatctgtgtttttgaaatattaaaccctggatcagtcctttgatcagtataattttttaaagttactttgtcagaggcacaaaagggtttaaactgattcataataaatatctgtacttcttcgatcttcaccttttgtgctgtgattcttcagtttctaaaccagcactgtctgggtccctacaatgtatcaggaagagctgagaatggtaaggagactcttctaagtcttcatctcagagaccctgagttcccactcagacccactcagccaaatctcatggaagaccaaggagggcagcactgtttttgttttttgttttttgttttttttttttgacactgtccaaaggttttccatcctgtcctggaatcagagttggaagctgaggagcttcagcctcttttatggtttaatggccacctgttctctcctgtgaaaggctttgcaaagtcacattaagtttgcatgacctgttatccctggggccctatttcatagaggctggccctattagtgatttccaaaaacaatatggaagtgccttttgatgtcttacaataagagaagaagccaatggaaatgaaagagattggcaaaggggaaggatgatgccatgtagatcctgtttgacatttttatggctgtatttgtaaacttaaacacaccagtgtctgttcttgatgcagttgctatttaggatgagttaagtgcctggggagtccctcaaaaggttaaagggattcccatcattggaatcttatcaccagataggcaagtttatgaccaaacaagagagtactggctttatcctctaacctcatattttctcccacttggcaagtcctttgtggcatttattcatcagtcagggtgtccgattggtcctagaacttccaaaggctgcttgtcatagaagccattgcatctataaagcaacggctcctgttaaatggtatctcctttctgaggctcctactaaaagtcatttgttacctaaacttatgtgcttaacaggcaatgcttctcagaccacaaagcagaaagaagaagaaaagctcctgactaaatcagggctgggcttagacagagttgatctgtagaatatctttaaaggagagatgtcaactttctgcactattcccagcctctgctcctccctgtctaccctctcccctccctctctccctccacttcaccccacaatcttgaaaaacttcctttctcttctgtgaacatcattggccagatccattttcagtggtctggatttctttttattttcttttcaacttgaaagaaactggacattaggccactatgtgttgttactgccactagtgttcaagtgcctcttgttttcccagagatttcctgggtctgccagaggcccagacaggctcactcaagctctttaactgaaaagcaacaagccactccaggacaaggttcaaaatggttacaacagcctctacctgtcgccccagggagaaaggggtagtgatacaagtctcatagccagagatggttttccactccttctagatattcccaaaaagaggctgagacaggaggttattttcaattttattttggaattaaatacttttttccctttattactgttgtagtccctcacttggatatacctctgttttcacgatagaaataagggaggtctagagcttctattccttggccattgtcaacggagagctggccaagtcttcacaaacccttgcaacattgcctgaagtttatggaataagatgtattctcactcccttgatctcaagggcgtaactctggaagcacagcttgactacacgtcatttttaccaatgattttcaggtgacctgggctaagtcatttaaactgggtctttataaaagtaaaaggccaacatttaattattttgcaaagcaacctaagagctaaagatgtaatttttcttgcaattgtaaatcttttgtgtctcctgaagacttcccttaaaattagctctgagtgaaaaatcaaaagagacaaaagacatcttcgaatccatatttcaagcctggtagaattggcttttctagcagaacctttccaaaagttttatattgagattcataacaacaccaagaattgattttgtagccaacattcattcaatactgttatatcagaggagtaggagagaggaaacatttgacttatctggaaaagcaaaatgtacttaagaataagaataacatggtccattcacctttatgttatagatatgtctttgtgtaaatcatttgttttgagttttcaaagaatagcccattgttcattcttgtgctgtacaatgaccactgttattgttactttgacttttcagagcacacccttcctctggtttttgtatatttattgatggatcaataataatgaggaaagcatgatatgtatattgctgagttgaaagcacttattggaaaatattaaaaggctaacattaaaagactaaaggaaacaga

SEQ ID NO: 5462 - DNA, 2583 bp, Homo sapiens
gattggatgaggcaccactcctcgtggggctgcttaggccaccgcgcgcgctgcgcgctgggaaacgagtggagacacgaggaccagcgcgagcggtcccggtgggctaccctccccctgcgacgaccccccctcgctctgaccgactggtcccctaaacggtggcggcggtttttggtcgttgggccccgggatttaggaccaacatttgaagacccgaaggggaactgcaaccatgaatgaagaaaatatagatggaacaaatggatgcagtaaagttcgaactggtattcagaatgaagcagcattacttgctttgatggaaaagactggttacaacatggttcaggaaaatggacaaaggaaatttggcggtcctcctccaggttgggaaggtccacctccacctagaggctgtgaagtttttgtaggaaaaatacctcgtgatatgtatgaagatgagttagttcctgtatttgaaagagctgggaagatatatgaatttcgacttatgatggaatttagtggtgaaaatcgaggttatgcttttgtgatgtacactacaaaagaagaagcccaattagccatcagaattcttaataattatgaaattcgaccagggaagtttattggtgtgtgtgtaagcctggataattgtagattatttattggagctattcccaaggaaaagaagaaagaagaaattttagatgaaatgaagaaagttacagaaggagttgtagatgtcattgtttatccaagtgcaactgataagaccaaaaatcgtggttttgcatttgtggaatatgaatctcacagagctgctgctatggcaaggaggaaactaattccaggaacattccaactatggggccacaccattcaggtagattgggctgacccagagaaagaggtggatgaggaaaccatgcagagagttaaagttctttatgtaagaaatttaatgatctcaactacagaggaaacaattaaagcagaattcaataaatttaagcctggtgcagttgaacgggtaaagaaacttagagattatgcttttgttcactttttcaaccgagaagatgcagtggctgccatgtctgttatgaatggaaaatgcattgatggagcaagtattgaggtaacactagctaaaccagtaaataaagaaaacacttggagacagcatcttaatggtcagattagtccaaattctgaaaatctgattgtgtttgctaacaaagaagagagccacccaaaaactctaggcaagctgccaactcttcctgctcgtctcaatggtcagcatagcccaagtccgcctgaagttgaaagatgcacttaccctttttatcctggaacaaagcttactccaattagtatgtattctttaaaatccaatcattttaattctgcagtaatgcatttggattattactgcaacaaaaataactgggcaccaccagaatattatttatattcaacaacaagtcaagatgggaaagtactcttggtgtataagatagttattcctgctattgcaaatggatcccagagttacttcatgccagacaaactctgtactacgttagaagatgcaaaggaactggcagcccagtttacattacttcatttggactacaatttccatcgcagctcaataaatagtctttcccctgttagtgctaccctctcttctgggactcccagcgtgcttccttatacttcaaggccttattcttatccaggctatcctttgtcaccaacaatatcacttgctaatggcagccatgttggacagcggctatgtatctccaatcaggcctccttcttctgaagaaaatactaacattagtatgaaaatttgtgtaaatttgtagtatgaaaacttgcaaattaaaatattgttttattttagaatcgggtttgcatatttggttttaaaaaggtatttattccaaagtactaaacatcagctataattcagaataacatggagttgtagaatttataaaaatgcaaagtttaaaaagttattcagtggtttctcttgataaaggtacagcaaactactattctttttaaacttctaggattttcttctactttctgagtgggcaatagaacctagtcatttatgtttttttttttttttgcataattttactaaatagtatttcacaaatattaaagcacttgaagacaatggttatagtagatttgattaccaaggatcactatctgtactggagattagaacaattatatgaccagaagcatctaaccattatgtaaaaagaaatgatgagacaaaaagattaagatacaaattttgtgcagtactaaagaaaaagcagtctaccattgtggtccttgaaaataactatagatatttttgttatttgttagacacaaattataattttgttgttaatgtatttaagcattttatagttatgctttgtgtttttgatattctttgtattgttaataacaagtgttatgggtttttaatgttgaaatcatgtgttaatttttgtacttgaattcaaattttttgacattaaatatgtgatgcttcta

SEQ ID NO: 5463 - DNA, 969 bp, Homo sapiens
agacgttcgcacacctgggtgccagcgccccagaggtcccgggacagcccgaggcgccgcgcccgccgccccgagctccccaagccttcgagagcggcgcacactcccggtctccactcgctcttccaacacccgctcgttttggcggcagctcgtgtcccagagaccgagttgccccagagaccgagacgccgccgctgcgaaggaccaatgagagccccgctgctaccgccggcgccggtggtgctgtcgctcttgatactcggctcaggccattatgctgctggattggacctcaatgacacctactctgggaagcgtgaaccattttctggggaccacagtgctgatggatttgaggttacctcaagaagtgagatgtcttcagggagtgagatttcccctgtgagtgaaatgccttctagtagtgaaccgtcctcgggagccgactatgactactcagaagagtatgataacgaaccacaaatacctggctatattgtcgatgattcagtcagagttgaacaggtagttaagcccccccaaaacaagacggaaagtgaaaatacttcagataaacccaaaagaaagaaaaagggaggcaaaaatggaaaaaatagaagaaacagaaagaagaaaaatccatgtaatgcagaatttcaaaatttctgcattcacggagaatgcaaatatatagagcacctggaagcagtaacatgcaaatgtcagcaagaatatttcggtgaacggtgtggggaaaagtccatgaaaactcacagcatgattgacagtagtttatcaaaaattgcattagcagccatagctgcctttatgtctgctgtgatcctcacagctgttgctgttattacagtccagcttagaagacaatacgtcaggaaatatgaaggagaagctgaggaacgaaagaaacttcgacaagagaatggaaatgtacatgctatagcataa

SEQ ID NO: 5464 - DNA, 1172 bp, Homo sapiens
atgaggctgattactctgagtgcaaaccttttcactgttccagagaggagcctgacaaccacattctccttctcaagatataagagttcggaccgcccagcacacaaggtcagcatgctgctcctctgtcacgctctcgctatagctgttgtccagatcgttatcttctcagaaagctgggcatttgccaagaacatcaacttctataatgtgaggcctcctctcgaccctacaccatttccaaatagcttcaagtgctttacttgtgaaaacgcaggggataattataactgcaatcgatgggcagaagacaaatggtgtccacaaaatacacagtactgtttgacagttcatcacttcaccagccacggaagaagcacatccatcaccaaaaagtgtgcctccagaagtgaatgtcattttgtcggttgccaccacagccgagattctgaacatacggagtgtaggtcttgctgtgaaggaatgatctgcaatgtagaattacccaccaatcacactaatgcagtgtttgccgtaatgcacgctcagagaacatctggcagcagtgcccccacactctacctaccagtgcttgcctgggtctttgtgcttccattgctgtgatgccaccattcctaggagaggcagagaccagcctctaaagcacaagccaaaaactgtgtgaacggtgaactttggagtgaagatcaatcttgcacttggtgaagagtgcacattggacctcaaggcgaaagccagtggtttgcttggataaaatgttcccgcatgaggccacaggactgaggatgggaatttggcagggcctgagaagatggtctgacttccaggcttcctggtcaaagagagctacgtttgggcagttctgcagagaggatcctggcaactagtcccacctgactaggcctttagctgaaaggatttcttgacctccttgactgcctcagaggctgccaggtcaaaccctcttgtttatgtgattagctcagagcatctctatgaaatctaacccttcccctcatgagaaagcagttttccccaccaacagcatagtcaatgagaaaggcaactgtacgaagaaaacttccagtggaactaatatgaaatctatttgcaaattatggggggaaataaagcttttaaattatacaatg

SEQ ID NO: 5465 - DNA, 4967 bp, Homo sapiens
cagctatcaaaaaggccataaggattttgtccccaaatttcacatgagctaccttgcttcaaactactgagatgaagggggcaagattatttgtccttctttctagtttatggagtgggggcattgggcttaacaacagtaagcattcttggactatacctgaggatgggaactctcagaagactatgccttctgcttcagttcctccaaataaaatacaaagtttgcaaatactgccaaccactcgggtcatgtcggcggagatagctacaactccagaggcaagaacttctgaagacagtcttcttaaatcaacactgcctccctcagaaacaagtgcacctgctgagggtgtgagaaatcaaactctcacatccacagagaaagcagaaggagtggtcaagttacagaatcttaccctcccaaccaacgctagcatcaagttcaatcctggagcagaatcagtggtcctttccaattctacactgaaatttcttcagagctttgccagaaagtcaaatgaacaagcaacttctctaaacacagttggaggcactggaggcattggaggcgttggaggcactggaggcgtgggaaatcgagccccacgggaaacatacctcagccggggtgacagcagttccagccaaagaactgactaccaaaaatcaaatttcgaaacaactagaggaaagaattggtgtgcttatgtacataccaggttatctcccacagtgatattggacaaccaggtcacttatgtcccaggtgggaaaggaccttgtggctggaccggtggatcctgtcctcagagatctcagaagatatccaatcctgtctataggatgcaacataaaattgtcacctcattggattggaggtgctgtcctggatacagtgggccgaaatgtcaactaagagcccaggaacagcaaagtttgatacacaccaaccaggctgaaagtcatacagctgttggcagaggagtagctgagcagcagcagcagcaaggctgtggtgacccagaagtgatgcaaaaaatgactgatcaggtgaactaccaggcaatgaaactgactcttctgcagaagaagattgacaatatttctttgactgtgaatgatgtaaggaacacttactcctccctagaaggaaaagtcagcgaagataaaagcagagaatttcaatctcttctaaaaggtctaaaatccaaaagcattaatgtactgataagagacatagtaagagaacaatttaaaatttttcaaaatgacatgcaagagactgtagcacagctcttcaagactgtatcaagtctatcagaggacctcgaaagcaccaggcaaataattcaaaaagttaatgaatctgtggtttcaatagcagcccagcaaaagtttgttttggtgcaagagaatcggcccactttgactgatatagtggaactaaggaatcacattgtgaatgtaaggcaagaaatgactcttacatgtgagaagcctattaaagaactagaagtaaagcagactcatttagaaggtgctctagaacaggaacactcaagaagcattctgtattatgaatccctcaataaaactctttctaaattgaaggaagtacatgagcagcttttatcaactgaacaggtatcagaccagaagaatgctccagctgctgagtcagttagcaataatgtcactgagtacatgtctactttacatgaaaatataaagaagcagagtttgatgatgctgcaaatgtttgaagatttgcacattcaagaaagcaagattaacaatctcaccgtctctttggagatggagaaagagtctctcagaggtgaatgtgaagacatgttatccaaatgcagaaatgattttaaatttcaacttaaggacacagaagagaatttacatgtgttaaatcaaacattggctgaagttctctttccaatggacaataagatggacaaaatgagtgagcaactaaatgatttgacttatgatatggagatccttcaacccttgcttgagcagggagcatcactcagacagacaatgacatatgaacaaccaaaggaagcaatagtgataaggaaaaagatagaaaatctgactagtgctgtcaatagtctaaattttattatcaaagaacttacaaaaagacacaacttacttagaaatgaagtacagggtcgtgatgatgccttagaaagacgtatcaatgaatatgccttagaaatggaagatggcctcaataagacaatgactattataaataatgctattgatttcattcaagataactatgccctaaaagagactttaagtactattaaggataatagtgagatccatcataaatgtacctccgatatggaaactattttgacatttattcctcagttccaccgtctgaatgattctattcagactttggtcaatgacaatcagagatataactttgttttgcaagtcgccaagacccttgcaggtattcccagagatgagaaactaaatcagtccaacttccaaaagatgtatcaaatgttcaatgaaaccacttcccaagtgagaaaataccagcaaaatatgagtcatttggaagaaaaactactcttaactaccaagatttccaaaaattttgagactcggttgcaagacattgagtctaaagttacccagacgctcataccttattatatttcagttaaaaaaggcagtgtagttacaaatgagagagatcaggctcttcaactgcaagtattaaattccagatttaaggcgttggaagcaaaatctatccatctttcaattaacttcttttcgcttaacaaaactctccacgaagttttaacaatgtgtcacaatgcttctacaagtgtgtcagaactgaatgctaccatccctaagtggataaaacattccctgccagatattcaacttcttcagaaaggtctaacagaatttgtggaaccaataattcaaataaaaactcaagctgccctatctaatttaacttgttgtatagatcgatcgttgcctggtagtctggcaaatgttgtcaagtctcagaagcaagtaaaatcattgccaaagaaaattaacgcacttaagaaaccaacggtaaatcttaccacagtcctgataggccggactcaaagaaacacggacaacataatatatcctgaggagtattcaagctgtagtcggcatccgtgccaaaatgggggcacgtgcataaatggaagaactagctttacctgtgcctgcagacatccttttactggtgacaactgcactatcaagcttgtggaagaaaatgctttagctccagatttttccaaaggatcttacagatatgcacccatggtggcattttttgcatctcatacgtatggaatgactatacctggtcctatcctgtttaataacttggatgtcaattatggagcttcatataccccaagaactggaaaatttagaattccgtatcttggagtatatgttttcaagtacaccatcgagtcatttagtgctcatatttctggatttttagtggttgatggaatagacaagcttgcatttgagtctgaaaatattaacagtgaaatacactgtgatagggttttaactggggatgccttattagaattaaattatgggcaggaagtctggttacgacttgcaaaaggaacaattccagccaagtttccccctgttactacatttagtggctatttattatatcgtacataagttagtatgaaaaacagactatcacctttattgagaaacagccagtgttttcatttatctttgcttgcacatctgctctgttttggtttttctacaggaaatgaaaatcaacttgtttttttaatatgagtaaacttgtatgtctattttataaaattatttgaatattgtttaatgtctgaatatgaaagagttcttgatcctaaagaaatttagtggcacagaaaacaaagtgaatttgttagcataattattcctattcttatttcttcattttaagtcattgcaatggaaagtaatattataaaatggtaattacaacatattatcagtcacagttttctttccaattaaacacttaacttttgttattccctgtatataaatatataacacacattttctagattcacaaatttaaataaattactcaaaaaatgaaaattgattttgtaaacttttatttttactctttacgttgagttgatcaattttccatactaagattttcattcagaatcaaaattaagaaagttggactgaaaatatgaaaaatgcttaactattgttctcttcctataattctctaattataacatagtaatttacatgtagttggacatgtacactcaagtctaagaatatatgagtggatcatttaccgccccccgccccacaacatctataaggggcaaaaagtctttttctaataagtattcttctatggtagtacctacagatctgcccttcttcttctaaagggtaagtcataatctgtgtaatactacaatttatgggatgctcactatgccctgtttctcttctaaacaatttacatgtaatgtctcattcctcacaataacccttgtaaagtgggcatgattaccatgatttttatagttgaagaacctaagacacagagaccaaggcccatgagctcatagggctgaggcaggatttggaatcaggccatgtcttctccagagcccacatccatcctttctctatattgcctcccacagatgtgctaaaatttatttaactaatcctttatcctctatttgtgttgtctcccattttttattattacaatattactgtggtgaacatgcttaaaaatacattccttggatatctgacaacgtgtttctgaaaaacagattttcataagtaataataaaaataataataaaaaagttttggtatggt

SEQ ID NO: 5466 - DNA, 4054 bp, Homo sapiens; identical to SEQ ID NO: 833

SEQ ID NO: 5467 - DNA, 1396 bp, Homo sapiens
agattgcgcgagggggagcgagcgagcgggcgctgccaggagcccgcagccctggcgcccgccgccgcccggagccccgcaatatgccgccgcggccctctggctctaggccatggcgaggctctgccggcgtgtcccctgcaccctgcttctcggcctggccgtggtgctgctgaaagcgcggctggtccccgcggccgccagagcggaactcagccgctccgacctcagcctcatccaacagcagcagcagcagcagcaacaacaacaacaacagcaaaagcagctggaggaggctgaggaggagaggacagaggtgcctggggcaacctccaccttgacggttccagtgtctgtatttatgttgaaagtccaggtgaatgacatcatcagtcgtcagtacctgagccaagcagttgtagaagtgtttgtaaactacacgaagacaaattccacagtaactaaaagcaatggagcagtgctgataaaagtaccctacaaattaggacttagtttaactattattgcttacaaagatggctacgtgttgacccctctgccttggaaaaccagaagaatgccaatatattcatcagttacactttcactgttcccgcaaagccaagcaaatatatggctatttgaagacactgttttaattactggaaaattagctgatgccaagtctcaaccaagtgttcagttttcaaaagccttaattaaacttcctgacaaccatcatattagcaacgttactggctatcttacagttctacaacagtttttgaaagtggacaattttctgcatacaactggaattactctcaataaaccaggttttgaaaacattgaattgactcctcttgctgcaatatgtgtgaaaatatattctggaggaaaagaactaaaggtcaatggctctattcaagtttctcttcctcttctacgtctgaatgatataagtgcaggggatcgcatacctgcttggacatttgatatgaacacaggtgcttgggtaaatcatggtcggggaatggtcaaggaacataacaatcatttaatctggacatatgatgcaccacatttggggtactggatagcagctccacttccaggaactagaggttcaggtataaatgaagattccaaggacataactgcctaccacacagtgtttcttacagccatattaggaggaacaatagtcattgtcattggattttttgctgtactactttgttattgcagggacaagtgtggtactccacagaaaagagaaagaaatatcactaaacttgaggtcctcaagagagaccagacaacttcaacaacacacataaatcatatcagaaacagaagaaagagtttccatggtaaaaactcgggacgattttaa

SEQ ID NO: 5468 - DNA, 7337 bp, Homo sapiens
acgcccaaataagaagccacctctaagcaaaatagtatatgtataaacggagggcgaatatatacaagtatatatatatgtatattacagacgcacaggtttacacccggtgaactttttctttttctttttcttttttttttaagaaaaactagtgacattgcagagaaggacgcttcctctctatcttttggcgcattagtgaagggggtattctattttgttaaagcgcccaagggggcgcagggaccttggagagaagagtggggaggaaagaggaagggtgggtggggggcagagggcgagtcggcggcggcgagggcaagctctttcttgcggcacgatgccgtctctgctggtgctcactttctccccgtgcgtactactcggctgggcgttgctggccggcggcaccggtggcggtggcgttggcggcggcggcggtggcgcgggcataggcggcggacgccaggagagagaggcgctgccgccacagaagatcgaggtgctggtgttactgccccaggatgactcgtacttgttttcactcacccgggtgcggccggccatcgagtatgctctgcgcagcgtggagggcaacgggactgggaggcggcttctgccgccgggcactcgcttccaggtggcttacgaggattcagactgtgggaaccgtgcgctcttcagcttggtggaccgcgtggcggcggcgcggggcgccaagccagaccttatcctggggccagtgtgcgagtatgcagcagcgccagtggcccggcttgcatcgcactgggacctgcccatgctgtcggctggggcgctggccgctggcttccagcacaaggactctgagtactcgcacctcacgcgcgtggcgcccgcctacgccaagatgggcgagatgatgctcgccctgttccgccaccaccactggagccgcgctgcactggtctacagcgacgacaagctggagcggaactgctacttcaccctcgagggggtccacgaggtcttccaggaggagggtttgcacacgtccatctacagtttcgacgagaccaaagacttggatctggaagacatcgtgcgcaatatccaggccagtgagagagtggtgatcatgtgtgcgagcagtgacaccatccggagcatcatgctggtggcgcacaggcatggcatgaccagtggagactacgccttcttcaacattgagctcttcaacagctcttcctatggagatggctcatggaagagaggagacaaacacgactttgaagctaagcaagcatactcgtccctccagacagtcactctactgaggacagtgaaacctgagtttgagaagttttccatggaggtgaaaagttcagttgagaaacaagggctcaatatggaggattacgttaacatgtttgttgaaggattccacgatgccatcctcctctacgtcttggctctacatgaagtactcagagctggttacagcaaaaaggatggagggaaaattatacagcagacttggaacagaacatttgaaggtatcgccgggcaggtgtccatagatgccaacggagaccgatatggggatttctctgtgattgccatgactgatgtggaggcgggcacccaggaggttattggtgattattttggaaaagaaggtcgttttgaaatgcggccgaatgtcaaatatccttggggccctttaaaactgagaatagatgaaaaccgaattgtagagcatacaaacagctctccctgcaaatcatcaggtggcctagaagaatcggcagtgacaggaattgtcgtgggggctttactaggagctggcttgctaatggccttctactttttcaggaagaaatacagaataaccattgagaggcgaacccagcaagaagaaagtaaccttggaaaacatcgggaattacgggaagattccatcagatcccatttttcagtagcttaaaggaagccccccactttttttttttctgcctgagattctttaaggagatagacgggttgaaagacatcaatgaaacagaaggggcgttcttgaagaattcataattttaagcagttagtaatttcattttaaaatttctgtagaagctcaggaattatgattaatcaccatctgcctccaggcctttcatctcatgacaaacaaatataataatgatatcgtgtcactctgttaaatgttcatactgtttcaagcccatatgattagatttatgtttttaaaatctgttgtctccatatcttgatggcttttgggagcatttcacacaaggatataaaatgcggttttcttaaatgaaatgttttgtagctagaataaaatcatttttacaagtacagcattcttggaaagaatttaacacccaaaaaggggaaaatgtaatgaaaaatctcaaggttggaaatacagccttactctctctagagctggaggacaggtttgtggttgaggacttctctgtccgatgtctacattcaggttctgacttcatatcttgaaaaaggatttcctccctgtctttttcagtgtctcataaacgctactctggattgttgtaaatattagtgagatgggaggatttacagaagaaaagcaagtcaaaaatatttcctttttgatgtaaaaaaaaaaagccctatttcgcactaacattttattttacaagtattttaatcttatattttggtattagaaaaatttgtctattttttcattttgaagattaaatgttgcttacattttaaaagcatgggtgaagtgtacaacaaaccaataatgataaaaaatacttctctttttctccctgtttccctttttcccttggccacagccaaatgctaattgctgctttaattacagagatgtgtaaatgtattcagattacaaactctacaggaatacatcaacattttaactcttttgcgtttttactgtttaactgttttaaatgcaagttattttagggtgacactccttccagttctggccagatcatgagtttcaagatcaagagtaaaaagttattagaattaaacagttttataaagggaggcagcccttttccctcaagaacaactttgttgagagttactacttgacagcaagcacagaaatgacaaatttaaaacttttacacatggcatttaccaaaattcccagtgattattttgtttaaaagagggaacctaaatatctactctattccctttcagttaactccacagaactttgtaggcatccatgaatacctgtaatagtgggttaggtgtggagataaggaatttggacaaagttgagtaagtttttactgggtatctgctttgcacccagtagtctgcaacatgagtttaaactcaggttactactttcacttatactttatggagaagatagacagtgagggaggaatgggaagctgtcatgagagtgcaccgtcttggaattacataactggggtctttcctcaataacattttgagcatctgaaaaatagtttaaaaaattgtcttaatatctattaaaaggcatgtctagtgaggaaacaggagagtctgagcaatcccttggtggcgatgaaggtggtagttcacacaagtaacagtggaggcaaaggtaagcgcaagctgcctgtcccagatgctggcccatgtgtgagtgcttccctggagaagtccgcttctgttgctcccacctgagtcacagttaacagattatttctgtgtgaggcacatttcccttctgttgtttaagaaatgggagctgggaggcagctgagagggcgtgataaaagaattaagtgtgatcaactgaaacaactatgttgtagttctccatgctggatgcaaaggaaaaagtgtcgaattccaaaaaggatggaagaagaaggcaagaagggcaaactccagaagttctagtgcaggaagagagtttgagaagtaaaatccaggcaagcaaagcgttgtaccacttgggactccccaaagtgaaacagcaaggaaggattgtgtccatcttacttacttgaattggagagcttgtttctctctcatttttatttttcaatgatgttttctttatattttagagatattcattttctcttatcttgtgcttgtaaaaagcatttacatttcaagtctatgtgcttattacaggggaaaaataatctacctggttgcagtctttgagtataaacatttctaacctttttaaaacttctatagcagcccattaacactaacatttttagagcaaatatattctattttaacttcaggtagaggaatagtcctaaacttaatatgatagctctagataagatcttagagataagtgagcatttagtattctaaaagtggcagaacaaatcatgaggtttctggatgctataccaatttaaaatcaattcttatgttaatattgattgcttatttacatgtcagtcatctactttttttctttgaaatctgcatatgggttacaaaaactctgttaggttttgaaaattccattaagttggaaaccttggttaaaaatgtaggtgcctggcccatggttaccctggattcaggtctctcatgattatatttggggatttacgttcctaactgctaagcaacatctttgacaactagtaattcatactctactagtagtcacatgtcatatagtaaaataaatagggctttagttcttaagtaattctataggattttaccctgaaatccagggtgttcagatttcaaaaaggataatttatcagtattttctcatccagtcaaacttcagctgacattgatacaggtcaaaatgcgtagatgctttttggtgttggaaataagtgtctgtcttatggtcatcattgtcttcttagatttttgggtaggggggccaggtagggggagactcagaaataaaagcgttccccagataacttcaatctggaaagaattttttgtatagagtccatctctccctcaagactgaccacaggtttcatgagaaggtccctgaaaacatcacatttctctgaagaaccatcaacttgtcttttcttgaaccacaggaatggttctacagaccctactataattcttcacatttcagaacccatgtttaatggagggaagagagaaatgcatgggaaaagaacacctccttttctcctttctcttaaattcaaagacgtttgctttggaatgccctcacttctccctattcacaggcttctaaaatcattaatttactcaaggcacatgtgccttctttgccccaaatgcatcactttccttttagttatggctgattttgggtgtgtgtgtgtaagacatgcagtcaacaatgagatgaaggccattgcatagatctcatgcagatagtgatggattcagaaagtaggttccagtggcgtcactaccttcttgtaagccagtatacactggctatttgtggaaatctctttgggagatcaaatagagtattatgccactgtgagtgtttataaactggaaggaacaagtacctgtgtttcttgggacacaaagcactcagatcctgagtggatgcagacatgagagtaaatgtcagcccaaattaggcccctcgacctacagacatttcatgggttttatttaatcacaccccatggtttggggctacatgaggaagttggtaatgagctgaatttcttattcagtggaaaaaactgaaactgtctaaaaacacgggatatattttagaggcaattgtggaagcggagagaatgagatgatggtgttcagagggaccagcttctttttcagttgtctttagaactcaagaataatcaataatttagtgccccttcaacagccatactcagcaagaagaatcagaagcttgatcctctaacagaaatagaagagggtagctttgcccattgccactgtctttactgccccttctgcccctccacccacatccacattcagcatcactccaaggatgtgtcagcatcttgcccatgcaggtagaaatttgtgagtaggcctccatacttcctcgggggaagaaagagaaactagtgctggttttaagaatgtagctggcttttcatcagaacccttatgctaacctgaccacacttgctctcggggaagttcaagcctgtgatgtgcataaactccaacaagcctggctttggtgttcagcatgcacattccataaatatctcttgcaggcataccccacagctagactgcaggattaaaataacttccaaaaggtgctggattggagtttgttcaaatttctcattaaccactaatgttaattcataccaaatgcaaagtattctaaaccagctgatgctgtcagtgttcaagttttaagtgacttcaaacacaatggaagtgtttcaatgggagccagatctcatgagtaaaaatccattttataatagctctgtgatatatcagtgggagatgattcataggggagagatttgaacaagcagaattaagtgttagcaaaaatgctgcattgctttgattcatgtttaaagacctaaatttctatgcacaaggaataaagggcctacttaccaagtgtaaatcacaacataggctaccaaaatatttcttatttgctaggagaacaaagctgtcacggtgcatgatagttggacagagatggctaaaaaagaggcaaattcagatttggaaacagggtggcctcttcattatttattgccaagatctgaaaatcttcaacatcttataagacaacaatgaagtagcccctgaacagcatggagttgctgtgagtttgttcgttgcagacctttgtgttgggtcctgggaatctgagctttgttccctgtgcatggtggataattgaaaccaagaggacatgggatagaccttgtgacagaccaattctgtgacccctgtcttctgggtcacattattcattgttgatttaaatacaggactaccaaacagtacaaatctatcatgagtctggtagaaaagtaaaagtaaaagctgcacacgttacatactgtttattgttctaatgtacaactaactatttgcatataatgtgatttaatttattgctgttttgtgtagaaaaggagaactaatgactgtggatataacccatgttttgtataatatattttatttcttgtgcgaactggtcatttaaaatatctacttcatttgatgtttggatataaatgtgtatgtgtccttgtaaatgtttctatcaagcaagaatgccacgtactcagagtataacaatgtgttctcattaaaaaatacatccc

SEQ ID NO: 5469 - DNA, 1361 bp, Homo sapiens
atgccggcgatcgcggtgttggcggcggccgccgcggcgtggtgcttcctccaagtcgagagccggcacctggacgcgctcgccggaggcgcgggccccaaccacggcaatttcctagacaatgaccagtggctgagcaccgtctcccagtacgaccgggacaagtactggaaccgctttcgagacgatgattatttcagaaactggaatcccaacaagccctttgaccaagccctggacccatccaaggacccctgcctgaaggtaaaatgcagccctcacaaagtgtgtgtgacccaggactaccagaccgccctgtgtgtcagccgcaagcacctgctccccaggcaaaagaaggggaacgtggcccagaaacactgggttggaccttcgaatttggtcaagtgcaagccctgtcccgtggcacagtcagccatggtctgcggctcagatggccactcctacacatccaagtgcaaattggagttccatgcttgttctactggcaaaagcctcgccaccctctgtgatgggccctgtccctgtctcccagagcctgagccaccaaagcacaaggcagaaaggagtgcctgcacagacaaggagttgcggaaccttgcctcccggctgaaggattggtttggagctctccacgaggatgcgaacagagtcatcaagcccaccagctccaacacagcccaaggcaggtttgacactagcatcctgcccatctgcaaggactccctgggctggatgttcaacaagttggacatgaactatgacctcctgcttgacccttcagagatcaatgccatctacctggataagtacgagccctgtatcaagcctcttttcaactcgtgtgactccttcaaggatggcaagctttctaacaatgagtggtgctactgcttccagaagcctggaggtctcccttgccagaatgaaatgaacagaattcagaagctgagtaaggggaaaagcctgttgggggccttcatacctcggtgtaatgaggagggctattacaaagccacacagtgccacggcagcacggggcagtgctggtgtgtggacaaatatgggaatgagttggctggctccaggaaacagggtgctgtgagctgtgaagaggagcaggaaacctcaggggattttggcagtggtgggtccgtggtcctgctggatgacctagaatatgaacgggagctgggaccaaaggacaaagaggggaagctgagggtgcacacccgagccgtgacagaggatgatgaggatgaggatgatgacaaagaggatgaggtcgggtacatatggtagtgcccacaagaaagaggacacaagttttgcacaaaattgca

SEQ ID NO: 5470 - DNA, 3140 bp, Homo sapiens
ataactctaatcacttttttcatgttctccttgagtgaaggatgaggaaattgaaagcagagtatgcaccttttattaggagattcaaactgcatcctactggattagcctcaaaagtcctaaaatacaaagacatccatctgacagatcactgaggggaggacttgtttttctgttttagaatagtttccgattaaactttttagctcaagaagaaaagaagctagttatttctcacccaggagtggatttgtggtttggcttcaccatggcttcctgccgtgcctggaaccttagggtgctggtggctgtcgtgtgtggactactgactggcatcattttgggactgggcatctggaggattgtgatcaggatccaaagaggaaaatctacttcctcatcaagcacccctacagagttctgcaggaatggtggaacctgggaaaatggcagatgtatttgtacagaagagtggaaaggactgagatgtacaattgctaatttttgtgaaaatagtacctatatgggttttacttttgccagaatcccagtgggcagatatggaccatccttgcaaacatgtggcaaggatactccaaatgcgggcaatccaatggcagtccggttgtgcagtctctctctatatggagagatagaattacaaaaagtgacaataggaaattgcaatgaaaatctggaaaccctggaaaagcaggtaaaggatgtcacagcaccacttaataacatttcttctgaagtccagattttaacatctgatgccaataaattaactgctgagaacatcactagtgctacgcgagtggttggacagatattcaacacttccagaaatgcttcacctgaggcaaagaaagttgccatagtaacagtgagtcaactcctagatgccagtgaagatgcttttcaaagagttgctgctactgctaatgatgatgcccttacaacgcttattgagcaaatggagacttattccttgtctttgggtaatcaatcagtggtggaacctaacatagcaatacagtcagcaaatttctcttcagaaaatgcggtggggccttcaaatgttcgcttctctgtgcagaaaggagctagcagttctctagtttctagttcaacatttatacatacaaatgtggatggccttaacccagatgcacagactgagcttcaggtcttgcttaatatgacgaaaaattacaccaagacatgcggctttgtagtttatcaaaatgacaagcttttccaatcaaaaacttttacagctaaatcggattttagtcaaaaaattatctcaagcaaaactgatgaaaatgagcaagatcagagtgcttctgttgacatggtctttagtccaaagtacaaccaaaaagaatttcaactctattcctatgcctgtgtctattggaatttgtcagcgaaggactgggacacatatggctgtcaaaaagacaagggcactgatggattcctgcgctgccgctgcaaccatactactaattttgctgtattaatgactttcaaaaaggattatcaatatcccaaatcacttgacatattatccaacgttggatgtgcactgtctgttactggtctggctctcacagttatatttcagattgtcaccaggaaagtcagaaaaacctcagtaacctgggttttggtcaatctgtgcatatcaatgttgattttcaacctcctctttgtgtttggaattgaaaactccaataagaacttgcagacaagtgatggtgacatcaataatattgactttgacaataatgacatacccaggacagacaccattaacatcccgaatcccatgtgcactgcgattgccgccttactgcactattttctgttagtgacatttacctggaacgcactcagcgctgcacagctctattaccttctaataaggaccatgaagcctcttcctcggcatttcattcttttcatctcattaattggatggggagtcccagctatagtagtggctataacagtgggagttatttattctcagaatggaaataatccacagtgggaattagactaccggcaagagaaaatctgctggctggcaattccagaacccaatggtgttataaaaagtccgctgttgtggtcattcatcgtacctgtaaccattatcctcatcagcaatgttgttatgtttattacaatctcgatcaaagtgctgtggaagaataaccagaacctgacaagcacaaaaaaagtttcatccatgaagaagattgttagcacattatctgttgcagttgtttttggaattacctggattctagcatacctgatgctagttaatgatgatagcatcaggatcgtcttcagctacatattctgccttttcaacactacacagggattgcaaatttttatcctgtacactgttagaacaaaagtcttccagagtgaagcttccaaagtgttgatgttgctatcgtctattgggagaaggaagtcattgccttcagtgacgcggccgaggctgcgtgtaaagatgtataatttcctcaggtcattgccaaccttacatgaacgctttaggctactggaaacctctccgagtactgaggaaatcacactctctgaaagtgacaatgcaaaggaaagcatctagacagtaaaacttacctgttgtggtctttttaatcacctcgtttgagttttatctgtttctctcctttatttcccagtcctctcagaaagtcttcctcaatgtattttgctcaggattaagaattagataaaacctgttgtttattattattcggcataatggacttggtagtttttctatttttcaatagatttgtacttgaataaggtgaagaatttcacacaacatacaagagtaccattgttccttatatcgttaaatctttgtgacacactttgacaaaaatgtagaacctataacaaattcttttacaagttactataaaggacacaaagagaaaactttaccttccagaacaaaatgactcctgatgaacagtgtgtggggatttgcttgtatgtattaaacttttgacctctgaatattttacagtcgtatgtgcttgtacttttatttccaatgaagaatttggcaccaa

SEQ ID NO: 5471 - DNA, 2032 bp, Homo sapiens
agatttgcataaaaaaggccaagaaaactctggctgtgccccagcaacggctcattctgctcccccgggtcggagccccccggagctgcgcgcgggcttgcagcgcctcgcccgcgctgtcctcccggtgtcccgcttctccgcgccccagccgccggctgccagcttttcggggccccgagtcgcacccagcgaagagagcgggcccgggacaagctcgaactccggccgcctcgcccttccccggctccgctccctctgccccctcggggtcgcgcgcccacgatgctgcagggccctggctcgctgctgctgctcttcctcgcctcgcactgctgcctgggctcggcgcgcgggctcttcctctttggccagcccgacttctcctacaagcgcagcaattgcaagcccatccctgccaacctgcagctgtgccacggcatcgaataccagaacatgcggctgcccaacctgctgggccacgagaccatgaaggaggtgctggagcaggccggcgcttggatcccgctggtcatgaagcagtgccacccggacaccaagaagttcctgtgctcgctcttcgcccccgtctgcctcgatgacctagacgagaccatccagccatgccactcgctctgcgtgcaggtgaaggaccgctgcgccccggtcatgtccgccttcggcttcccctggcccgacatgcttgagtgcgaccgtttcccccaggacaacgacctttgcatccccctcgctagcagcgaccacctcctgccagccaccgaggaagctccaaaggtatgtgaagcctgcaaaaataaaaatgatgatgacaacgacataatggaaacgctttgtaaaaatgattttgcactgaaaataaaagtgaaggagataacctacatcaaccgagataccaaaatcatcctggagaccaagagcaagaccatttacaagctgaacggtgtgtccgaaagggacctgaagaaatcggtgctgtggctcaaagacagcttgcagtgcacctgtgaggagatgaacgacatcaacgcgccctatctggtcatgggacagaaacagggtggggagctggtgatcacctcggtgaagcggtggcagaaggggcagagagagttcaagcgcatctcccgcagcatccgcaagctgcagtgctagtcccggcatcctgatggctccgacaggcctgctccagagcacggctgaccatttctgctccgggatctcagctcccgttccccaagcacactcctagctgctccagtctcagcctgggcagcttccccctgccttttgcacgtttgcatccccagcatttcctgagttataaggccacaggagtggatagctgttttcacctaaaggaaaagcccacccgaatcttgtagaaatattcaaactaataaaatcatgaatatttttatgaagtttaaaaatagctcactttaaagctagttttgaataggtgcaactgtgacttgggtctggttggttgttgtttgttgttttgagtcagctgattttcacttcccactgaggttgtcataacatgcaaattgcttcaattttctctgtggcccaaacttgtgggtcacaaaccctgttgagataaagctggctgttatctcaacatcttcatcagctccagactgagactcagtgtctaagtcttacaacaattcatcattttataccttcaatgggaacttaaactgttacatgtatcacattccagctacaatacttccatttattagaagcacattaaccatttctatagcatgatttcttcaagtaaaaggcaaaagatataaattttataattgacttgagtactttaagccttgtttaaaacatttcttacttaacttttgcaaattaaacccattgtagcttacctgtaatatacatagtagtttacctttaaaagttgtaaaaatattgctttaaccaacactgtaaatatttcagataaacattatattcttgtatataaactttacatcctgttttacct

SEQ ID NO: 5472 - DNA, 4661 bp, Homo sapiens
accccgtctcggccatgggcgagcaccccagcccgggccccgcggtggccgcctgcgccgaggcggagcgcatcgaggagctggaacccgaggccgaggagcggctgcccgcggcgccggaggaccactggaaagtcctgtttgatcagtttgaccctgggaacacaggctacattagcacaggcaagttccggagtcttctggagagccacagctccaagctggacccgcacaaaagggaggtcctcctggctcttgccgacagccacgcggatgggcagatcggctaccaggattttgtcagcctaatgagcaacaagcgttccaacagcttccgccaagccatcctgcagggcaaccgcaggctaagcagcaaggccctgctggaggagaaggggctgagcctctcgcagcgacttatccgccatgtggcctatgagaccctgccccgggaaattgaccgcaagtggtactatgacagctacacctgctgccccccaccctggttcatgatcacagtcacgctgctggaggttgcctttttcctctacaatggggtgtcactaggtcaatttgtactgcaggtaactcatccacgttacttgaagaactccctggtttaccacccacagctgcgagcacaggtttggcgctacctgacatacatcttcatgcatgcagggatagaacacctgggactcaatgtggtgctgcagctgctggtgggggtgcccctggagatggtgcatggagccacccgaattgggcttgtctacgtggccggtgttgtggcagggtccttggcagtgtctgtggctgacatgaccgctccagtcgtgggctcttctggaggggtgtatgctctcgtctctgcccatctggccaacattgtcatgaactggtcaggcatgaagtgccagttcaagctgctgcggatggctgtggcccttatctgtatgagcatggagtttgggcgggccgtgtggctccgcttccacccgtcggcctatcccccgtgccctcacccaagctttgtggcgcacttgggtggcgtggccgtgggcatcaccctgggcgtggtggtcctgaggaactacgagcagaggctccaggaccagtcactgtggtggatttttgtggccatgtacaccgtcttcgtgctgttcgctgtcttctggaacatctttgcctacaccctgctggacttaaagctgccgcctcccccctgagggctggaggcccaaggtcggggaggggagggaaaagcagcacccacagggagcgcctgcgaggtttcttctcatcaccagctcagctaggccgggcagacaaggacagaagactctgggccactgtaatgtttgtgtttagatttggacacacagtggagacccttttctgaaaggcatctggcggaggagttgatgtggctgctgtcgtttttctcggctgctctgatgacatcgggccagggtgaaggtctggggtggggtgtgagagtggccctccctcacctgggctgggcttcttccatggggccagggggtgccccctcactgctgcggattgagcagcagcttcttcctcctcctctaccctcagagaccctaagagacatgggaaggctcgaaggttgttgcgtccaggcatggcccctctctagctcagaaataattgcaggccatgtggtgtctccttgacacctgctgtgtctggggctccagtaagaagagggcctactggacatgtcagctgtgacctggctgaaaccagggtgccctcctgggctggttggtgtgcaccggggcatgatctgttgtgcctgggttgggcagagcagggagcctgtaggctctaggacccctcttgtgctgggggtacccagtgagagggacccatgcagggggaataaacttcattccaagttccaccctggagaagacagacccaggaccagcttcagacttctccctccctttcttccaggatattggcatctcacacgggtgccccagcctccatgcccagccttgttttagggtctttttctttccttttgctgccctgacactactttgtgcctctctttggttatggagacagtgttttgaaacattcatgcgtgtgtgtgtgtgtgtgcgtatatgtgtgtatgtgatgggaaaggtaactgaggcacgacagcgcctgcagagaaggcatggaggatgcagggggcccatgtgggcatccgtgagaggtggcagaccgtggtgtgctgtggttgctgaatgtccttgctttgacaaagcctgcccccttccttcccatctcctgtcccttccacacctgcccctgagcatcactgaccggtggcagaatggccctgctggagggagagctcaagccctccaaggatccctggatgctgaggtttgccaggttcagctcttgtttccgtctgagatggccttcatatccaaaaaggttccatcctatctcccttaggagagaaagagctttgggggcgcaagagaggctggggtaggaatgttgaggccatgtgtccatttaagttagggggacaggaggctacaggaagaggaattccagtttagttggaaaactttgcctcaggagaattgttgggtgcatggatgaacctcagagggagggcagccagtagcctcggaggcttggatgcgggagagaacatggtggttatcaaatccaccccaccccattacacaggtgagaaaacaagatggagggaatgaccctcctaacaggagctggtgcaggccccgaatggagggcatgaggatgacctttgacaaaagatgacactccctttatcgtgctcttggaattctcaaccactgacagcccagaagaacaaagaacgccaggcctgggaggaggcaggggggctgggcgtgtccagaaacaggggcaggagtgtgggaacggtcttcctccagcctggtgcccatcctggcccttgagtgtagcagggtccagggtcagtcaggccaggcatttggggtcttgggccacagtggcttcccatcctggtgactacatgtaaatgggctcactcactcactggcaggcgaggcccagccataccgcatcttggcccactgctaaatagattgccctggcctcatccacatatgtagttccctaggtcctgctcccctgcaccagtgccatgctgagggccgcagcctgtggcactgtgggcccacgcctttggcggtgttgcgtcagcctggggcgtcttgtgtgtgccctgcccaccgttctctgccctagtgatagaaagatgtagatggaagtcagtgcctcagaggaggaggctctgaggctgtggagctgggctcagggaagaccaggggaggatgcagaaggagtcaggacattgctgcctctgcctgggctgcagccgcactaagctgagcgatgaggtcctttcctggagggatggagaatcccctccagattcctgtcctggcccctggggattctgtggtgtgggtggaatgagcagagtgccacctctgtctggtatgacctggagagggggcttcctctcttaggggtgagaaagcattgaactagaagattctagaaatccctcatagaagcactcagctccctcggggactcccagggaagcttgttactgagaaggacagtggaggcggaatcgtgtctcccaccatgttaagtgtgtcctctgctgccaaggaccctcgtctacaccttagaccaccagccccagctgttctctgtcagcacacccacctccatcccctctcccaaccatgacttccaagcggggccacagggtggggtcatagggtcacttcacctgacccaggcctctccccaggtcaggaggcagctgtctggtcagaggggttctctttgtggcatctggctttctcctcagcaggtcccaccaccctctcagcagcacttccccatggccaaggctggccgtgtcctctgtgcctctttccttgtctgaggtggctgccagcccagggggtggtgtgtaaatcttcaggctggtggaggtaggttggccttttatccacaggatacagaaactgaaagctggggaatccccaaacagcagccatagactcactggctctcattaaacgggagaggaatcacagaaactggggaagggaaaacaaaccttcaaaggagaaatttcgctttaatgacaccattcatcattcgttttttaattaggaaaagctccctaatgaggctcttttgccagctaataggactctcgatttccatgagaaccattcttgcccagaggattaggggagctgttgctcaccacaccaggatcttcccccagcgtccaatttaatttgcaaatacgtaatgcagattccctgggtgccgtgaaagcctttcctggcatcattcatgttgctccccgtgctggctggaaagcacggttctcctctgccttaaaaacagtgcccaacagtgaactgcccctccgaggacttgagtaagtggaaaaaacaaaacacagactgcaatgtttgtttctaagtatttttgtattgtgtacattctgtatatttttgttgtaacatattatttgagcacagattccattaaatattttttttctttttccaagc

SEQ ID NO: 5473 - DNA, 5249 bp, Homo sapiens
ggacccgcctcagccaatccgctgctgccggcgtcgggtgcgctcggcctcgcccgcggccctccttccccggctcccgctcgccgctcgttcactccaccgccgccgccgccgccgccgctgccgctgccgctgccgcacctccgtagctgactcggtactctctgaagatggcagaagctcaccaagctgtggcctttcagttcacggtcactccggacgggattgacctgcggctgagccatgaagctcttagacaaatctatctctctggacttcattcctggaaaaagaagttcatcagattcaagaacggcatcatcactggcgtgtacccggcaagcccctccagttggcttatcgtggtggtgggcgtgatgacaacgatgtacgccaagatcgacccctcgttaggaataattgcaaaaatcaatcggactctggaaacggccaactgcatgtccagccagacgaagaacgtggtcagcggcgtgctgtttggcaccggcctgtgggtggccctcatcgtcaccatgcgctactccctgaaagtgctgctctcctaccacgggtggatgttcactgagcacggcaagatgagtcgtgccaccaagatctggatgggtatggtcaagatcttttcaggccgaaaacccatgttgtacagcttccagacatcgctgcctcgcctgccggtcccggctgtcaaagacactgtgaacaggtatctacagtcggtgaggcctcttatgaaggaagaagacttcaaacggatgacagcacttgctcaagattttgctgtcggtcttggaccaagattacagtggtatttgaagttaaaatcctggtgggctacaaattacgtgagcgactggtgggaggagtacatctacctccgaggacgagggccgctcatggtgaacagcaactattatgccatggatctgctgtatatccttccaactcacattcaggcagcaagagccggcaacgccatccatgccatcctgctttacaggcgcaaactggaccgggaggaaatcaaaccaattcgtcttttgggatccacgattccactctgctccgctcagtgggagcggatgtttaatacttcccggatcccaggagaggagacagacaccatccagcacatgagagacagcaagcacatcgtcgtgtaccatcgaggacgctacttcaaggtctggctctaccatgatgggcggctgctgaagccccgggagatggagcagcagatgcagaggatcctggacaatacctcggagcctcagcccggggaggccaggctggcagccctcaccgcaggagacagagttccctgggccaggtgtcgtcaggcctattttggacgtgggaaaaataagcagtctcttgatgctgtggagaaagcagcgttctttgtgacgttagatgaaactgaagaaggatacagaagtgaagacccggatacgtcaatggacagctacgccaaatctctactacacggccgatgttacgacaggtggtttgacaagtcgttcacgtttgttgtcttcaaaaacgggaagatgggcctcaacgctgaacactcctgggcagatgcgccgatcgtggcccacctttgggagtacgtcatgtccattgacagcctccagctgggctatgcggaggatgggcactgcaaaggcgacatcaatccgaacattccgtaccccaccaggctgcagtgggacatcccgggggaatgtcaagaggttatagagacctccctgaacaccgcaaatcttctggcaaacgacgtggatttccattccttcccattcgtagcctttggtaaaggaatcatcaagaaatgtcgcacgagcccagacgcctttgtgcagctggccctccagctggcgcactacaaggacatgggcaagttttgcctcacatacgaggcctccatgacccggctcttccgagaggggaggacggagaccgtgcgctcctgcaccactgagtcatgcgacttcgtgcgggccatggtggacccggcccagacggtggaacagaggctgaagttgttcaagttggcgtctgagaagcatcagcatatgtatcgcctcgccatgaccggctctgggatcgatcgtcacctcttctgcctttacgtggtgtctaaatatctcgctgtggagtcccctttccttaaggaagttttatctgagccttggagattatcaacaagccagacccctcagcagcaagtggagctgtttgacttggagaataacccagagtacgtgtccagcggagggggctttggaccggttgctgatgacggctatggtgtgtcgtacatccttgtgggagagaacctcatcaatttccacatttcttccaagttctcttgccctgagacggattctcatcgctttggaaggcacctgaaagaagcaatgactgacatcatcactttgtttggtctcagttctaattccaaaaagtaattccactggagctgctgggaaggaaaacgagctcttctgatgcaaaccaaatgaaaaataggcattaatcctgaccttagctcgggatgaaacactgctcttaaaaaaactcagttttccttccagaaaatgtgggtgtttttttttcctagaacagtatctctcccctgtgaagcataaccccactacttccagacttgccctcccttgggggacatctgataaagtctcccctgatgtctccgcatcggcttggatttattaagggatgcaaatcttgttgagttaatgaaggaattagtagggttgtggcttcacacacagtggaatggaaatggtgtgctttctcagtggcaaccgaaggcctagtgcttaagggcatttagcatcatccaagcagggtaaacttttgttttgttaaaagaaaaatgtgttattcaagttggtgtccccagttgtagctaacacatctggaatgcactaaccaaaatgctgtgctttggagacctgcttttgtcaccgtgggtaaccgttcccgtctggtccagtagcctgtgtttgcctctccacatttgaagcaagcaggatgcaaggtcttcagttttactgaccttgtatgtcttcaagtcttcacaacccagtgccttaaaaatgaaaggccctaaatgtaagggagatggagagaaagatttattttgtagagtctttgggtggaattgtgggtatactgttcccttcacaattgactgagtatggataaccgtacataagcatttgctacaccccaccagccccctccccctcagaaacaccagttccttcccaagggcagctgtgccagactcccctcccgggactgccttcttgtcatcataagcaacaaaagaaataacaggcacatgtcataaaaggggagcaagggccgtgatggtcagataattcactcaagaataaaacatgacacgtgcctcaggaggatctctttcccaaagtgacagcaaggagggcagggcatcggccaccaagcggggactagcaagtgaggaaggggagggcagcccaccgtggtgaggagagagtggctccacgaccccaagggatggccttctcctcccacccggtgaggggaaagactcaccagagggtgatggagacagtatgccggctcaccttggtgaccagccaagatgtctcaagtgacagtgctaggtgttcacccagcctgtccttcagataggagtgccttcacgaaagcgtctcatggaccacaaagcaattatgcactgagtcatcttcagtatttaatgcaaaaatgaagcatcatggaatgaaattcccactgtctgtcatgacaagcttagctgtccattgttttaaattgtgtatttatttttttgaccacttggttctagttgggcctgactccttcagagtgctgcaccccgatagtacaacagcgatggctgaactgttggagtcgatggaaggtgcttgccggagaacacgtgcctttttttttttttttttttttgagatggagtttcactcttgttgcccaggctggagtgcagtggtgcaatctcggctcactgcagcatctgccttgcaggttcaagcgattctcctgtctcagcctcccaagtagctgggattacacgcccaacaccatgccctgctaatttttgtatttttagtagagacggggtttcatcatattggtcaggctggtctcgaactcctgacctcaggtgatccacctgcctcagcctcccaaagtgctgggattacaggcatgagccaccatgcgcggcccacatgcatgttttatgtatgtatacttcatgatgtaaaaatcccacctttatgggccaaagattttttttctcctgaaagcaagaaaaaatgaaaacaaaagacaaaaaaaaaaaaaaaagcgtccaggcgcggtggctcatgcgtgtaatcccagcactttgggaggccaaggcgggcggatcacgaggtcaggagatggagaccatcctggctaacacggtgaaaccccgtctctactaaaaattcaaaaaatgagccgggcgtggtggcgggcgcctgtagtcccagctactcaggaggctgaggcaggagaatggcgtgaacccgggaggcggagcttgcagtgagccgagatcgctccactgcactccagcctgggcgacagagcgagactccgtctaaaaaaaaaagcaaaaacaaaccaacaacaaaagcccctgactgtccgtcaagcaggcagcggggatgtagctctctctgccctgggcaagaatagcacttcccgttaaaagccagcagccggcgtcagtccctatcagagccagctagatcatgcactgttgaccactgagcaatctgtgttacactagagttcacagggcattttgagtgtagacgtgagtgcttaaacatatttgggtttctctctcaggttttaaatgtttcaaatgtaattgttgctcatcagtgcagttatcaatgcaattttatattccttgaggggagaaagaggggtcttattgtacatgtccaaggggggtgataagagtattatctgtttaatttaattggaacaaaccattgtcttaacgcagccatggtttgaatttgttatcttgggctgaccggtgcatgtaaatacagtatgctctttggatgtaaatcttagaaatgcagtgtgaatgtaggttatcattaataaaacattaaccccagtctact

SEQ ID NO: 5474 - DNA, 3177 bp, Homo sapiens; identical to SEQ ID NO: 130

SEQ ID NO: 5475 - DNA, 1860 bp, Homo sapiens
ggtcgggacgccgggctaggggcgcgtcatgtggccgctcacggtcccgccgccgctgctgctgctgctgtgctcaggcctggccggacagactctcttccagaacccagaagagggctggcagctgtacacctcagcccaggcccctgacgggaaatgcatctgcacggccgtgatcccagcgcagagtacctgctctcgagatggcaggagtcgggagctgcggcaactgatggagaaggtccagaacgtctcccagtccatggaggtccttgagttgcggacgtatcgcgacctccagtatgtacgcggcatggagaccctcatgcggagcctggatgcgcggctccgggcagctgatgggtccctctcggccaagagcttccaggagctgaaggacaggatgacggaactgttgcccctgagctcggtcctggagcagtacaaggcagacacgcggaccattgtacgcttgcgggaggaggtgaggaatctctccggcagtctggcggccattcaggaggagatgggtgcctacgggtatgaggacctgcagcaacgggtgatggccctggaggcccggctccacgcctgcgcccagaagctgggctgtgggaagctgaccggggtcagtaaccccatcaccgttcgggccatggggtcccgcttcggctcctggatgactgacacgatggcccccagtgcggatagccgggtctggtacatggatggctattacaaaggccgccgggtcctggagttccgtaccctgggagacttcatcaaaggccagaactttatccagcacctgctgccccagccgtgggcgggcacgggccacgtggtgtacaacggctccctgttctataacaagtaccagagcaacgtggtggtcaaataccacttccgctcgcgctctgtgctggtgcagaggagcctcccgggcgccggttacaacaacaccttcccctactcctggggcggcttctccgacatggacttcatggtggacgagagcgggctctgggctgtgtacaccaccaaccagaacgcgggcaacatcgtggtcagccggctggacccgcacaccctcgaggtcatgcggtcctgggacaccggctaccccaagcgcagcgctggcgaggccttcatgatctgcggtgtgctctacgtgaccaactcccacctggctggggccaaggtctacttcgcctattttaccaacacgtccagttacgagtacacggacgtgcccttccacaaccagtattcccacatctcgatgctggattacaacccccgggagcgcgccctctatacctggaacaacggccaccaggtgctctacaatgtcaccctgtttcacgtcatcagcacctctggggacccctgagccaatgctgtggctcgggctgctgcctggggggcctctgggggctgggggcccttttcattctgcctgtgtccctcaagggtgatctctctgtctctgtcacgccctttctccccgcctttttgctgggcttttgttctctgcctatgtatttctgtctattttttcaatttcccctcttctcctttattgatctctgcttttaatacaccacttctttctttctgcctttttatggatgtctttttctttttatggctctggttctccagttctttccgtctctgcctctctctgtctctctctctctgtccttccacccctccctccttgcttcccacccattcctcatccctcactcccacccccacccccacccccaggagttgagtgcatggatctgtttctttttttatttacactttttctttccggtttgccggaataaacaggacctttgacatttg

SEQ ID NO: 5476 - DNA, 14876 bp, Homo sapiens
ggacggcctgggaaggcttcggctcctcggctgcggctccagcccggacggcgccgcgcaactttgccatccttctggcccagccccggctacaggaggaccccgcgggcaacgcgcggagttcctggcacttcccggcggtgtctcttgttgtctgcccggggaccgacttcgcatgctctcaggctgacctgtccaagcccgaacaccgggaccatgcactcagccgggactcccgggttatcctcgcgccggacaggcaactccaccagctttcaaccaggaccgccaccgccgccccggctgctgctgctgctgctgcttctcctgtcactggtaagccgcgtcccggcacagcccgctgccttcggcagggcgttgctgtcccctggtctcgcgggggctgcaggggtccctgctgaggaggccatagtgctggcgaaccgcggactccgggtgcctttcggccgtgaagtctggctggatcccctgcatgacctggtgttgcaggtgcagcccggggaccgctgcgcggtttcggtactagacaacgacgcactggcccagcgaccgggccgcctgagtcccaagcgcttcccgtgcgactttggccctggcgaggtgcgctactctcacctgggcgcgcgcagcccgtctcgggaccgcgtccggctgcagctgcgctatgacgcgcccggaggggcagtagtgctaccactggtactggaggtggaggtggtcttcacccagctggaggttgtgactcggaacttgcctctggtcgtggaagagctgctggggaccagcaatgccctggacgcgcggagcctggagttcgccttccagcccgagacagaggagtgccgcgtgggcatcctgtccggcttgggcgcgctgcctcgctatggagaactcctccactacccgcaggtccctggaggagccagagagggaggcgccccggagactctcctgatggactgcaaagctttccaggaactaggcgtgcgctatcgccacacagccgccagtcgctcaccaaacagggactggatacccatggtggtggagctgcgttcacgaggggctcctgtgggcagccctgctttgaaacgcgagcacttccaggttctggtgaggatccgaggaggggccgagaacactgcacccaagcccagtttcgtggccatgatgatgatggaggtggaccagtttgtactgacggccctgaccccagacatgctggcagccgaggatgctgagtctccctctgacctgttgatcttcaaccttacttctccattccagcctggccagggctacttggtgagcaccgatgatcgcagcctgcccctttcctccttcactcagagggatctgcggctcctgaagattgcctaccagcccccttctgaagactctgaccaggagcgcctctttgaactggaattggaggtagtggatctagaaggagcagcttcagacccttttgccttcatggtagtggtgaagcccatgaacacaatggctccggtggtcacccggaataccggtcttattctctatgagggtcagtctcggcccctcacaggccctgcaggcagtggtccgcaaaacttggtcatcagcgatgaggatgacctagaagcagtgcggctagaggtggtggctgggctccggcatggtcaccttgtcattctgggtgcttccagtggcagctctgctcccaagagctttacagtggctgagctggcagccggccaggtggtctaccagcatgatgacagagacggctcgctgagcgacaacctggtgcttcgcatggtggatggaggaggcaggcaccaggtacagtttctgttccccatcaccttagtgcctgtggatgaccagccacctgttctcaatgccaacacggggctgacactggcagagggtgaaacagtgcccatcctgcccctttccctgagtgcaactgacatggattcagatgattctctgctgctttttgtgctggagtcacccttcttaactacggggcatctgcttctccgccaaactcaccctccccatgagaagcaggaacttctcagaggcctttggaggaaggagggggcattttatgagcgaacagtgacagagtggcagcagcaggacataacagagggcaggctgttctatagacactctgggccccatagtcctgggccagtcacagaccagttcacatttagagtccaggataaccatgaccctcctaatcagtccgggctacagcggtttgtgattcgtatccatcctgtggatcgcctccctccggagctgggcagtggctgtccccttcgtatggtggtacaggaatcccagctcacaccactgaggaagaagtggctgcgctacactgacctggacacagatgaccgagaactacgttacacagtgactcagtcccccacagacacagacgaaaatcacctgccagccccactgggtaccttggtcttgactgacaacccctcagtcgtggtgacccattttacccaagcccagatcaaccatcataaaattgcttacagacccccgggtcaagaactgggcgtggctactcgagtggcccagttccagttccaggtggaagaccgagctgggaatgtggctccaggtacctttaccctttacttgcatcccgtggacaaccagccacctgagatcctcaacaccggcttcactattcaggagaagggtcaccacatcctgagtgagacagagttgcacgtgaatgatgtagacactgatgttgcccatatctctttcactctcactcaggcacccaaacatggccacatgagagtgtctggacagatcctgcatgtagggggtctcttccacttggaggacataaaacagggccgagtttcctatgcccataatggggacaagtccctgactgatagctgctccttggaagtcagtgacagacatcatgtggtgcccatcactctcagagtaaatgtccggccagtggatgatgaagtgcccatactgagccatcctactggcactctggagtcctatctagatgtcttagaaaatggggctactgaaatcactgccaatgttattaaggggaccaatgaggaaactgatgacttgatgttgactttcctcttggaagatccacctttgtatggggaaatcttggtcaatggcattccagcagagcagtttactcaaagggacatcttggagggctctgttgtatatacccacaccagtggtgagataggcctattgcctaaagcggattcttttaacctgagtctgtcagatatgtctcaagaatggagaattggtggcaatactatccaaggagttactatatgggtgaccatcctgcctgttgatagccaggccccagaaatctttgtaggtgaacagttgatagtaatggaaggtgataaaagtgttataacatcagtgcatataagtgctgaagatgtcgactccctgaatgatgacatcttgtgcactatagttattcagcctacttcaggttatgttgaaaacatttctccagcaccaggctctgagaaatcaagagcagggattgccataagtgctttcaacttgaaagatctcaggcagggccacataaactatgtccagagtgtccataaaggggtggaacctgtggaggaccgatttgtatttcgttgttctgatggcattaacttttcagagagacagttcttccccattgtaatcattcccaccaatgatgaacagccagagatgtttatgagagaatttatggtgatggaaggcatgagtctggtaattgatacacccattctcaatgctgctgatgctgatgttcccctggatgatttaactttcactattacccaattccccactcatggtcacatcatgaatcagctgataaatggcacggttttggtcgaaagcttcaccttggatcagatcatagagagttccagcattatttatgagcatgatgactccgagacccaggaagacagttttgtgattaaactaacagatgggaagcactctgtggaaaagacggtcctcattatagttatccctgttgatgatgagacgcccagaatgactatcaataatggactagaaatagaaattggggataccaagattatcaacaacaaaatattaatggcaacagatttagattcagaagacaaatctttggtttatattattcgttatgggccaggacatggcttattacagagacgaaaacctactggtgcctttgaaaatatcacactgggcatgaattttacccaggatgaagtagacagaaacttaattcagtatgtccatttggggcaagagggcattcgggacctaattaaatttgatgtgactgatggaataaatcccctcatagatcgttacttttatgtgtccatcgggagcattgacattgtcttccctgatgtgataagtaagggagtgtccttgaaagaaggtggcaaagtcactcttacaacagacctactaagcactagtgacttgaacagtcctgatgaaaacttggtttttaccatcaccagggctcccatgcgaggtcacctggaatgcacggatcagcctggtgtgtccatcacgtctttcactcagctgcaactggctggaaacaaaatctactacatccacacagctgatgatgaagtgaaaatggacagttttgagtttcaagtcaccgatggacgtaaccctgtctttcggacattccgtatctccattagcgatgtggacaataaaaagccagtggtcaccatccacaagctggttgtcagtgaaagtgaaaacaagctgattactccttttgagctcactgtcgaagacagagatactcctgacaagctcctgaaattcactatcacccaggtgcctattcatggccatctcctattcaacaataccagacctgtcatggtttttaccaagcaagacttgaatgaaaacttaatcagctacaaacatgatggcactgagtcaagtgaagatagcttctccttcacagtgactgatggcacccatacagacttctatgtttttcctgatacggtgtttgaaacaaggagaccccaagtgatgaagatccaggtcttggctgttgacaacagtgtcccccaaatcgcagtgaataagggggcctctacacttcgcactctagccactggccacttggggttcatgatcacaagcaaaatattgaaagtggaggacagagacagcttacacatttctcttagatttatcgtgacagaggcccctcaacatggatatcttctcaacctggacaaaggcaaccacagcatcactcagttcacacaagctgacattgatgacatgaaaatatgctatgtcttaagagaaggggctaatgccacaagtgatatgttctattttgcagttgaagatggtggtggaaacaagttaacgtaccagaattttcgtctgaattgggcatggatctcctttgaaaaggaatattacctggtcaatgaggactccaaatttctagatgttgttcttaaacgtagaggttacttgggagaaacttcttttataagtattggcacaagagacagaactgcagaaaaagacaaagacttcaagggcaaagcacagaaacaagtgcagttcaacccaggccagaccagggccacatggcgagtgcggatcctgagtgatggggagcatgagcagtctgaaacctttcaggtggtactctcagagcccgtgctggctgccttggaattccccacagtcgccactgttgagatcgttgatccaggagatgagccaactgtgtttattccccagtccaaatactccgttgaagaagatgttggtgagctgttcattcccatcaggaggagcggagatgtgagccaggagttgatggtggtctgttatacccaacaaggaacagcaactggaactgtgccgacttccgtgttgtcttactctgattacatatccaggcctgaggaccacaccagtgttgtccgctttgacaaagatgaacgggagaaactgtgtcggatagtcataattgatgactctttgtacgaggaggaggaaaccttccatgtccttctgagcatgcccatggggggaagaatcggatcagagttcccaggggctcaagttacaatcgttcctgacaaagatgatgaacccatcttttacttcggtgatgtggaatactctgtggatgagagtgctggctatgtggaagtgcaggtgtggagaacgggcactgacctgtccaagtcttctagtgtcacagtgaggtctcggaaaacagatcctccctctgcagatgctggaacagactatgtgggcatcagccgtaatttagattttgcacctggagtcaacatgcagcctgttcgtgttgtcattctggatgaccttggacaaccagcgctggagggaattgagaaatttgaactggtgcttcgcatgcctatgaacgcagcccttggcgagcccagcaaagccacagtgtccataaatgactctgtctccgatttgcctaagatgcaattcaaagaacgaatatatactggcagcgaaagtgatgggcagatagttacaatgatccataggactggggatgtccagtacagatcttcagtgagatgctacacccggcaggggtctgcacaggtgatgatggactttgaagaacgcccaaacactgatacctccatcatcacattcctccctggtgagacagaaaagccctgcattcttgagctgatggacgatgtgctctatgaggaggtagaggagctccgcctggtactcggcactccacaaagcaactctccctttggggctgcagttggtgaacaaaatgaaactctcataaggatccgagatgatgctgataagactgttattaaatttggagaaaccaaatttagtgtcactgaacccaaagaacctggagagtcggtggttataagaattccagtgattcgccaaggagacacttcaaaggtttccattgtgagagtccacaccaaggatggctcggccacctctggagaagactaccaccctgtgtcagaagaaattgagtttaaggaaggggaaacccagcacgtggttgaaatcgaagttacctttgacggggtgagagagatgagagaggccttcactgttcacctaaaacctgatgaaaatatgatagcagagatgcagttgacgaaagccattgtgtacatagaagaaatgagcagcatggcagatgtcacttttccttctgtccctcaaattgtatccctgttgatgtatgacgacacttccaaagctaaggagagtgctgaacccatgtctggctatcctgtcatctgtatcacagcttgcaaccccaaatattcagactacgataaaacaggctctatctgtgcaagtgagaacatcaatgacactttgacgcggtaccggtggctgattagtgcacctgcgggccctgacggtgtgaccagccctatgagagaagtggacttcgacaccttttttacgtcatccaagatggtcacactggactccatatactttcagcctggctcccgggtacagtgcgcagctcgtgctgtgaacaccaatggggatgaaggcctggagctcatgagccctattgtaaccatcagcagagaagaaggtctttgtcagccccgtgtacctggggttgttggagcagagccgttctcagctaaattgcgctacacaggccctgaggatgcagactacacaaaccttatcaagctcactgtcacaatgccacacatagatggcatgctccccgtgatctccactagagagctttccaactttgagctcaccctcagccctgatggcacaagagttggaaaccacaagtgctccaacctcctggattatactgaagtgaagactcattatggtttcttgactgatgctaccaaaaatccagaaataattggagagacatatccttaccagtacagcttgtccatcagaggttccactaccttgcgcttctaccggaacctgaacctagaggcctgtttatgggagttcgttagctactatgacatgtcagaactccttgctgactgtggtggcaccattggaacagatggacaggtcctaaacctagtgcagtcctatgtgacccttcgagtccctctgtatgtttcctacgtgttccattcccccgtgggggtaggaggctggcagcattttgacttgaagtcagagcttcgtctaacttttgtgtacgacaccgccatcttgtggaatgatggaattggcagccccccagaggctgaacttcaaggttctctctatccaaccagcatgcgcatcggtgatgaggggcgcttggccgtgcacttcaagacagaggctcagttccatggcttatttgtgctgtcacatcccgcatcctttacaagctcagtgatcatgtcagctgatcatccaggcctgacattttccctccgcctcataaggagtgaaccaacctataaccagccagtacagcagtggagctttgtctctgactttgccgtacgtgactactcagggacctatactgtgaagctggtgccatgcactgccccatcacatcaggaataccgcctgccagtcacctgcaaccccagagaacctgtcacctttgaccttgacatccgattccaacaggtcagtgatccagtggctgctgagtttagcttgaacacccaaatgtacctgctctctaagaagagtctctggttgtctgatggatccatgggattcgggcaagagagtgatgttgcttttgcagaaggtgatataatttatggtcgtgtcatggtggatcctgtccagaatctgggtgactccttttactgcagcattgagaaggtgtttctatgcactggagctgatggctatgttcccaagtatagtccaatgaatgcagaatatggctgcttagccgactctccttcactcttatatagatttaaaattgtggacaaagctcagccagagacacaagcgaccagttttggaaatgtcctatttaatgccaaactagcagtggatgaccctgaagccattctcttagtgaatcagcctggatctgatggatttaaagtcgactcaacaccactctttcaggtcgctctaggccgagaatggtatatacatacgatctatacagtgagatcgaaagacaatgccaatcgaggtattggcaaaagaagtgtggagtaccattctctggtgagtcaaggaaagccccaatccaccaccaagagccggaagaagagagagatcaggagcacaccctcactggcatgggagattggtgctgaaaacagtcgaggaacaaacatccagcacattgccctggaccgcaccaagaggcagatcccccatgggagagcacctccagatggcatcctcccctgggagctcaacagccccagctctgcagtcagcctggtcactgtggtgggaggcaccacggtagggttactcaccatctgcctcactgtcattgcagtgctgatgtgcaggggcaaggaaagtttcagggggaaggatgccccgaaaggctccagcagcagtgagcccatggtgcccccacagagccatcacaatgacagctcagaagtttgatgactgcaggtagaattcaaccttttccgtaagtgcctcggaaaagatcacaatggaaccttaaatacttctggtaaaccatagagaatggaggatggctgtgatgaagctgcttagagaatatgactgtactaatggagtttgatttgaattctccatactcttttttgcatcaaaggacaaattaaggcatctttcctcttgccccaaaggcagcaacaacgtactcatatgtacacagagccatgatgtgaggaatgtactcctcattttagacatattctctatgcagtggagataaatctattaaaaggtgctaacagactctcttacaagtgtaagaggaatctactgttgctatgttagtgtgaatgttgaaggtgcaattatcacattgtttattaattgtataacagattattactagaaaggtttttgttgctagtctggaaaactggtgaacacactgtttattatgacaagttttcaaataggtgaagacagcatagaattatgaccagggtggctcaacccacaaatcaactgatctactacttgggagacagtggaaggaaagatagagggaaggaagttcactcacttgaatttgaattgcttctcattctcatcagactctccttgttttgtttgcatatttaattttaaattaaaccaaagaatatgttaattctgaaagagatttttaagagatgctgctctgttttggcatatagtgagtaatggtagagctcttgcatggtaatataccttattggtgctcaacatttgtgggaaattagagggttggtgagattttggtgatgaataaatgccatagagttagagtcactacaagacaatgttctctaagaactgagcctagatgtttgcagtattgaacccataaatgataataagaaacattgttacagatggtgaagggagaaagtggtatttattaatataatgtgtataatcagagtgcctcttatacatactttatagaataaaggaacattttgacagatgaggttatccctcggagtagcgtaatcacacaataacatttagaacttaaattggctacaggacattttattagctttctatccagcatctggtccaaacgatgggactctctgcaactatcattccagaaatggtcttggaggtggccagaatcattgaccatatttttatttggttcaagaagacatcgctctggcatccccagttcagtgaactggtacaatgtggtccctctcaatatttaaaaatataatttgtaacagtgcttaccattcacctcccaaagccaaggaacttgagtgagcttccttggcaagcctcccattgcctttctgcatcaatgtgtttgttaccaaatagcagaaatttcgcttagaaggggaaaacttcagctttccaaaagctagtaaacatgtttcaaagaaaaataaggtcaggagaaaaagaataatgcctacagattatccttcagatgctggctagaatcccctttgacttctagccataagctggccacattggacatcttggtcactgcagaattttaaaaggcaaacttctcagaacagatgtgcacatcttaatttggtgtctgtaagtatcaaccatttcttgatcaagataaggaagcaacactgatactgagagagaggtcatatgtccaatagttgcctttcttctcttaggcagctctgcacttcatgttcagttttttaaaaatagactgtagtatcctttcattggagaatttacaaaaatatcatctacagctcaaaagtcccactaacggcttatatgaacagaaagtactgtgtagcccaggagtttatttagcaagataaatagtggtaatttcttaatcattcccctttcctttgctttaccttctggcagatgcttagctacttctttggctacctcataatttgtatgggaatgaacatgaattagggaacttcaaatagtgcgtagacttttccctacttaccattgggttcaattgatgtagactgttagagcaagtatactcaatcaacttgctgatattttagtagttaacagcttccgagcctatcatgcaatttggagtctgtcaatgaatatagcaatcggtgaagcattactgtacgaagtctgttttcaggctttgggtcaagctggttttataccaaatttcactctacaatgcatattctaatgaagctactttatataaattggagagcttataaaatgcagaacatttctatcctatcctaccaaatatttatccttctctgtcctctattctcttactctcctctctccctttttccttccctttattcccttgaaaaaagagaatctgtgggaaataggcagatatagctttttaaaatataaagtacttgggattttgcattatttttcttaatatctatttactaagtatgtaatttaatatacattaattattttttgaaactcttgttagtgggaagaatatggtaaattttttgttaaataaaatagacccttatgtttagcattttgtttttagagaactattctggtactatcagaacaaatacataaaataacttcccatagagaacaggatatagcaataatagctccttagatactcagtggcttctgactccaatcaaggtcttgttgatattatatagtaaaaataaaaccaaaaataaatattattcaagtggctcttctaagcatgtgaatcatgaagcactgaaatatgtattttaatgatgatcttatttattcccatttttgcccttagttaacatttactggtgctcacctaggattggctattctgagggattgcatagaaaccaagctccacttgctgtccttgggaaggttataactgaatgcagctctttatttggactaaagtgtcaggatatgcattagattctctcctgaaccaaaaacacaacagtcattatctgtgaaccataatttaaaaatctttctagaataacaacagcagactccactcttgtttgtctaaaagagccctactgggtatggatcattctgatgacagatttatacaaaatgattcaaaccagtaacttagtaaaattgaccttcgcaaaacctcactgggggagtgccttgtagagctgtgggtgggactgcacattcttttcctcttagtaaaagataggcccactttattccaagaataacacttagcacataaactcttcttccagctcgttagcagcattagcaccttctgaattccaccctctcagaagaatccacagtgtttgaacaatttgcataaaggtcagctagcatcctgctgccaagccactgcatagcatttgtgataagaaggaccaactctaggctcaatatgaagggatttagttctgtaagcagcaaaaaagcttctttatcaagtcatcttacctctaattcttttccagtgtgccaactccaaagtcaacattaaaaatgtaaatggacctgtgtaaatatcacagagagcttttccttatacatctcaatgctgagagttaaaatattcccaggttaaaatttttttaaagtaccaataatagagctaaatacaatgacatttgcttttaaaaggtggatattttatttctgctttttgaaaatacttatttagtattgacttggaagccaatttggtcctttaataagtaaagaaaataatatgtttaaaaatgtaaatgttttacaaatttgaaactttcataattgtattaatcagaaaacaagcacattgccattctttgaaactcatgtttctagacatgacagcagtaataaaaggatgaaaacaagtgtcttcactaagcgtatggccaataaatgggacccaaacgttcaatctgttcagtttaccaaggttcagaaatacgtaatttagcaggaaactataaataccagtgctatcacagccacacatacacacacacagacataaaataaccaaacatctcatttctaggaaagagataacactaaaggcatcataggtttaactgaaatacgttatatgaagttttacaaaaaggtcaacagaaagctcatttgtgaaaacatactctcatgggagcttctttaacattagttcagaggttaatatatttcctggaggtgttttcctagaattgattgcactattgcatggtaataacatttaattgttaaggaaacattatatataggttcaaattatcccttaatgttgatttctccccttttccatggattttgatactaagaaacaaaatgctttgagattttggtaactattttgattttgataaaacatgttaaaatagaaggacatgatatttttctatagtttccatcaggaagagtacatcagaaacttctccataaggaaagaaaactgactctctcttgaactagtgttgacaaaatacactaatgtctttcttaattttattttattaggagaaaaatcagaatattaaatttgcaaacttttgaacagcagtaatagctccttagacactcagtatctttcttccctatctttcaagcacatttaatttctttcccctggtatttgtttgctttgtgttttttcaatattttgtttgctaaagaacaataacaacaacaaagctggtccagccctgacacctacttttgctttttttctttctttcttttaatttgttgaactataggtttctttctgagatgtatttttcattcttccaataatgctctctttttcatttcaaaaccattaccactttcaatatgtaattaacatcctcattcatcagaaagctggtaagtccacacagcatttgtgcagtatcccttctgtgtaaaatgttaaggctttcagatgaaagaaaaaagaacttcctgcaaaagatcaaaagcatcatactaaataaaatgatgacaatatgtgccttgatttttctctcaatggaggttcaacattgacatttaagatgtaaaaaaaattactttgatggtttaattaagaataataagtcaaatatcacatgtatgtagttcttttggatgaccgaataccttaaaatgaactaaataactgaaataaagtgttaaaatgttaa

SEQ ID NO: 5477 - DNA, 818 bp, Homo sapiens
ccggtgacgcgactccgggcggctcccgggtgcgccgcatatatagcagcggcggcggtggcggcggccacaccgggcggcggacacgtggagggacccggcccgcgccttctgcccctgctgccggccgcgccatgcggtgagcgccccaggccgccagagcccacccgacccggcccgacgcccggacctgccgcccagacccgccaccgcacccggaccccgacgctccgaacccgggcgcagccgcagctcaagatggcccgaggcagcgccctcctgctcgcctccctcctcctcgccgcggccctttctgcctctgcggggctctggtcgccggccaaggaaaaacgaggctggaccctgaacagcgcgggctacctgctgggcccacatgccgttggcaaccacaggtcattcagcgacaagaatggcctcaccagcaagcgggagctgcggcccgaagatgacatgaaaccaggaagctttgacaggtccatacctgaaaacaatatcatgcgcacaatcattgagtttctgtctttcttgcatctcaaagaggccggtgccctcgaccgcctcctggatctccccgccgcagcctcctcagaagacatcgagcggtcctgagagcctcctgggcatgtttgtctgtgtgctgtaacctgaagtcaaaccttaagataatggataatcttcggccaatttatgcagagtcagccattcctgttctctttgccttgatgttgtgttgttatcatttaagattttttttttttggtaattattttgagtggcaaaataaagaatagcaatta

SEQ ID NO: 5478 - DNA, 6775 bp, Homo sapiens
cggccccagaaaacccgagcgagtagggggcggcgcgcaggagggaggagaactgggggcgcgggaggctggtgggtgtggggggtggagatgtagaagatgtgacgccgcggcccggcgggtgccagattagcggacgcggtgcccgcggttgcaacgggatcccgggcgctgcagcttgggaggcggctctccccaggcggcgtccgcggagacacccatccgtgaaccccaggtcccgggccgccggctcgccgcgcaccaggggccggcggacagaagagcggccgagcggctcgaggctgggggaccgcgggcgcggccgcgcgctgccgggcgggaggctggggggccggggccggggccgtgccccggagcgggtcggaggccggggccggggccgggggacggcggctccccgcgcggctccagcggctcggggatcccggccgggccccgcagggaccatggcagccgggagcatcaccacgctgcccgccttgcccgaggatggcggcagcggcgccttcccgcccggccacttcaaggaccccaagcggctgtactgcaaaaacgggggcttcttcctgcgcatccaccccgacggccgagttgacggggtccgggagaagagcgaccctcacatcaagctacaacttcaagcagaagagagaggagttgtgtctatcaaaggagtgtgtgctaaccgttacctggctatgaaggaagatggaagattactggcttctaaatgtgttacggatgagtgtttcttttttgaacgattggaatctaataactacaatacttaccggtcaaggaaatacaccagttggtatgtggcactgaaacgaactgggcagtataaacttggatccaaaacaggacctgggcagaaagctatactttttcttccaatgtctgctaagagctgattttaatggccacatctaatctcatttcacatgaaagaagaagtatattttagaaatttgttaatgagagtaaaagaaaataaatgtgtatagctcagtttggataattggtcaaacaattttttatccagtagtaaaatatgtaaccattgtcccagtaaagaaaaataacaaaagttgtaaaatgtatattctcccttttatattgcatctgctgttacccagtgaagcttacctagagcaatgatctttttcacgcatttgctttattcgaaaagaggcttttaaaatgtgcatgtttagaaacaaaatttcttcatggaaatcatatacattagaaaatcacagtcagatgtttaatcaatccaaaatgtccactatttcttatgtcattcgttagtctacatgtttctaaacatataaatgtgaatttaatcaattcctttcatagttttataattctctggcagttccttatgatagagtttataaaacagtcctgtgtaaactgctggaagttcttccacagtcaggtcaattttgtcaaacccttctctgtacccatacagcagcagcctagcaactctgctggtgatgggagttgtattttcagtcttcgccaggtcattgagatccatccactcacatcttaagcattcttcctggcaaaaatttatggtgaatgaatatggctttaggcggcagatgatatacatatctgacttcccaaaagctccaggatttgtgtgctgttgccgaatactcaggacggacctgaattctgattttataccagtctcttcaaaaacttctcgaaccgctgtgtctcctacgtaaaaaaagagatgtacaaatcaataataattacacttttagaaactgtatcatcaaagattttcagttaaagtagcattatgtaaaggctcaaaacattaccctaacaaagtaaagttttcaatacaaattctttgccttgtggatatcaagaaatcccaaaatattttcttaccactgtaaattcaagaagcttttgaaatgctgaatatttctttggctgctacttggaggcttatctacctgtacatttttggggtcagctctttttaacttcttgctgctctttttcccaaaaggtaaaaatatagattgaaaagttaaaacattttgcatggctgcagttcctttgtttcttgagataagattccaaagaacttagattcatttcttcaacaccgaaatgctggaggtgtttgatcagttttcaagaaacttggaatataaataattttataattcaacaaaggttttcacattttataaggttgatttttcaattaaatgcaaatttgtgtggcaggatttttattgccattaacatatttttgtggctgctttttctacacatccagatggtccctctaactgggctttctctaattttgtgatgttctgtcattgtctcccaaagtatttaggagaagccctttaaaaagctgccttcctctaccactttgctggaaagcttcacaattgtcacagacaaagatttttgttccaatactcgttttgcctctatttttcttgtttgtcaaatagtaaatgatatttgcccttgcagtaattctactggtgaaaaacatgcaaagaagaggaagtcacagaaacatgtctcaattcccatgtgctgtgactgtagactgtcttaccatagactgtcttacccatcccctggatatgctcttgttttttccctctaatagctatggaaagatgcatagaaagagtataatgttttaaaacataaggcatttgtctgccatttttcaattacatgctgacttcccttacaattgagatttgcccataggttaaacatggttagaaacaactgaaagcataaaagaaaaatctaggccgggtgcagtggctcatgcctatattccctgcactttgggaggccaaagcaggaggatcgcttgagcccaggagttcaagaccaacctggtgaaaccccgtctctacaaaaaaacacaaaaaatagccaggcatggtggcgtgtacatgtggtctcagatacttgggaggctgaggtgggagggttgatcacttgaggctgagaggtcaaggttgcagtgagccataatcgtgccactgcagtccagcctaggcaacagagtgagactttgtctcaaaaaaagagaaattttccttaataagaaaagtaatttttactctgatgtgcaatacatttgttattaaatttattatttaagatggtagcactagtcttaaattgtataaaatatcccctaacatgtttaaatgtccatttttattcattatgctttgaaaaataattatggggaaatacatgtttgttattaaatttattattaaagatagtagcactagtcttaaatttgatataacatctcctaacttgtttaaatgtccatttttattctttatgtttgaaaataaattatggggatcctatttagctcttagtaccactaatcaaaagttcggcatgtagctcatgatctatgctgtttctatgtcgtggaagcactggatgggggtagtgagcaaatctgccctgctcagcagtcaccatagcagctgactgaaaatcagcactgcctgagtagttttgatcagtttaacttgaatcactaactgactgaaaattgaatgggcaaataagtgcttttgtctccagagtatgcgggagacccttccacctcaagatggatatttcttccccaaggatttcaagatgaattgaaatttttaatcaagatagtgtgctttattctgttgtattttttattattttaatatactgtaagccaaactgaaataacatttgctgttttataggtttgaagaacataggaaaaactaagaggttttgtttttatttttgctgatgaagagatatgtttaaatatgttgtattgttttgtttagttacaggacaataatgaaatggagtttatatttgttatttctattttgttatatttaataatagaattagattgaaataaaatataatgggaaataatctgcagaatgtgggttttcctggtgtttccctctgactctagtgcactgatgatctctgataaggctcagctgctttatagttctctggctaatgcagcagatactcttcctgccagtggtaatacgattttttaagaaggcagtttgtcaattttaatcttgtggatacctttatactcttagggtattattttatacaaaagccttgaggattgcattctattttctatatgaccctcttgatatttaaaaaacactatggataacaattcttcatttacctagtattatgaaagaatgaaggagttcaaacaaatgtgtttcccagttaactagggtttactgtttgagccaatataaatgtttaactgtttgtgatggcagtattcctaaagtacattgcatgttttcctaaatacagagtttaaataatttcagtaattcttagatgattcagcttcatcattaagaatatcttttgttttatgttgagttagaaatgccttcatatagacatagtctttcagacctctactgtcagttttcatttctagctgctttcagggttttatgaattttcaggcaaagctttaatttacactaagcttaggaagtatggctaatgccaacggcagtttttttcttcttaattccacatgactgaggcatatatgatctctgggtaggtgagttgttgtgacaaccacaagcactttttttttttttaaagaaaaaaaggtagtgaatttttaatcatctggactttaagaaggattctggagtatacttaggcctgaaattatatatatttggcttggaaatgtgtttttcttcaattacatctacaagtaagtacagctgaaattcagaggacccataagagttcacatgaaaaaaatcaatttatttgaaaaggcaagatgcaggagagaggaagccttgcaaacctgcagactgctttttgcccaatatagattgggtaaggctgcaaaacataagcttaattagctcacatgctctgctctcacgtggcaccagtggatagtgtgagagaattaggctgtagaacaaatggccttctctttcagcattcacaccactacaaaatcatcttttatatcaacagaagaataagcataaactaagcaaaaggtcaataagtacctgaaaccaagattggctagagatatatcttaatgcaatccattttctgatggattgttacgagttggctatataatgtatgtatggtattttgatttgtgtaaaagttttaaaaatcaagctttaagtacatggacatttttaaataaaatatttaaagacaatttagaaaattgccttaatatcattgttggctaaatagaataggggacatgcatattaaggaaaaggtcatggagaaataatattggtatcaaacaaatacattgatttgtcatgatacacattgaatttgatccaatagtttaaggaataggtaggaaaatttggtttctatttttcgatttcctgtaaatcagtgacataaataattcttagcttattttatatttccttgtcttaaatactgagctcagtaagttgtgttaggggattatttctcagttgagactttcttatatgacattttactatgttttgactacctgactattaaaaataaatagtagatacaattttcataaagtgaagaattatataatcactgctttataactgactttattatatttatttcaaagttcatttaaaggctactattcatcctctgtgatggaatggtcaggaatttgttttctcatagtttaattccaacaacaatattagtcgtatccaaaataacctttaatgctaaactttactgatgtatatccaaagcttctcattttcagacagattaatccagaagcagtcataaacagaagaataggtggtatgttcctaatgatattatttctactaatggaataaactgtaatattagaaattatgctgctaattatatcagctctgaggtaatttctgaaatgttcagactcagtcggaacaaattggaaaatttaaatttttattcttagctataaagcaagaaagtaaacacattaatttcctcaacatttttaagccaattaaaaatataaaagatacacaccaatatcttcttcaggctctgacaggcctcctggaaacttccacatatttttcaactgcagtataaagtcagaaaataaagttaacataactttcactaacacacacatatgtagatttcacaaaatccacctataattggtcaaagtggttgagaatatattttttagtaattgcatgcaaaatttttctagcttccatcctttctccctcgtttcttctttttttgggggagctggtaactgatgaaatcttttcccaccttttctcttcaggaaatataagtggttttgtttggttaacgtgatacattctgtatgaatgaaacattggagggaaacatctactgaatttctgtaatttaaaatattttgctgctagttaactatgaacagatagaagaatcttacagatgctgctataaataagtagaaaatataaatttcatcactaaaatatgctattttaaaatctatttcctatattgtatttctaatcagatgtattactcttattatttctattgtatgtgttaatgattttatgtaaaaatgtaattgcttttcatgagtagtatgaataaaattgattagtttgtgttttcttgtctccca

SEQ ID NO: 5479 - DNA, 4072 bp, Homo sapiens
aaagcgacaggcctctcggcgagccggtgccccatcgggtaccgcacggctgccgcggcggccttaccctgccgcgagcgcctgtgacagcggcgccgctgtgctcgcgaccccggctccgggcctctgccgacctcaggggcaggaaagagtcgcccggcgggatgggcggggaggctgggtgcgcggcggccgtgggtgccgagggccgcgtgaagagcctgggtctggtgttcgaggacgagcgcaagggctgctattccagcggcgagacagtggccgggcacgtgctgctggaggcgtccgagccggtggccctgcgcgcgctgcgcctggaggcccaggggcgcgccaccgccgcctggggcccgagcacctgcccccgcgcctcggccagcaccgcggccctggctgtcttctcggaggtggagtacctgaacgtgcgcctcagcctgcgggagcccccggccggtgaaggcatcattttattacagcctggaaaacatgaatttccatttcgctttcaacttccatctgaacctttggtcacctcgtttactgggaaatatggaagcattcagtactgtgtgcgggcagtgttggaacgacccaaggtacctgatcagagtgtaaagcgggaactccaggttgttagtcatgtcgatgtcaacacaccagcattattaacccctgtattgaaaactcaagagaaaatggttggctgttggtttttcacttctggtccagtctcgctgagtgccaaaattgaaagaaagggatactgtaatggagaagctattccaatctatgcagaaatagaaaattgttcctctcgtctgattgttccaaaggctgctattttccaaacgcagacatatttggctagtggaaaaacaaagaccattcgacacatggtcgccaatgtgcgaggaaaccacatcgcttctgggagcacagacacatggaatgggaaaacgctaaaaatcccacctgttactccatccatcctggattgctgcattatcagagtggactattccttagctgtatacattcacattcctggtgctaaaaaattgatgctcgaactgccattagtgatcggtacaattccatataatggttttggcagcagaaactccagcattgccagccagttcagtatggatatgagctggttgacactgaccctgccagagcagcctgaagcaccaccaaattatgcagatgtggtatcagaggaagaattctctagacacattcctccttaccctcaaccccctaactgtgagggagaagtgtgctgtcctgtgtttgcctgtatacaagaattccggtttcaacccccacctctttattcagaggttgacccacatcctagcgacgtagaagagagccagcctgtttccttcattctctgaacgtatttcagaaatcactgtgttcatcatcaaattagaatgttggttcttttccttctgcctttttgggaaagagacaggaaagattcacttgaaaacataaatgaacgtcaagactgaaggcaatagaaattaaagaatgtgagaaagttctggtgggccggcaggattgccgcacaagtttatatgatggtcgtatatatatccctgttaaaaactgggatgaagatgtgcaaagtcacagaatgtaatggaagtcctgatggttacagagtaagtgaaagggtgcctgcgctgacgtgagagaaaggaatctgtaaacagtggaaacactgtgggagtttcccatggtgaagagtggaacgaaggcgatatgaactgaaggggtgaagacttgattttggagagggcaacaaaacaagggtgtgtgtgcataggagaatggcccactccaaatacgaagtgagatcctgagtctttgggtgcttcatgatttcctaccatattcaggcctaaagacattgaaaaagcatcttttcttgagatcatggtcatatgaggtcctaatgaagtactacagttttcattctttcaagggtagactaaaatatagtttataaatcggcagtacggtattatgaaaccaagaaagggtttcttgaaaagcttgtcggttcaaagaggaaagatgaatttcaatgtgaaaacacgttttgttgagggctgtactttttaccccctttaagtgctttaacaggatatacgtttgattttcctcatatcttatttacctaggagcatgtaagagaaagaagggagagaaaaggttgcatctgcaggatgccttgataactacacagtcccaaataaaaggcctttttctaacctacctctaatggggttatcagatatgtttttaaatctctcgccctgagtactcttcttgggagttgctgctgtttacagccacagtctcatctatcactaaatatgaaactgggccaaggggaaaattcagtaagttagcgttaaatggaagtaaatatatgtatacctaagagaatgtcaaaataaacaccaaaccaaaagaaggtaggagtgccatttttagaaaagacacaactttaattcctgtcaagagacctaggtctactgatggcagtcactgcattgtacattattccagttcttcagtaattctgtttaaactgtgattttctttattgtgttggtgcaatattttattatcatttaacctcaggatattcagaccaacaggattgtgttgctgctgaaagtctgagcagtgttttaccgtccccagcccccctcccacatggtcacatgttcacttgcttttccttccatctgttggttttgtgagctgagagcatctctggacacatggaagggagccagggattcctgtgatacagattttgaaccagcagagtactttggttttcttcatgtcctaagggtttgatccagaaaccctggtgcttcccctgcagaatactgtacttcatttaacagaatgattgatttttctttcaatcagcatgttcaccaaaaatagaaaagttcttctaaggttaaattttgtatttaaaagttagttggccatttgatcagggaattttctacacacattaggcaaatgtatgcttttcatcctctgggcttacctctctcctctgcaatcctggaagcatcgtgcatagttctttcattgtaagccgctatttaaattcccacaatgcaaaactgttagaccagtaattgtgctactgaaattgtcacaaaacgttattccttgatttggtttttaaattttgctttcgtgtgtgtgtctttaaacaggtaatgtgtatttaagtgttgtctaaacagttgatttttactttagaaaagatcatcttcaactgtttattgacttctgagttatatagttcatgccctgccaaggcattgttcgactccatgatactaaaacataatgaaagaaacaaactccagtatggagaagagaaagtttaattatttggttccatctagaaaagcaacaacttaaaggaatccttcactaggattgtcttatcacctttattagataaatcatgaagtgtccctgtgaaattgaagtgaaactatctctgtaggacttaagagaatagctaaaaggtgtgacttgccttattgaaatgatactggcatatctgactgtaagcagtaggttgaagatatcattttatgaatgtggagaattctacattgaaacagaaaatacctgggaatgaagattaaaaatgtagctgctgttatttgcttggttattcccctcttgctcttctttagtttgaaaaaacaaaaacgtggccttggaattttcattttgatgcagaaattttgaaattgaaaatgtgcatgttttggtgcacaaaatccttctgtgggcaaaactttgtttttgttttgcacagtaagaaacaataggcaagcgttatgtttttggtaagttaactatgaaagctttcttatttttattattaaaaatgtaacaatttaacccacaggaaaaaaaattactttgtatgcttgtttgaaccctatgggttcgttttattaataaaattattacactaatgcta

SEQ ID NO: 5480 - DNA, 3196 bp, Homo sapiens; identical to SEQ ID NO: 719

SEQ ID NO: 5481 - DNA, 5353 bp, Homo sapiens
tttctccttccctccacgggccgggtgagaaagtagccgggggctatcccgacccggcggttcttggggagggggccgaacaagaaaagggaggagatggagataacttccccggatttagcttttttgtctttgtttttgttctcaccacttccatcggatgactggagagtaaaagggaacccggagcggggtggcgagcagcgctttgagaaaatgcaggagtgtgtttggagacgcgtaaagttgcctttcaagctctggcctccgggcacgcgatgctccgcggcgggctgactcagggctgccttgggcctccctgccaccctcctggaaatgatgcaagtcctgactgtcacctggatccctgcagcccagcctggaatgcgtctggattaggggaaagacgagaaacgacactccaggtgttgcacggcccaccaaagcgggaagatagggcagttgctcagaccaaatactgtatctagtgcttctgctcctatcttcaatcgtggggttctttttaatgcaaagtgtcacaaggccaggaattcccatgtgtgctcagttggcccacagcatcattgtgcctaggaaactgcttcaatttatcaagtcctctgggctgggaatctcactgaattccaaacggcggaaagaggaaactttcccaacccgatgtgggtgtgacgcgagccaggggccccagggacactgtcccagagcacaccgtccccctttaacagcaactggagcttggattcgctcttatattgtacagtcctttcgaccattgccctggagcacccgcacacgcgcacgcatctccggccgcgctcacacacactcatacacacgcacgcaaacgcgtggccgccgccaggtcggcaactttgtccggcgctcccagcggcgctcggcttcctcctgtagtagttgagcgcaggccccgcctcccggccgtgttgtcaaaagggccggggtctcggattggtccagccgccgggacaacacctgctcgactccttcattcaagtgacaccagagcttccagggatatttgaggcaccatccctgccattgccgggcactcgcggcgctgctaacggcctggtcacatgctctccggagagctacgggagggcgctgggtaacctctatccgagccgcggccgcgaggaggagggaaaaggcgagcaaaaaggaagagtgggaggaggaggggaagcggcgaaggaggaagaggaggaggaggaagaggggagcacaaaggatccaggtctcccgacgggaggttaataccaagaaccatgtgtgccgagcggctgggccagttcatgaccctggctttggtgttggccacctttgacccggcgcgggggaccgacgccaccaacccacccgagggtccccaagacaggagctcccagcagaaaggccgcctgtccctgcagaatacagcggagatccagcactgtttggtcaacgctggcgatgtggggtgtggcgtgtttgaatgtttcgagaacaactcttgtgagattcggggcttacatgggatttgcatgacttttctgcacaacgctggaaaatttgatgcccagggcaagtcattcatcaaagacgccttgaaatgtaaggcccacgctctgcggcacaggttcggctgcataagccggaagtgcccggccatcagggaaatggtgtcccagttgcagcgggaatgctacctcaagcacgacctgtgcgcggctgcccaggagaacacccgggtgatagtggagatgatccatttcaaggacttgctgctgcacgaaccctacgtggacctcgtgaacttgctgctgacctgtggggaggaggtgaaggaggccatcacccacagcgtgcaggttcagtgtgagcagaactggggaagcctgtgctccatcttgagcttctgcacctcggccatccagaagcctcccacggcgccccccgagcgccagccccaggtggacagaaccaagctctccagggcccaccacggggaagcaggacatcacctcccagagcccagcagtagggagactggccgaggtgccaagggtgagcgaggtagcaagagccacccaaacgcccatgcccgaggcagagtcgggggccttggggctcagggaccttccggaagcagcgagtgggaagacgaacagtctgagtattctgatatccggaggtgaaatgaaaggcctggccacgaaatctttcctccacgccgtccattttcttatctatggacattccaaaacatttaccattagagaggggggatgtcacacgcaggattctgtggggactgtggacttcatcgaggtgtgtgttcgcggaacggacaggtgagatggagacccctggggccgtggggtctcaggggtgcctggtgaattctgcacttacacgtactcaagggagcgcgcccgcgttatcctcgtacctttgtcttctttccatctgtggagtcagtgggtgtcggccgctctgttgtgggggaggtgaaccagggaggggcagggcaaggcagggcccccagagctgggccacacagtgggtgctgggcctcgccccgaagcttctggtgcagcagcctctggtgctgtctccgcggaagtcagggcggctggattccaggacaggagtgaatgtaaaaataaatatcgcttagaatgcaggagaagggtggagaggaggcaggggccgagggggtgcttggtgccaaactgaaattcagtttcttgtgtggggccttgcggttcagagctcttggcgagggtggagggaggagtgtcatttctatgtgtaatttctgagccattgtactgtctgggctgggggggacactgtccaagggagtggcccctatgagtttatattttaaccactgcttcaaatctcgatttcactttttttatttatccagttatatctacatatctgtcatctaaataaatggctttcaaacaaagcaactgggtcattaaaaccagctcaaagggggtttaaaaaaaaaaaaccagcccatcctttgaggctgatttttcttttttttaagttctattttaaaagctatcaaacagcgacatagccatacatctgactgcctgacatggactcctgcccacttgggggaaaccttatacccagaggaaaatacacacctggggagtacatttgacaaatttcccttaggatttcgttatctcaccttgaccctcagccaagattggtaaagctgcgtcctggcgattccaggagacccagctggaaacctggcttctccatgtgaggggatgggaaaggaaagaagagaatgaagactacttagtaattcccatcaggaaatgctgaccttttacataaaatcaaggagactgctgaaaatctctaagggacaggattttccagatcctaattggaaatttagcaataaggagaggagtccaaggggacaaataaaggcagagagaagagacagaactaaaaatacgaggaaaggagagtgaggattttcattaaaagtctcagcagtgggtttcttgggttatttaaaacatcacctaaataggccttttcttcctaattggccatcaaattaaagcctatcctttctcaagcaggagctggtattgtagggagtggccgggtattctgggctgggctcttctggagtagggggtcagcaaacattgtctgcaaagggccagatactgaatccagtactttcagtttggcgagccgtgaggtctctgtcgaaactactcaactctgccgtcctagcacaaaagcagccatagacaacacacaaacgagagggcttggctcccttccaggaagatttatttaacaggctcccagctgaatttcactcacaggacacagtttactgatctctgttctagtgagtgggtcaaaaagcatatgcatccttatccgtcaactcatcagctcttcctcaaggcaacctgaggccagacaccaagaaaccaagcgtatctgctctaaaatgacttgttcctggggaatgccttcaaccaaaacacagctagtatttctatgccccaaatccaatcccagtctttcatgatccatgccggcggttgggtggggaggggaatcattggttgggggaagggaggaaaccccacctccagcccccgccaccgggctccctgggcacccagcaagatctggggctgcagagaacagaagagctggtgcacttaatccagctctgcccttggggggaggaggacctgtgtgtcaggctctgccatgggaacgagtgtaaaccgtggctgtctcctgcagtgagccaccgcggcaggcacgttgactgttttactgacatcactcaaaagctaaagcaataacattctcctgcgttgctgagtcagctgttcatttgtccgccagctcctggactggatgtgtgaaaggcatcacatttccattttcctccgtgtaaatgttttatgtgttcgcctactgatcccattcgttgcttctattgtaaatatttgtcatttgtatttattatctctgtgttttccccctaaggcataaaatggtttactgtgttcatttgaacccatttactgatctctgttgtatatttttcatgccactgctttgttttctcctcagaagtcgggtagatagcatttctatcccatccctcacgttattggaagcatgcaacagtatttattgctcagggtcttctgcttaaaactgaggaaggtccacattcctgcaagcattgattgagacatttgcacaatctaaaatgtaagcaaagtagtcattaaaaatacaccctctacttgggctttatactgcatacaaatttactcatgagccttcctttgaggaaggatgtggatctccaaataaagatttagtgtttattttgagctctgcatcttaacaagatgatctgaacacctctcctttgtatcaataaatagccctgttattctgaagtgagaggaccaagtatagtaaaatgctgacatctaaaactaaataaatagaaaacaccaggccagaactatagtcatactcacacaaagggagaaatttaaactcgaaccaagcaaaaggcttcacggaaatagcatggaaaaacaatgcttccagtggccacttcctaaggaggaacaaccccgtctgatctcagaattggcaccacgtgagcttgctaagtgataatatctgtttctactacggatttaggcaacaggacctgtacattgtcacattgcattatttttcttcaagcgttaataaaagttttaaataaatggcttccacttga

SEQ ID NO: 5482 - DNA, 1937 bp, Homo sapiens
tccctccgctccagttcgtcggggcgggcgcggcggcggcggcgaaggaggagcgcggccggggcgatgcggcgctacctgcgcgtcgtggtgctgtgtgtggcctgcggcttctgctcgctcctttacgctttcagccagctcgccgtgtccctggaagaaggaacgggcggcggtggcgggaagccgcaggccgcggtggcttcctggctcgcgggcggcggacgcggcgccgtgagaggcgccggcgtcgcgggccccgcagcgcatcccggcgtgtcggacaggtacagtctgaaaatacagcctgttgagaaaatgcatctagctgtagttgcctgtggtgaaagactggaagaaactatgaccatgttgaagtcagctatcattttcagcatcaaacctcttcaattccatatttttgctgaagatcagctacatcatagctttaaaggcagacttgacaactggtcatttctacaaacatttaattatacgttataccccataacctttccaagtgagaatgcagcagagtggaaaaaactctttaaaccatgtgcttcgcagagattgttcttgccgttaatcctgaaagaagttgactcactattgtatgtcgacactgatatcctttttttacgaccagttgatgatatttggtctttactaaagaaatttaattccacacaaattgctgcaatggcaccagaacatgaggaacctcgaataggatggtataatcgctttgctaggcatccatattatggaaaaactggagtaaactctggagttatgttgatgaacatgactcgaatgagaaggaagtatttcaagaatgatatgacaactgtacgactacaatggggagatatacttatgccattgcttaaaaaatacaaactaaacatcacatggggtgatcaagatctattgaatatcgtgttttttcataatccagaaagcctttttgtttttccgtgtcaatggaattatcgaccagatcattgtatatatggaagcaattgccaagaagcagaagaaggaggaatctttattcttcatgggaacagaggtgtttaccatgacgataagcaaccagcatttagagctgtttatgaagcactgagaaattgttcttttgaagatgacaacatccgttccttattaaaacctttagaactggaactacaaaaaacagtgcatacatactgtggaaaaatttacaaaatatttatcaaacaactagcaaaaagtgtaagagatcgttatgccagatcaccaaaggaaaagtgattcttggtgactgcttaatcaaatggatgaaaacaaagaatcagaagataagtgtgaaggaatcgtcttggatgaagtattcaggaaggaattactcatctccagaataattttttttttcctaaagaagttaagtaagcagtattttcaggtaatgaagaataagttaaaatcttgggcctcaacattgaacattttttatctctgatgttttgtaatgttacttgctatcattccagtattgatgaaaatactattgaatgggtttaacctgcagacttctgttgactcatactctcaagagtggtaggggtgtgtagatggagaaaatgtacctcaaacagtgccaacactcaagactgtgagtagagcaataattttatgtcagcactaacctcactttaaaagtgtgagaaaaaagtttgtttacaggagcagaaacaggtctgttgtttctgaagaaatgtgatgtaactgatgtaaccattgacaatctatgtgtgcctttatacatttcatctctgttttaaaatatttttatgacaatcatgtttaaaattatttttagattacaagtaagctgcatgttaaaaattgagctgtgtaaggtagaggaaaaatagtgaaaactttgggatttt

SEQ ID NO: 5483 - DNA, 3025 bp, Homo sapiens
acaaagggcgaagagaggggcgtggggaggctggaaagcatggttgccccgcctggcccggcgacgcccgctcagcagcctgctgaggagtggggacgaagagcagcctaaacttagggctcgggatatttcgatgccacccaaattgccgtcctaccccaacgaggcagggaaaggagcggagcgcgcgcgcgagctgagtgagtgcttacgtcgcagcgagatctgtgctgggataattagagaggagttgggctgagccgagtcctctttcagcagcagcagccggagccgccgccgcagcccggtggggcaaccctgactcggaccgctcgggagagccccaggagaggccagcgccgcgcagcagccgccccgctgcgcccacctccccggctgctcccggagggctcacaaaggcggtggccgcccgagtggccttctccatccaggcgttcgcgtcctcctccccaccttctctcccgaaggcgaaaatggcagggccaggcgagaacctgggacagcggtggccctagccctgcgatcctcacccctcctgctaggagaggctgcgggctgcccgcggacgatgtggccgcggctgctcccgagcgcatcttcggcccgggtccccgccgccacccctcttctctgctccttccatcccgcccagaggagttgatgccgctgtcgccgccgccgccgctgctgaagccgcggctgatggatgccagggagtgccgcattgcttagcgaccccgcctctgggtttgctgatgatctctctccgccctggagctcagcgctgaagagctaccttattattaatcagaatttccatcgccacccctggcaggcgtatccttcagcagggaccgcaggaacattcacagtgcaggggctgagatgtgcgtgggggttgtttttgttacatcttggaagagaagagaagaggacagtaccaagatcagaaacacccgtgctaggtggaattaggggtgatttgttaggaaagagaaaggacaagaagaggagtgcggagcccttcaggggttcacatctctttaaaggaaaggaaagagggagccaaagtagggtgttgtattttagggggcagaggaagaagtttacaccccccggcccccccagctttgctgggggaaagcaggagcaacagggcacttgattggacaccaagattattaatttcctgtaggggagaggaagcaggcagcaggaggtctgggggctggagtctggtggtggcaaggaccaggtttgctttgggacagtcaacaaggtcttctgagggaaagctcagagataggcagaacaatgactcatttgcaagccggtctctcccctgagaccctggagaaagctcgcctggagctcaatgaaaacccagacacgctgcaccaggacatccaggaggtgagggatatggtcatcaccaggccggacattggctttctgcgcacggatgatgccttcatcttacgcttcttgcgggctaggaagtttcatcactttgaggccttccgcctcctggcgcagtactttgagtaccggcagcagaacctggacatgttcaaaagctttaaggccaccgaccctggcatcaagcaggcactgaaggatggcttccctgggggcctggccaatctggaccactatggcaggaagattctagtcctttttgctgccaattgggatcagagcaggtacacactggtggatattttgcgtgccatcttactttctttagaagccatgattgaagatcctgagcttcaagtgaatgggtttgttttgatcatagactggagtaacttcactttcaagcaagcctctaaactcacaccaagtatgctgcgattagctattgaaggcctgcaggatagtttcccagcgcgatttggaggaattcattttgtcaatcaaccatggtatatccatgccctgtacaccgtgatccggcctttcctgaaggagaaaactcggaaaaggatatttttgcatggtaacaacctgaacagtctacaccaactaattcatcctgagatcctgccctctgagtttggaggaatgctgcctccttatgacatggggacatgggcaagaacactgctagaccatgaatatgacgatgacagcgagtacaatgtagactcctacagcatgcctgtgaaggaagtagagaaggaactctccccaaagtccatgaagagatctcaatcagtagtggatcctacagtactaaaacgcatggataaaaatgaggaagaaaacatgcaaccattgctttctctggactaataacttctctacatccccttcatggattagaaatggaaagtattggttttcagcaacagggacaacactgtagaggaattaccagctggaaaccgacttattcatgttaatgtagcataatatataacaaggcatcaggctttccttggcctgaaccatgggggccctgggctggatttttaaaatgtcaataatttattctgtaagtgccaagttgtttgtaaatataatgtaatcttcatgtcaagtttgtaaatttcagtagtaactcagtttggaaaaaggttggctcaaaagtccatgccagtgttatgaactataacaaaaagcagaaaagacacagtcaaagctaattaaatgtagccctctttcctatgaagccatatttcagctctcatagtgattgtttcattgtttttctctgaaactctgtcagtattcaaacatactcttaacgggcacacacaactaagtgattccaggaaattttatgattaatgtatttcctgtctagtgattttcatttcagagaaatgtgtcttagtaactatcattggccttgcattttggaggcaaggaatggcagatgagctggtaaactgaacacttgaactcttctatgttgtttaattcttggaatcttgtgaaaagatgtgtttcctcaattaagacgtagaaatgtaaaaaagagtggattctttttaaa

SEQ ID NO: 5484 - DNA, 9226 bp, Homo sapiens
aaatggcgattcctctgtctaagtagtagaagtgaccgcagctcggctgctagtaaagattgcccttggtttctgagaaattctgactccctaagttcatttggcagccggcggcttctctgaaacaaagccagcaaacagctggagcgtctctggacactcacattaaaacttgtgaagagttaaaagccccagggaagagccaggccaagggcacgggtcagcgccggcttaaaagaccctctcagggcacgaggcgttcgctgcgggaatccacctgcagctgtgcggcgcggaccagggcgtgcggcgcggaccagggcttccggcgcgcgctctatccaactgcgccgcgggcgcccgagaggcgcgcgtttactgcgctcaggagctcggtgcagcctcttctggagagttgggggcggtttccagggtccggagtgtcccctgaccccgggaaagctggaacaaaagtaaaaatcttcactaacaaaatgaagatcttgctaattatatttgtcctaatcatttggactgaaacattggcagaccagagcccagggccaggccctgtgtatgcagatgtcgtgtttctggtggacagctccgatcacctgggacctaagtcattcccattcgtgaaaacgttcatcaacaaaatgatcaacagtctccccatagaggccaacaaataccgtgtagccctggcccagtacagcgacgagtttcacagtgaattccatctgagcaccttcaaaggcagaagccccatgctgaaccacctcaagaagaactttcagttcattggcgggtccctgcagataggaaaggctcttcaggaggctcataggacctacttctctgcacccataaatgggagagacaggaaacagtttcccccaattttggtggtcctggcttcggctgagtctgaggatgaagtggaagaggcttcgaaagccctgcagaaagacggggtgaaaattatctccgtgggggtgcagaaagcttctgaggaaaatctgaaggccatggccacatcccatttccatttcaaccttcggacaatcagagacctcagcacattttcccaaaacatgacacagatcatcaaggatgtaaccaagtataaggagggagccgtcgatgctgatatgcaagttcacttccccatatcctgtcagaaagattcactcgctgacctcgtgttcctggtggatgagtcacttgggaccggaggaaatttaaggcatcttcagaccttccttgagaacattaccagctccatggatgtgaaggaaaattgcatgcgacttggactgatgagttacagcaatagtgccaagactatttcttttcttaaatcaagcacaacccaatctgaatttcagcagcaaatcaagaatctttctatccaagttgggaaatccaatacaggggctgccattgatcagatgagaagagacggcttctcagagtcatatggcagcagaagagcacaaggagtgcctcagattgcagttctggtcacccacagaccatcagatgatgaggtgcatgatgctgcgctgaaccttcgactggaggatgtaaacgtgtttgccttgagcatccaaggggctaacaatacccagttagaagaaatagtgtcttatcctccagaacagacaatttccacgctgaagtcctatgcagacttagaaacttacagtacaaagttcctgaaaaagctccagaatgaaatatggtcccaaatttctacttatgctgaacaaaggaatcttgataaaactggctgtgtggatacaaaagaggctgatatccacttcctcattgatggctcaagcagcatccaggagaaacagtttgagcaaatcaagagatttatgttggaagtgacagaaatgtttagcattggcccagacaaagtccgagttggagttgtgcagtattcagatgacacagaagtggaattttatatcactgactattctaatgatattgacttaagaaaggctatttttaacattaagcaactaactggtggaacttatactgggaaagctctggattacatactgcaaataataaaaaatggaatgaaggatagaatgagcaaggttccctgttacctcattgtgttgactgatgggatgtccacagacagagtcgtggaacctgctaagagactaagggctgagcaaatcactgttcatgcagttggcattggggcagctaataaaatagaactgcaagaaattgctgggaaagaagaaagggttagctttgggcagaactttgatgctttgaaaagcataaaaaatgaagtcgttcgtgaaatctgcgctgaaaaaggatgtgaagacatgaaggccgacatcatgtttctggtggacagttcttggagtataggaaatgaaaattttaggaaaatgaaaatcttcatgaaaaacctgttaactaaaattcaaattggtgcagacaaaacccagattggtgttgttcagttcagtgataaaactaaggaagagttccagcttaatagatattttacacagcaagaaatttctgatgcaatagatagaatgtctctcatcaatgaaggcactttaactggaaaggcactaaattttgtaggtcaatacttcacccactccaagggggcccgtttgggggccaaaaaatttctcatcctcatcacagatggagtagcgcaggatgatgtgagagatcctgctagaattcttcggggcaaagatgtgaccatcttctctgtaggagtatacaatgccaatagatctcagctagaagagatcagtggggatagcagcctagtttttcatgttgagaacttcgatcatctaaaggcactagaaaggaaacttatctttcgtgtgtgtgctctccatgattgtaaaaggattacactactagacgttgtgtttgtgctggatcattcaggtagcataaaaaaacaatatcaagatcacatgattaacctaactatccatttggtgaagaaagcagatgttggcagggaccgagttcagtttggagccctcaaatactctgaccaacctaacatccttttctaccttaatacatactcgaacagatcagcaataattgagaatctgcggaagcgcagggacactggagggaacacctacactgccaaggctctcaagcacgcaaatgccctgtttacagaggaacatggcagccgcatcaagcaaaatgtgaagcagatgctgattgtcatcaccgatggggaatcccatgaccatgatcagctcaatgacacagcattggaactgagaaacaaaggcatcaccatctttgcagtgggtgtaggaaaggccaaccaaaaggaacttgagggtatggcagggaataaaaacaatactatctatgtagataattttgacaaactgaaagatgttttcacacttgttcaagaacgtatgtgtactgaagcaccagaggtctgtcatcttcaggaagctgacgtgattttcctttgcgatggctctgacagggtatctaattcagattttgtaaccatgacaactttcttgtcagacttaatcgataattttgacattcagtctcaaagaatgaaaattggtatggctcaatttggaagcaactaccagagtattattgagttgaaaaactctctgactaaaacccagtggaagactcaaattcagaatgtctccaagagcggtggatttccaagaattgactttgcccttaaaaaagtgagcaatatgtttaatctacatgctggtgggagaagaaatgctggtgtcccccaaactttggttgttatcacatctggagatcctcgctatgatgtggcagatgcagtaaaaaccctgaaggaccttggaatttgtgtcctggttttgggcataggagatgtttataaggaacatctcctgccaataacaggcaattctgaaaaaataatcacttttcaagactttgataaattaaagaatgtggatgtgaaaaaaagaatcatccgtgaaatctgccagagctgtgggaaaaccaattgctttatggacatagtggttgggtttgacatctccactcatgtgcaggggcagcctttgttccagggccacccccagctggaatcctacctcccaggcatcttagaagacatcagctctatcaagggggtgagctgtggggctggcacagaggcacaggtgagcttggcgtttaaggtgaacagtgaccaaggattccctgccaagttccaaatctatcagaaagcagtgtttgacagcttgctgcaagtcaacgtcagtgggccaactcatctgaacgcacagttcttgcggtctctttgggacacatttaaggataaatctgcatcccggggccaggtgctgcttattttttcagacggtctccagagtgaaagcaacataatgcttgaaaatcaatcagacaggctcagagaagcaggacttgatgctctgctggtagtgtcccttaacacaactgctcatcatgagttttctagctttgaatttggaaaaagattcgattacaggactcatctgactattggaatgagagaactgggcaaaaaactatcacagtacctgggaaatattgcagagaggacttgctgctgtacattctgcaaatgtccaggaattccaggacctcatgggacccgaggactacaagccatgaagggttctcaaggtctgaaaggcagcagaggacacaggggagaggatggaaaccctggagtacgaggagacacaggaccccaaggagacaaagggattgcaggatgtccaggggcgtggggtcagaagggactcaaaggattttctggacctaagggaggtcatggagacgatgggattgatggacttgatggggaagagggctgtcatggatttcctggaataaaaggagaaaaaggtgatccaggatctcagggcagcccaggttccagaggtgcccctgggcagtatggagagaagggcttcccaggggatccgggtaatccaggacaaaacaataacatcaaaggacaaaagggctccaaaggagaacaaggaagacaaggtagaagtggacagaaaggggtgcaaggcagtcctagttccagaggcagcaggggaagagaaggtcaaaggggactccgaggtgtctcaggagaaccaggaaatcctggacctacaggcacattgggagctgaaggattacaaggcccacaggggtcacagggaaatcctggcagaaaaggagaaaaaggaagccaggggcagaaaggacctcagggttctcctgggctaatgggagctaaagggagcactggaagacctggacttttggggaaaaaaggagagcctggacttcctggagatctagggccagtggggcaaactgggcagcgaggaagacagggagattctggcatcccaggctacggtcagatgggacgaaaaggagtaaagggcccaagaggattccctggagatgcggggcagaagggtgatattggtaatcctggaattcctgggggacctggacccaaaggatttaggggactagcactcactgtaggcttgaaaggtgaagagggatctcgaggactcccaggccctcctggacagagaggcattaaaggcatggcagggcagcctgtatattctcaatgtgatctgatccggtttttgcgggaacatagtctttgcagtctagaaaaatgtccagcatatccaacagagctagtatttgctctggacaattcctacgatgtcacagaagagagctttaataaaacacgggacatcatcacttccattgtcaatgaccttaacatcagggaaaataactgtcctgtgggagcaagagttgccatggtttcctataactcaggcaccagctatctcatccgctggtctgactacaataggaagaagcagctcctccagcagctttcccaaataaaatatcaagacaccacagagccccgagatgttggtaatgcaatgaggtttgtgacccgcaacgtgttcaagcggacgtatgcaggagccaacgtgaggagagttgctgtgttttttagcaatggtcaaacagccagtaggtcatccatcatcacggccaccatggagtttagtgccctggatatcagtccaacagtctttgcttttgatgagagagttttccttgaagcttttgggtttgacaacactggaacatttcaggtgattccagttcctccaaatggggaaaatcaaacattagaaagacttcggcgctgtgcactttgctatgataaatgttttccaaatgcttgcattcgagaggctttcttacctgaagattcatacatggatgtagtcttcctcatagacaattctcggaatatagcaaaggatgagtttaaggctgtgaaagccttggtgagctcagtgattgacaacttcaacattgcttcagaccctttaatctcagactctggtgataggattgctttgttgagctattctccttgggaaagttccaggagaaagatgggtacagtaaaaacagagtttgatttcatcacttatgacaaccaactcctaatgaagaatcacatccagacttccttccaacagctaaatggagaagcaacaattggtcgtgccctactgtggaccactgaaaatctttttccagaaacaccctatctaagaaaacacaaggtcatctttgtggtctcagctggagaaaattatgagagaaaagaatttgtaaaaatgatggctttgagggctaagtgtcaaggctacgtcatatttgtgatttctctgggctctacacgtaaggatgacatggaggagttagccagctacccacttgatcaacacctgatacagcttgggagaatacataaaccagatctgaattatattgcgaagttcttaaagccatttttatactcggtcaggcggggattcaatcagtacccaccaccgatgcttgaggatgcctgtagactcatcaatttaggaggagagaatattcaaaatgatggtttccaatttgttactgagctacaagaggattttttgggaggtaatggcttcattggccaagaattaaattctgggagagaatcaccttttgtaaagacggaagacaatggaagtgactatttggtttaccttccaagccaaatgtttgagccacaaaaattaatgatcaattatgaaaaagatcaaaaatctgcagaaattgcaagtctcacttctggacatgaaaattatggcagaaaagaagaaccagatcatacttatgaacctggagatgtctctcttcaagaatattacatggatgtggctttcctcatagatgcttcccaaagagtaggaagtgatgagtttaaggaagtaaaagcttttataacctcagtgcttgattactttcacattgcccccactccactgacctccaccttaggagacagggttgctgtcctgagctactctcctccaggctatatgcctaacactgaagaatgccctgtctacctggaatttgatttggttacttataacagtatacaccaaatgaaacatcatctccaagactctcaacagctcaatggagatgtttttattggccatgccttgcagtggacaattgacaatgtctttgtaggaacccccaatctgaggaaaaacaaagttatctttgtaatatctgctggcgaaaccaactctttagacaaagacgtcttaaggaatgtgtctctgagagccaagtgtcaaggctactccatatttgtgttttcctttggccctaaacacaatgacaaagaattagaagaattagccagccaccctctggatcatcacttggtccaacttggccgaacccacaagccagattggaactatatcatcaagtttgtcaagccatttgtccatttaatcagacgtgccatcaacaaatatcccaccgaagatatgaaagccacatgtgttaacatgacctctcccaacccagagaacggtggcacagaaaacactgtattacttcttcctgggatatatgaaataaagacagaaaatggtgatctgtttgatgaatttgattcccaggcacaacatctccttgtattagggaacaatcatagtagtggttctgagacagctactgatttgatgcagaagttatatctgctcttttcaactgagaaactggcaatgaaagacaaggaaaaagcacatttagaagaaatttcagctctagtggttgataaacagcaagaaaaagaagataaggaaatggaagctacagacatctgaagcatcttacctaagaattcagtaattaatccaatactttcgtcatagtgattcatactctatgtttatagaacatggtgaagatacaaggtcatcataggagaaaagaagatagctccactgacatgtataatcccatgtggttctaaccagaatgtataatcatctgttagaggtactgtggtaaatgacagggacttttcacaaaaacaattggctaatagcatgctaaatttgttctccatctcaaatcttgaggagaagaattttcggagtgaagacatcagtaagaagacctgacaaaccaggaatgatttcatttctcctgagaactggggaaaccgacctataagagttaacttttctttgaaagctctgcacagttcaggcatcaattttgatgatgtatctgcctgtaaaagattgtcattattttcaacacatctgtatctcagattggactcctctaaaagcatttggaattggaatttcctaggaatatcttctactaattcttaaaactggaaagccatgcccatgtcatcggttctggggtgaccctaacatttcatctagcagtgattgtcttctaaaacccacctgtcaggctgctatgacccatagttaatgctttctcttcaccaggacattgacaaaagaatggaattggtgaaaaagaaaaaagtgataagaggctaattttatgaaccatattttttgctgtaatcttttgtttaaattttagcagctttgctttgtgtatactgaatttttgcagcaaaagaattacggaaaagcacagatactctatatgaccagagatgttcttgggaattacaatgtagcaagagataatttctaaaataaaaacaagtctgacttgg

SEQ ID NO: 5485 - DNA, 4359 bp, Homo sapiens
tttgtttctgcactctacattgttttaatgaaaataaaatgttattttaagaaaaaaggttttcttctgattttctgcacaaccagacgtttgtttgtttgctttaaaatgtttcaacaaaatcctggtttgtttcgaaatatgttggattagcatttaacacctcatcggtcactaaagcccagtcagttcaccagccccaacacagcctcggctaaaagaacatcagagcaaacagagctgggcctttaaaagtggcaaacaaatgccacacaccgcctaaagaaggggggttgggggaggggagggttaaggcgaacttgggtccaaatgagtttgaagggaatacaaagaacgaaaagtcagcacaagttttcctaaagctagctcgcgaacgcaagcgtcgcgaacaagggcttttgtgcatgctaattgcgccattggtgcgcaaaagttccgacgcgaagtgtgaactctcaacagaaggaaacatgagacaactgaagtgccctggtttatgtgccctgctcctcctccgctgccgcctccccttctttctccttcctcccgccgagcccgctgttgcagcttgtttgcactggggcttatccggagcggaaattcctttccgtttttgtgaatgacaaactcattaacaattcatcaacacaacctgttccagccggcccgtccccacggcaacagccccttccgcagcacgctcattggctggcccggagaatgtatccattgagacgctcgctgtttgtatccattgaggagctgcctcgcgcagggggtgtgcgaggctgagtccaagagatagcaaatcgagtcttaaataatccggggagaaagacgcccgggtagatttgaggtgcagccttggagggagggattagaagccgctagactttttttcctcccctctcagtagcacggagtccgaattaattggatttcattcactggggaggaacaaaaactatctgggcagcttcattgagagagattcattgacactaagagccagcggctgcagctgggtgcagagagaacctccggctttacttctgtctcgtctgccccaaccgctagcctcggcttgggtaaggcgaggcggaattaaaccccgctccgagagcggcagcttcgcgcgcggtgcgctcggcctatgcctgccccgaggggcgtctggtaggcaccccgccctctcccgcagctcgacccccatgatagatacgctcagacccgtgcccttcgcgtcggaaatggcgatcagcaagacggtggcgtggctcaacgagcagctggagctgggcaacgagcggctgctgctgatggactgccggccgcaggagctatacgagtcgtcgcacatcgagtcggccatcaacgtggccatcccgggcatcatgctgcggcgcctgcagaagggtaacctgccggtgcgcgcgctcttcacgcgcggcgaggaccgggaccgcttcacccggcgctgtggcaccgacacagtggtgctctacgacgagagcagcagcgactggaacgagaatacgggcggcgagtcggtgctcgggctgctgctcaagaagctcaaggacgagggctgccgggcgttctacctggaaggtggcttcagtaagttccaagccgagttctccctgcattgcgagaccaatctagacggctcgtgtagcagcagctcgccgccgttgccagtgctggggctcgggggcctgcggatcagctctgactcttcctcggacatcgagtctgaccttgaccgagaccccaatagtgcaacagactcggatggtagtccgctgtccaacagccagccttccttcccagtggagatcttgcccttcctctacttgggctgtgccaaagactccaccaacttggacgtgttggaggaattcggcatcaagtacatcttgaacgtcacccccaatttgccgaatctctttgagaacgcaggagagtttaaatacaagcaaatccccatctcggatcactggagccaaaacctgtcccagtttttccctgaggccatttctttcatagatgaagcccggggcaagaactgtggtgtcttggtacattgcttggctggcattagccgctcagtcactgtgactgtggcttaccttatgcagaagctcaatctgtcgatgaacgacgcctatgacattgtcaaaatgaaaaaatccaacatatcccctaacttcaacttcatgggtcagctgctggacttcgagaggacgctgggactcagcagcccatgtgacaacagggttccagcacagcagctgtattttaccaccccttccaaccagaatgtataccaggtggactctctgcaatctacgtgaaagaccccacacccctccttgctggaatgtgtctggcccttcagcagtttctcttggcagcatcagctgggctgctttctttgtgtgtggccccaggtgtcaaaatgacaccagctgtctgtactagacaaggttaccaagtgcggaattggttaatactaacagagagatttgctccattctctttggaataacaggacatgctgtatagatacaggcagtaggtttgctctgtacccatgtgtacagcctacccatgcagggactgggattcgaggacttccaggcgcatagggtagaaccaaatgatagggtaggagcatgtgttctttagggccttgtaaggctgtttccttttgcatctggaactgactatataattgtcttcaatgaagactaattcaattttgcatatagaggagccaaagagagatttcagctctgtatttgtggtatcagtttggaaaaaaaaatctgatactccatttgattattgtaaatatttgatcttgaatcacttgacagtgtttgtttgaattgtgtttgttttttcctttgatgggcttaaaagaaattatccaaagggagaaagagcagtatgccacttcttaaaacagaacaaaacaaaaaaagaaaattgtgctcttttctaatccaaagggtatatttgcagcatgcttgactttaccaattctgatgacatctttacggacactattatcactaagaccttgttatggcgaagtctttagtctttttcatgtattttcctcatgattttttctctttatgtagtttgactatgccttacctttgtaaatatttttgcttgtgttgtcgcaaaggggataatctgggaaagacaccaaatcatgggctcactttaaaaaaagaaagaataaaaaaaccttcagctgtgctaaacagtatattacctctgtataaaattcttcagggagtgtcacctcaaatgcaatactttgggttggtttctttcctttaaaaaaatttgtataaaactggaagtgtgtgtgtgtgagcatgggtacccatttgataagagaaatgcatttgattgtgaagaagggagagttaaattctccattatgttcgtggtgtaaagtttagagctggaatttattataagaatgtaaaaccttaaattattaataaataactattttggctattgaatgtgtgtttttaaaaactcagttatacctatgtgtgaagtgacacattttagaactttttcattcagggattgattttgacttgtaggcatagtagggcaaggttcttttaagcttttcctagaacgtttttcagcagcagtttatgaaattcatcgtttgccacgaataaagatgacatcctagaatggaccgactgtaccgtgtatatgaacaatacctcttatgagtatagttccggcttaagattttaaagcccctgaagaaaaatgaacctatagagcatagcttgctgaggaatacaatttggatattaaccacagagaggtgtagcagaataccaagatgacagccacatgttaacctcctccctatccttcactgtcaggatcttctgctttataatgctgagataatgccaaagaggaagtagggataattctttttccagtctgttgtcatgggcaattctacctgcagatatcctagtgtgagaatgctgaatccagaatgatgtctccactttttcccctagcatgcgcatggcaaggcatatctaagcttcctcaccgtgtcaggatatggctttagaattttacattggcacttaggaggcaactttgtcatccctgttgtaatgtgcttttttgtttaactggcttgggatgtgggtcagaaacccttattgaaacttgtggggattattttagtttcttttcaagctaaagactttatatcttgccatttttcttgggacctaccctctccttacctcaaatgtaaaaata

SEQ ID NO: 5486 - DNA, 7052 bp, Homo sapiens
gaatgaaccagggagtttcattctgtctcactggagaggaggcagggacagacccagcagcacccacctgagcgagaagagcagacaccgtgctcctggaatcacccagcatgttgcaaggtctcctgccagtcagtctcctcctctctgttgcagtaagtgctataaaagaactccctggggtgaagaagtatgaagtggtttatcctataagacttcatccactgcataaaagagaggccaaagagccagagcaacaggaacaatttgaaactgaattaaagtataaaatgacaattaatggaaaaattgcagtgctttatttgaaaaaaaacaagaacctccttgcaccaggctacacggaaacatattataattccactggaaaggagatcaccacaagcccacaaattatggatgattgttattatcaaggacatattcttaatgaaaaggtttctgacgctagcatcagcacatgtaggggtctaaggggctacttcagtcagggggatcaaagatactttattgaacctttaagccccatacatcgggatggacaggagcatgcactcttcaagtataaccctgatgaaaagaattatgacagcacctgtgggatggatggtgtgttgtgggcccacgatttgcagcagaacattgccctacctgccaccaaactagtaaaattgaaagacaggaaggttcaggaacatgagaaatacatagaatattatttggtcctggataatggtgagtttaaaaggtacaatgagaatcaagatgagatcagaaagagggtatttgagatggctaattatgtcaacatgctttataaaaagctcaatactcatgtggccttagttggtatggaaatctggactgacaaggataagataaagataaccccaaatgcaagcttcaccttggagaatttttctaaatggagggggagtgttctctcaagaagaaagcgtcatgatattgctcagttaatcacagcaacagaacttgctggaacgactgtgggtcttgcatttatgtctacaatgtgttctccttattctgttggcgttgttcaggaccacagcgataatcttcttagagttgcagggacaatggcacatgaaatgggccacaactttggaatgtttcatgacgactattcttgcaagtgtccttctacaatatgtgtgatggacaaagcactgagcttctatatacccacagacttcagttcctgcagccgtctcagctatgacaagttttttgaagataaattatcaaattgcctctttaatgctccattgcctacagatatcatatccactccaatttgtgggaaccagttggtggaaatgggagaggactgtgattgtgggacatctgaggaatgtaccaatatttgctgtgatgctaagacatgtaaaatcaaagcaacttttcaatgtgcattaggagaatgttgtgaaaaatgccaatttaaaaaggctgggatggtgtgcagaccagcaaaagatgagtgcgacctgcctgaaatgtgtaatggtaaatctggtaattgtcctgatgatagattccaagtcaatggcttcccttgccatcacgggaagggccactgcttgatggggacatgccccacactgcaggagcagtgcacagagctgtggggaccaggaactgaggttgcagataagtcatgttacaacaggaatgaaggtgggtcaaagtacgggtactgtcgcagagtggatgacacactcattccctgcaaagcaaatgataccatgtgtgggaagttgttctgtcaaggtgggtcggataatttgccctggaaaggacggatagtgactttcctgacatgtaaaacatttgatcctgaagacacaagtcaagaaataggcatggtggccaatggaactaagtgtggcgataacaaggtttgcattaatgcagaatgtgtggatattgagaaagcctacaaatcaaccaattgctcatctaagtgcaaaggacatgctgtgtgtgaccatgagctccagtgtcaatgtgaggaaggatggatccctcccgactgcgatgactcctcagtggtcttccacttctccattgtggttggggtgctgttcccaatggcggtcatttttgtggtggttgctatggtaatccggcaccagagctccagagaaaagcagaagaaagatcagaggccactatctaccactggcaccaggccacacaaacagaagaggaaaccccagatggtaaaggctgttcaaccccaagagatgagtcagatgaagccccatgtgtatgatctgccagtagaaggcaatgagcccccagcctcttttcataaagacacaaacgcacttccccctactgttttcaaggataatccagtgtctacacctaaggactcaaatccaaaagcatgaagcaacagctaagcaagaactaatggctaaattatcaacttggaaaactggaaaatctggatggcagagaaatatactatctatctcaccagtatttgctctcgactcaagaaggttaacattttctgattcatgttagactttgaagagactaaagaaaattttcaagaggaacatatgcctgagaacctttgcatgaatttaaaatttcaattatccattcttataagaaggaagatgattgtaaagaaatatctccgaagttaaaatctgtaataggaattgattcattctctaatgaaaacaaaacataaaaacatcacactaatcttggaggaataagaaaaattgtacatccattaaatgtacaattgattgcaacatcttgattgttttaaccattaacttgtcaaattacaatcacagttaagaaaatgatgtaaaattctgttttgtggatctctttcctagattagcttctgaaatcattattagctatatcatttgaggttttctacaatttggtataactaagaatttaaaaatgttttatcatatatatttgtataattaattactggcatggttaaagtggttttcactttttaaatggagaaaatttcagttaaattaataggataaaccaggttgcgaactggtgacctgtaggccatgtttgcactgcaaatatatttggtctgaatgatattgatattggacacatagtacttttacatgttttgaatgtattgctaatatttaaaaattgagagatcttgcataaacaatagattcccagctttgtcagatgtaatctaaaagtaatccgatgctttgtcaacaacagacttacattgcccatagcaaccgtcagcttagttgatgggtaatgtagcaaacactattggtttcctaccaaataatcccctttttcctggcttttagaacaataattttgttcacctgcccacttctaggaaagaatatcctatctaatctatctatctcagggataaatccctatccttttaagtaagtcaagtcaattaaaataacctcatttttccttgctagtggtcgacttggagatgattttataatcctccccctccctttttttttttgctagtaagacgacagaggaattatgttacaacacttctggaaaatttttcctcgtctctttttctggatatgggcatctgaatactctagctggtactgctgcgctccacacggtgattatgaaggctgaaaaagatagatagagcagaaagatgaaaagaataaaacctggcctttcaatgatgtcatggaattggtagatcagtgactgctggagttacctcacactttcttggtactccttattatatgagccatacattttccttgttgtttaagccattttgaattggattttctctcactttcaacagagatcatcctaactagtaaagtagctgtttccataatcagggaacatgctttagttcatcatcacagctacagtttttcttgtatttgtctgcttcacccatttctatcaatcacttacctggtccccacaggcctgtcgcttcatgaggaactttatggttcatttacccttgcagtatgaggttctagataagcccactctggcctcaaaagtgaagctcagtcctcaggaaatccagagtccactgatcaaatcactgtcaaggatacaggctttttctccatgtggcatttgcagaagaacaactttaaaagtagagctttatctgccctgtgaggtttcagaagaccctcccctgacccagaaataaatccctatttcctggaaagccattatgtactcgtgaccaacttgtgaacttttctgtgttgttgttgttgttttttaaatatctgtccccagtaatagattcacctaatccttttttatactgatggaatggaaatcttaaatctatgaatcctcaactagccatgtaccataacccaagcaaaaactaaaccatacactctcaaaagcagtggcatgtgaacatgcctgcaagttcctaaatgatgtcactaggtccctgatgcagatgcatcatacgtcctatttgaagagaagaaatgcagtacaatgacaggaaaaccattattttatcatagaactgcgaacccaagtcctacaatgtttccctttcagctcaactgcagaatagtttagaacagactttttgatttcacaatactgtttccacacttacttatatccgtaactttctaactttaagggaattccgcttatttgacatttaactacctcagatatgccaccaaacctgttttcatcattagttatttttaccttgtctactttaaaacagtgaaattattaggttaaattatgtttttatccagttactctaagataccttagtgtttgtctacttattacaactcaccaaattactggttttatatggcctttgggaaggcttttagctttttataaaataatgaagtatgcatgaaaagaaagcaaattttagttggttgcagtcagagaatatggaaagggttattattataattaggattttattattcacattggaaatcactgctatgtgttaaggaattgaaggtggcctctggctagcagccattaagaaaatgagcccctgagttcaacgaccctcaaatgaagtgaagtctaccaataaccactgaataagcttggaattttagattccttcccagctgaatcttgacttcagccttgtgagacaccctgaagtagaggatgcagctaaattttgtccagattacacacccacagaaactgtatgataattaatatgtgttgtttaaagttgttatggtttggagatatttgttatgcagcaatagatagctgatacaaggaagtagagaacaaacattttctattagtctgttttcacatggctataaagaataccacctgagactgggtaatttataaagaaaggaggattaattgactcagatttccacatggcctaggaggcctcaggaaacttacaatcatgatgaaagaggaagcagaaacatctcatatgatggaagatgtgtatgaaggaggaactgtcaaacacttataaaaccatcagatctcttgagagcttactatctcgacaaaagcatgggggaaaccacccccatgatccaatcacctcccacctggtccctccctcaacatgtggagattatagcaattaaaaaaatgagatttggggggatggacacagagccaaaccatataatgttttaaatgctccagataggtttaggtaaaattaactatatttaataggctttcatcactgcaaaactttttttcctttctttgtgtctctagtctcttccatttgttctcccttctttactagcaccgaggatttgcttgaaatctctgatagccagtattctcatttatcatattctttctcactttgtgtttccttggtaattttggataactccttaaatttatcttccaaattactggtttttatattctgtactgtcagtcctcctgttcactaatttcaaaatttatagttgtttctcttgtttacttatatagttgtttctcttgtttacttaataacattctcttctttcctatcagtttaattttataaaggctaaccaattaactgtttttaacttatatttccagatattttaaaaattaaagcaaaatgtgtataaactttattactgcttcccacagtaaatatttttcagaagtacatgctttctcagccacttgactagtatgttccccatcattcaaagacaccattatttcctaagtgttatattgctatttttcagttggtgcatccaatattattatcagctttaatattgtttcatcatatgtcattgttcaaagaatccatctcttgagcgtaagctaaataatttgcatacactagcatctggatgtaatatggaaaaatatggaaatggttggggtgataagcaagtcttgcatattcttttctcctcaattttttttctccaaagtgggccaagccaagagtggcacagctgtgtggagatactgagctccaccttgtcagggaagatcccaactcaggagaaaacacctctaacaaaatctgtagccacgttggcacatctgcccttgaattcactttgtctcttttgctgcttccataaaaaggctttcccttgacaatgttaggcactttttagcaactaggcctgggtggtctgctacaatgcccaacacttaatacagtatcactattactgttagtagtatgctaagcgaatactattgttataaaaaaaatcctaagcatgaaaattacggtatacaatttattgtgaaggcaacttcttgtgaacattaaacggtttatctccttcacctcatattaaagtccatactcttgggatatatctgacatctcaatattaaatgactaagatgactaagtcgtttatgttgctcccacctcacacaaagttaaaactatttgttactttaaatagtttgacaatgttattttaaaatctggacaaatcacaaatataaaatacttatttaatttt

SEQ ID NO: 5487 - DNA, 3310 bp, Homo sapiens; identical to SEQ ID NO: 2420

SEQ ID NO: 5488 - DNA, 4057 bp, Homo sapiens
ggagcaggagcctcgctggctgcttcgctcgcgctctacgcgctcagtccccggcggtagcaggagcctggacccaggcgccgccggcgggcgtgaggcgccggagcccggcctcgaggtgcataccggacccccattcgcatctaacaaggaatctgcgccccagagagtcccgggagcgccgccggtcggtgcccggcgcgccgggccatgcagcgacggccgccgcggagctccgagcagcggtagcgcccccctgtaaagcggttcgctatgccggggccactgtgaaccctgccgcctgccggaacactcttcgctccggaccagctcagcctctgataagctggactcggcacgcccgcaacaagcaccgaggagttaagagagccgcaagcgcagggaaggcctccccgcacgggtgggggaaagcggccggtgcagcgcggggacaggcactcgggctggcactggctgctagggatgtcgtcctggataaggtggcatggacccgccatggcgcggctctggggcttctgctggctggttgtgggcttctggagggccgctttcgcctgtcccacgtcctgcaaatgcagtgcctctcggatctggtgcagcgacccttctcctggcatcgtggcatttccgagattggagcctaacagtgtagatcctgagaacatcaccgaaattttcatcgcaaaccagaaaaggttagaaatcatcaacgaagatgatgttgaagcttatgtgggactgagaaatctgacaattgtggattctggattaaaatttgtggctcataaagcatttctgaaaaacagcaacctgcagcacatcaattttacccgaaacaaactgacgagtttgtctaggaaacatttccgtcaccttgacttgtctgaactgatcctggtgggcaatccatttacatgctcctgtgacattatgtggatcaagactctccaagaggctaaatccagtccagacactcaggatttgtactgcctgaatgaaagcagcaagaatattcccctggcaaacctgcagatacccaattgtggtttgccatctgcaaatctggccgcacctaacctcactgtggaggaaggaaagtctatcacattatcctgtagtgtggcaggtgatccggttcctaatatgtattgggatgttggtaacctggtttccaaacatatgaatgaaacaagccacacacagggctccttaaggataactaacatttcatccgatgacagtgggaagcagatctcttgtgtggcggaaaatcttgtaggagaagatcaagattctgtcaacctcactgtgcattttgcaccaactatcacatttctcgaatctccaacctcagaccaccactggtgcattccattcactgtgaaaggcaaccccaaaccagcgcttcagtggttctataacggggcaatattgaatgagtccaaatacatctgtactaaaatacatgttaccaatcacacggagtaccacggctgcctccagctggataatcccactcacatgaacaatggggactacactctaatagccaagaatgagtatgggaaggatgagaaacagatttctgctcacttcatgggctggcctggaattgacgatggtgcaaacccaaattatcctgatgtaatttatgaagattatggaactgcagcgaatgacatcggggacaccacgaacagaagtaatgaaatcccttccacagacgtcactgataaaaccggtcgggaacatctctcggtctatgctgtggtggtgattgcgtctgtggtgggattttgccttttggtaatgctgtttctgcttaagttggcaagacactccaagtttggcatgaaagatttctcatggtttggatttgggaaagtaaaatcaagacaaggtgttggcccagcctccgttatcagcaatgatgatgactctgccagcccactccatcacatctccaatgggagtaacactccatcttcttcggaaggtggcccagatgctgtcattattggaatgaccaagatccctgtcattgaaaatccccagtactttggcatcaccaacagtcagctcaagccagacacatttgttcagcacatcaagcgacataacattgttctgaaaagggagctaggcgaaggagcctttggaaaagtgttcctagctgaatgctataacctctgtcctgagcaggacaagatcttggtggcagtgaagaccctgaaggatgccagtgacaatgcacgcaaggacttccaccgtgaggccgagctcctgaccaacctccagcatgagcacatcgtcaagttctatggcgtctgcgtggagggcgaccccctcatcatggtctttgagtacatgaagcatggggacctcaacaagttcctcagggcacacggccctgatgccgtgctgatggctgagggcaacccgcccacggaactgacgcagtcgcagatgctgcatatagcccagcagatcgccgcgggcatggtctacctggcgtcccagcacttcgtgcaccgcgatttggccaccaggaactgcctggtcggggagaacttgctggtgaaaatcggggactttgggatgtcccgggacgtgtacagcactgactactacagggtcggtggccacacaatgctgcccattcgctggatgcctccagagagcatcatgtacaggaaattcacgacggaaagcgacgtctggagcctgggggtcgtgttgtgggagattttcacctatggcaaacagccctggtaccagctgtcaaacaatgaggtgatagagtgtatcactcagggccgagtcctgcagcgaccccgcacgtgcccccaggaggtgtatgagctgatgctggggtgctggcagcgagagccccacatgaggaagaacatcaagggcatccataccctccttcagaacttggccaaggcatctccggtctacctggacattctaggctagggcccttttccccagaccgatccttcccaacgtactcctcagacgggctgagaggatgaacatcttttaactgccgctggaggccaccaagctgctctccttcactctgacagtattaacatcaaagactccgagaagctctcgagggaagcagtgtgtacttcttcatccatagacacagtattgacttctttttggcattatctctttctctctttccatctcccttggttgttcctttttctttttttaaattttctttttcttttttttttcgtcttccctgcttcacgattcttaccctttcttttgaatcaatctggcttctgcattactattaactctgcatagacaaaggccttaacaaacgtaatttgttatatcagcagacactccagtttgcccaccacaactaacaatgccttgttgtattcctgcctttgatgtggatgaaaaaaagggaaaacaaatatttcacttaaactttgtcacttctgctgtacagatatcgagagtttctatggattcacttctatttatttattattattactgttcttattgtttttggatggcttaagcctgtgtataaaaaagaaaacttgtgttcaatctgtgaagcctttatctatgggagattaaaaccagagagaaagaagatttattatgaaccgcaatatgggaggaacaaagacaaccactgggatcagctggtgtcagtccctacttaggaaatactcagcaactgttagctgggaagaatgtattcggcaccttcccctgaggacctttctgaggagtaaaaagactactggcctctgtgccatggatgattcttttcccatcaccagaaatgatagcgtgcagtagagagcaaagatggcttccgtgagacacaagatggcgcatagtgtgctcggacacagttttgtcttcgtaggttgtgatgatagcactggtttgtttctcaagcgctatccacagaacctttgtcaacttcagttgaaaagaggtggattcatgtccagagctcatttcggggtcaggtgggaaagcc

SEQ ID NO: 5489 - DNA, 1730 bp, Homo sapiens
gcagccccagccccagccccaggcccagcagcagcagcagcagcccctgctctcccgccgcccggagaggctctgcagccatgaagccaaccgtcccgagccttcaataccccaggtcccaaactacaggctgtcgatgacgatcccagactggctccaggcgatccagaattacatgaagaccctacagtatccttccaaccaaggtctgagcacacccagccaggggacaggcatggtgatcgcaagcctggtggcaaatctgtccccagctggtcatcaaaagctctctaaggttaatggaaacagcaaaagaaatgacccgagagtccttgcctatcaaatgccttgaagctgtcatcctgggcatctacttaaccaatgggcagccttccattgagcggttccccatcagctttaaaacctacttctcaggaaactactttcaccacgttgtgctggggatttactgcaatggccgctatggctcattgggcatgagccgcagggctgagctgatggacaagccattgacttttcggactctgagtgacctcatctttgactttgaggactcttacaagaaatacctgcacacagtcaagaaggtcaagattgggctgtacgtcccccatgagcctcatagcttccagcccattgagtggaagcagctggtcctcaacgtctcaaagatgctgagggctgacataaggaaggagctggagaaatatgccagggacatgagaatgaagggcttgtgcagtcactaagagaaaaggattatgctgacttcaggcctggctatgtttagcacttgtggacttgtcatcttcactctgcaggacctggagtggagattcctgatcaattaaaaccattctgtcatatgtgtgggatgggagcatcagaggaagaacaggctggtttctgaggcaatagagatgggactttgccttcgtgaggagaggaacttgccaagcaaacaaacacagccccggggagactgaggcattgggctgtgttcctctctctacacggcacagggagcacaatgtgaccatctgtatatctgtcttggaagtggtgcccttgctgcttgacagtacaggacgagagaggaatgtgtgtgtctccagcctccttttttagaagtcttcctgctcaatgccttctaaaccatggcatcatgattgggctggggggtggaatgtggtgctagaagaagacctgagggtggaggtcccttaggaaccagggtgattaactcctcacatctccttcagatcctgaaacctgcaagtgcccactctccgacccaagtgagaagccggggaaaatccctgtcccccagaaggagacaggcaagccccccgaggaggctcggccggcgagagaagtcccctgaggccagtgatcccacatctacttcttagaccaaaataacccacttaagcaatgacagattggagatgctggggatgcccaaattcaccagcgataatccgctggcaaatatttgaactatagccatcctgggaaaaaatactgcttttcttaataatagcagcatgctgtgtcacccagcctcttgccatgctggaaccatgtggcacagtgcacagggggcttggttgaatcccaactgtgccacgtgttagctgtgcagctgggcacatccttcctcctcggggagccttggtttcttcatccataaaagagtatcaaatgct

SEQ ID NO: 5490 - DNA, 5607 bp, Homo sapiens
atccaaggatacaatagcagttgtttgttaagagaaatttaaactcaacaccaatactgagtccagtaaaccagaaaatatgcttctggtgatttgggtggaaggccatctccagtttaagaagctttatgtgccactatcatcattgtctgttatccttgatctcctttggtgaggggaaggcgggaaagagaggacctctccgacccttggatttttcttttaagcagaggctaataaaacaaagcgcaaactgactgtcctgaggagtctgctcacaccgctgccccgcagatcattccacagaccccttgtcccatcccttctggacagacccaggactgatgagggttcgggttcgggaggtgtggtgtggtgggggcttgtgtggctgtagcggccggctttcctaaaccccagagcgggatactcgggatctgagcagaggggaaagtcatctaagaggctgctgctttacaaggtctgggcacagagctgcccctcccttcctccctgaagtttgcatgaagtgcacattaggctgtaattaggggatttgggaggagaactttcctggtgacgctttgcttttcttctgctcttggtgagaaagtgcctccttcttcccaggatcaggacctctgccatccagcgccacaaagagacattctgcacacacactcacacacgcacacacacacacactctcacactcgcccagagacaaacttaaggtgaggagaaagagcgctagcttcacttgatctccagcttccaacttaagcagaacttgagagcatccgaactcctggatttcaggacaagtgaagaagattctttgggctataaagatgaagagtctacttcttctggtgctgatttcaatctgctgggctgatcatctttcagacaactatactctggatcatgacagagctattcacatccaagcagaaaatggcccccatctacttgtggaagcagagcaagccaaggtgttttcacacagaggtggcaatgttacactgccatgtaaattttatcgagaccctacagcatttggctcaggaatccataaaatccgaattaagtggaccaagctaacttcggattacctcaaggaagtggatgtttttgtttccatgggataccacaaaaaaacctatggaggctaccagggtagagtgtttctgaagggaggcagtgatagtgatgcttctctggtcatcacagacctcactctggaagattatgggagatataagtgtgaggtgattgaaggattagaagatgatactgttgtggtagcactggacttacaaggtgtggtattcccttactttccacgactggggcgctacaatctcaattttcacgaggcgcagcaggcgtgtctggaccaggatgctgtgatcgcctccttcgaccagctgtacgacgcctggcggggcgggctggactggtgcaatgccggctggctcagtgatggctctgtgcaatatcccatcacaaagcccagagagccctgtggggggcagaacacagtgcccggagtcaggaactacggattttgggataaagataaaagcagatatgatgttttctgttttacatccaatttcaatggccgtttttactatctgatccaccccaccaaactgacctatgatgaagcggtgcaagcttgtctcaatgatggtgctcagattgcaaaagtgggccagatatttgctgcctggaaaattctcggatatgaccgctgtgatgcgggctggttggcggatggcagcgtccgctaccccatctctaggccaagaaggcgctgcagtcctactgaggctgcagtgcgcttcgtgggtttcccagataaaaagcataagctgtatggtgtctactgcttcagagcatacaactgaatgtgcccttagagcgcatcagttttaaagtcattaagaacatgtgaaaggtgttttttttttccaatatgaactcatgcaagttaccaaaactgtgataacccttttttacttactgtaaagagtcattttcataaagatcaattcattgatttgttttttgtaaagctatcattcaatatatattataaattaatataaatttaagggaagctctatgtaaggagacttagagccaaactgtttaagctgtatcatcccaacaaagtatcctttcatgaacggggcatgcaatagcttaagaattgctaggattaaattaaggaaagtaaagctactcagagcagcaggttccacaagcacaaactttacacatttgtacaattttgaaatgcactacaataaacaaattagagcaacacatttgaaatacaggcttctttacataaactgagaggttatacaaaactcagtttcacaagggaacaatctatacctttctaaaagttaatatttcaagtctctaataggcagaatattttactctttaaaatcctgcctttctgaccaaaaaaaaaaaaaaaaattcatatggattccaatccatagtaacaagcacagttaaaactcctcaataatcccatttatatgaagcatgacacataaataagcagataatatttaaccaatgaaaaagacttctaccttcttataattaaaattacacatgtctaagaggaattgttttatcttttgagtagctttaccgagttgtatttaaattctaagggccatttgctaagcagcatttagcatctactcagggcagttatatagataaactgctggacagaaaaattgtaaaatttagcagcttgattttctgttagcctatgaaatgttattgtcctataaaaataactttaaactgatttaatatttcatatttacattatatgaaaatcaattacattataaaaggaatccctaatgcagaaacaaagatgcaactttcaaaattcttattattcctatttgtatatacacgagagaacccaaccagtgcctgtgtttggggggaaaagtcaacagtgtagttctaaaccttatcccaaacagaaaatgtggttaatgatgtcactttccttgctggtcatcattaggcttaaattaaatgctgaagctgtcatcaaagagtttacactaaaatcttcagggctttaaataaaaggttaagtccagcttccaaacacaattttccacattagcagctccaatcttcttaaataaagctctgttttcctatatttttatgactgctgagaccccacagggaccaatatttgtattcaaattacatttcatggtttcccattgtttcacaatgagttctaataaatgggatttactataataatccaagtatgacatagccggtatgctttcatgaatgtttttatgtagattttcctcccatgaacatgagtaaataaatctgtttcctgaatggattgtggttgcatttaaagctctgtaataattctaataaatttactctatagagttctgtgtgtggaaggtatagaacaattggaagtccatgaaaccataactataatcatatattattcagacaaaatattgtaataaaagtaggtcctttctttcatcaaaaacatatctgaaaattttcagatgctttaatattaaaagatgacaatgttatgtatgcacatttttaagttaggttggatatgcaaactgtacaaaactataaatccaaagagtttgtaaagtttaaactcaaacactggtggtataaatagaacttgcacttctaaattaaggaagatacctaaatggtctaggatgagatgatatattatttaaagaggggactatctcccaaataacaactttaacacctcaaatatgggggctagctcattgaaagaagtccatacttgaactattattatgtatgttccgataattttgttgaaaatacaagtgggaacaaatttctattgaagcaaacatctaattttcagttatgtccagaactctactttataatgttaaatgtagtagtatttcttaacttttaaatacttactactataggaattggtgctgatcaaaatctctggagtgactgttagctgattaaaatctataccacttacacatcatttttccattcgtgtaaaaaacaaaaaatcttaacacagtgaatactgctgagcagaattttttcttctcattttgctcaaaggaccagaatttccatgccctttatactcatacttgaatgagtctttttaatgttctcattttgctgtttttccaccaaatgtctattttcctacttcattccccaagatgtctcactgagcaggtctgaaaaagaaaggttattctaatacaattcctaacagaaagttggtacaacactggctaattcagaaatcgctcctcagacttagattccaagagtatcaaagagattagatgggaggctgggccaggaacccttgttttaatgtatttgtccataattaacactggtgaccatataaggaacaaagtatatctgcacatttcactgagacatctacattggaaaacccaaacaaaaagaagcaattcaaataaaaagacaacataagaacgaaaataagttggtcacattaacactggaagccatctttaagtgagtgctgtcatattgtgtcacagtaatttttagccaaatatggcgtttgtaaatttaaactttctctcatggaaagggggctggtacctgtcaaagtgttattttatgcaacaatatagtcactttttattttggcaattagaagtagactcaaaggagattacaatttggttgctggcagccattctgggtttcttgattttagtactccaaagaatatggtggtctcatggagtagctgaccactaaggaggggaggattaaaagggaatcacttatcagtttttagcataggatgcattaagaaatatcaacggataactgacatcgttttgttaagaagttaactgtatcgtagctcactactgccagagcggcaatggatgtacaacgaaagagatgaaaaatacaaaagttattaagccacctgattaaaagaaaaccaatatttaaaggcatttaatagatatcaagtataactttgaggagaagaatcaatctgtattaccaaaaaaaaaatgttttgattttctgtaagatacaatgaactggtacattaaaagtcaattttgtgttactgcagtatcttttaattcttctgagttgtagaatcttagctatttttctttgtgtcaaactctgtcaatacattatttccaagaaaggcatttaattcattcttgttctgatacatttgacttcaaattgtaaatacgtacaattttcatttcctagtactcttgcaaagtcaaaaaaaaaaaaagagcatttatatggtgtcgctaaatcaactatagtattatcccaaaatatattgacttttttctctttgtatatgactcaaagcataattaattttgcccaccagttcagcaatcccagaaatctattgtgttgttgattagattaacacattttaaatgctttataacttaatcatgagtgctgaattaaaaaaaggtttttcttttcata

SEQ ID NO: 5491 - DNA, 10089 bp, Homo sapiens
aatcctaaccctctctcccagaacgtgtctctgctgcaaggcaccgggccctttcgctctgcagaactgcacttgcaagaccattatcaactcctaatcccagctcagaaagggagcctctgcgactcattcatcgccctccaggactgactgcattgcacagatgatggatatttacgtatgtttgaaacgaccatcctggatggtggacaataaaagaatgaggactgcttcaaatttccagtggctgttatcaacatttattcttctatatctaatgaatcaagtaaatagccagaaaaagggggctcctcatgatttgaagtgtgtaactaacaatttgcaagtgtggaactgttcttggaaagcaccctctggaacaggccgtggtactgattatgaagtttgcattgaaaacaggtcccgttcttgttatcagttggagaaaaccagtattaaaattccagctctttcacatggtgattatgaaataacaataaattctctacatgattttggaagttctacaagtaaattcacactaaatgaacaaaacgtttccttaattccagatactccagagatcttgaatttgtctgctgatttctcaacctctacattatacctaaagtggaacgacaggggttcagtttttccacaccgctcaaatgttatctgggaaattaaagttctacgtaaagagagtatggagctcgtaaaattagtgacccacaacacaactctgaatggcaaagatacacttcatcactggagttgggcctcagatatgcccttggaatgtgccattcattttgtggaaattagatgctacattgacaatcttcatttttctggtctcgaagagtggagtgactggagccctgtgaagaacatttcttggatacctgattctcagactaaggtttttcctcaagataaagtgatacttgtaggctcagacataacattttgttgtgtgagtcaagaaaaagtgttatcagcactgattggccatacaaactgccccttgatccatcttgatggggaaaatgttgcaatcaagattcgtaatatttctgtttctgcaagtagtggaacaaatgtagtttttacaaccgaagataacatatttggaaccgttatttttgctggatatccaccagatactcctcaacaactgaattgtgagacacatgatttaaaagaaattatatgtagttggaatccaggaagggtgacagcgttggtgggcccacgtgctacaagctacactttagttgaaagtttttcaggaaaatatgttagacttaaaagagctgaagcacctacaaacgaaagctatcaattattatttcaaatgcttccaaatcaagaaatatataattttactttgaatgctcacaatccgctgggtcgatcacaatcaacaattttagttaatataactgaaaaagtttatccccatactcctacttcattcaaagtgaaggatattaattcaacagctgttaaactttcttggcatttaccaggcaactttgcaaagattaattttttatgtgaaattgaaattaagaaatctaattcagtacaagagcagcggaatgtcacaatcaaaggagtagaaaattcaagttatcttgttgctctggacaagttaaatccatacactctatatacttttcggattcgttgttctactgaaactttctggaaatggagcaaatggagcaataaaaaacaacatttaacaacagaagccagtccttcaaaggggcctgatacttggagagagtggagttctgatggaaaaaatttaataatctattggaagcctttacccattaatgaagctaatggaaaaatactttcctacaatgtatcgtgttcatcagatgaggaaacacagtccctttctgaaatccctgatcctcagcacaaagcagagatacgacttgataagaatgactacatcatcagcgtagtggctaaaaattctgtgggctcatcaccaccttccaaaatagcgagtatggaaattccaaatgatgatctcaaaatagaacaagttgttgggatgggaaaggggattctcctcacctggcattacgaccccaacatgacttgcgactacgtcattaagtggtgtaactcgtctcggtcggaaccatgccttatggactggagaaaagttccctcaaacagcactgaaactgtaatagaatctgatgagtttcgaccaggtataagatataattttttcctgtatggatgcagaaatcaaggatatcaattattacgctccatgattggatatatagaagaattggctcccattgttgcaccaaattttactgttgaggatacttctgcagattcgatattagtaaaatgggaagacattcctgtggaagaacttagaggctttttaagaggatatttgttttactttggaaaaggagaaagagacacatctaagatgagggttttagaatcaggtcgttctgacataaaagttaagaatattactgacatatcccagaagacactgagaattgctgatcttcaaggtaaaacaagttaccacctggtcttgcgagcctatacagatggtggagtgggcccggagaagagtatgtatgtggtgacaaaggaaaattctgtgggattaattattgccattctcatcccagtggcagtggctgtcattgttggagtggtgacaagtatcctttgctatcggaaacgagaatggattaaagaaaccttctaccctgatattccaaatccagaaaactgtaaagcattacagtttcaaaagagtgtctgtgagggaagcagtgctcttaaaacattggaaatgaatccttgtaccccaaataatgttgaggttctggaaactcgatcagcatttcctaaaatagaagatacagaaataatttccccagtagctgagcgtcctgaagatcgctctgatgcagagcctgaaaaccatgtggttgtgtcctattgtccacccatcattgaggaagaaataccaaacccagccgcagatgaagctggagggactgcacaggttatttacattgatgttcagtcgatgtatcagcctcaagcaaaaccagaagaagaacaagaaaatgaccctgtaggaggggcaggctataagccacagatgcacctccccattaattctactgtggaagatatagctgcagaagaggacttagataaaactgcgggttacagacctcaggccaatgtaaatacatggaatttagtgtctccagactctcctagatccatagacagcaacagtgagattgtctcatttggaagtccatgctccattaattcccgacaatttttgattcctcctaaagatgaagactctcctaaatctaatggaggagggtggtcctttacaaacttttttcagaacaaaccaaacgattaacagtgtcaccgtgtcacttcagtcagccatctcaataagctcttactgctagtgttgctacatcagcactgggcattcttggagggatcctgtgaagtattgttaggaggtgaacttcactacatgttaagttacactgaaagtgttcatgtgcttttaatgtagtctaaaagccaaagtatagtgactcagaatcctcaatccacaaaactcaagattgggagctctttgtgatcaagccaaagaattctcatgtactctaccttcaagaagcatttcaaggctaatacctacttgtacgtacatgtaaaacaaatcccgccgcaactgttttctgttctgttgtttgtggttttctcatgtgtatacttggtggaattgtaagtggatttgcaggccagggagaaaatgtccaagtaacaggtgaagtttatttgcctgacgtttactcctttctagatgaaaaccaagcacagattttaaaacttctaagattattctcctctatccacagcattcacaaaaattaatataatttttaatgtagtgacagcgatttagtgttttgtttgataaagtatgcttatttctgtgcctactgtataatggttatcaaacagttgtctcaggggtacaaactttgaaaacaagtgtgacactgaccagcccaaatcataatcatgttttcttgctgtgataggttttgcaagccttttcattattttttagcttttatgcttgcttccattatttcagttggttgccctaatatttaaaatttacacttctaagactagagacccacattttttaaaaatcattttattttgtgatacagtgacagctttatatgagcaaattcaatattattcataagcatgtaattccagtgacttactatgtgagatgactactaagcaatatctagcagcgttagctgtccatatagttctgattggatttcgttcctcctgaggagaccatgccgttgagcttggctacccaggcagtggtgatctttgacaccttctggtggatgttcctcccactcatgagtcttttcatcatgccacattatctgatccagtcctcacatttttaaatataaaactaaagagagaatgcttcttacaggaacagttacccaagggctgtttcttagtaactgtcataaactgatctgaatccatgggcatacctgtgttgcaggtgcagcaattgcttggtgagctgtgcagaattgattgccttcagcacagcatcctctgcccacccttgtttctcataagcgatgtctggagtgattgtggttcttggaaaagcagaaggaaaaactaaaaagtgtatcttgtattttccctgccctcaggttgcctatgtattttaccttttcatatttaaggcaaaagtacttgaaaattttaagtgtccgaataagatatgtcttttttgtttgttttttttggttgtttgtttgttttttatcatctgagattctgtaatgtatttgcaaataatggatcaattaattttttttgaagctcatattgtatctttttaaaaaccatgttgtggaaaaaagccagagtgacaagtgacaaaatctatttaggttctctgtgtatgaatcctgattttaactgctaggattcagctaaatttctgagctttatgatctgtggaaatttggaatgaaatgcaattcattttgtacatacatagtatattaaaactatataatagttcatagaaatgttcagtaatgaaaaatatatccaatcagagccatccctaaagagtgttctcttgtcttcctttgtatcctctttggctccttcccttagcttccaccccagacatcagacctggggctgccttctctccctgccaaagcttgctgttagcattgtctgcttgccctcaactcctgccttgttccctgttgaaatgtatcaatcccgtactttatctctccaggacaaggataagtgtggctacagtaaaagtttattgctctaaacggcgctaacctgagataatgagaaaaggccagaagagattgtttgatctctgtctgtcaatatatatgcatttcaactgtgaccatctggatccagggccctttctaacctatataacgactcatttgtttggttaatgatgaatatcactggggctcttaagtcctttcgttctatccaagacttcattgtttttttctgtatgaaaaaagtgcagaatatcactcacctttcccctacttttggatcccctacacgaggatcactagcttaatgagaagcagagtaacgctattaagtctgggcaagctccttataagttgctgtgtgcttaaaagaatgtgatttatgtctggggccaaagcagttttccttcttttccctcattgaattcaagacagctagacccttgtgtagatcccaggatattacctctactccccccaacctgtgtgtgtagggagagtaacaacacgggaagaggggagggaagttggaaggagattggtcacatgttcagttgtctgagatactggtaaatgtgcgctgtttgtcaatgaaggttgcatgcctgcatttacaaggtggtctcatactgattgtgctctgtccagttagattcgtggcttctcccttggaagctacaattaaggactagttagaagcagaggctagatgtgttctctccagcccttactaactgggaaaataattgagaaatccctcttttcctcagtgaaagcccagtcattggttagaaaaatctaattgtcaaactagcattatgttccatcatatctgtgggatagtaattcatgtaagacacatttttacctctcttacaagtcaattcacttacaagccagtttcaaatcaagcttcccttgcgaggaatggagatcattatggggcttattatgactacatttcttttatgagtgaccattttaaataattaatattttatttaatattaaattattaaagacttagctagacttttaacattagatgaaccttgtgaatcatatattgcatagattagcacatgtatgcaatctaggtcatcaatttgttgaatttatacagccctagatttgagattgtggccctgagtatctggatagttgagttgtgtgtttatgtgcttatatgatagaggtgctttgttcctgcagcttagaaacagaagcagccattcactgagaagcttaagagaggaagtatcaacctcattttccaaaccagcattactttcaccgctcgtggatctgaaagattacatttagaacatttagtactattacactctcagaaactgtggtaaaaagtcacattttcaaaacttcatgcatattgtattcttgttggaaataagtcctatagtttcttaattgtcttcatgccgtccatatttaacaaacattgcaagtcctttttatatttgggtaattatttgtaatttagtgaaggagactaggggatgttttcttccaaagggaatttaaaatcaattttatggtattttgaaagtaaaatactccttaacgtgtcaatatttttaaaatgttatctcgaagttttctattgctcaggtatataatctaataaaattttttgtttgctctaaggttatttttgctattctctattttgaattatgttaaaatttgtgtgcattttatgaaatgccttttttcttattttgaaagtgtaaaattgggcatctcagagtaaaatgtgggattattagctacaaagactaggcacatcgtgaaagctcagtaactaattttcttgactgagtcctatcccagagtgtcacagattcaacagaattttcctgaagggtgatacacaccaaaatctagcttgtgtggatctgagactattgactcaaagattcaaatctacttcggaagtgactccacggtttgagtgaaaactgaggaaggactcatgcctgtatatcactagatatcttatttctccataattttaagtgttcataatttcttcttctttgatgggtgtgcaactggggcatgtttgtaccagccagcatgtgttctgcccaacagtgtgtccgtgtgtgaggttaactgattcagaactcattctcttgataaactatttcttgaaagcatttattttaagtctttatttcctgctgaaatgaagtttcatgctgtcatgcccatcttatttattctagaagaaaattttcatagaagaaaatgatttatggccaaagttacagaacattcatcttttagacttagccttagaatatcattggaaattacttggcttgaatttggttcgtttttatctttatggattatgtaccagggctattaataatacttaaaccccttattttgctatggtggttagatttttttattccttttcaattagtgctattaattattacatggtcgtattcatgcttattacagatgaactatttttagtgccagtgtaaaggattaagaataacattcaattagttggctatttcaggctttattgtacatggtaatgtttcagggagtgtgatttggtctagaatatatccagatccttgtaattatgatattgggttatgacaggattctattatttttagctatgaatggtgcttatttttccctatattaggaatgttaatatttggattatcagagtccatgttataaacagaatttacctatgcaagacaaattctaactgtgcaacattttcatgagaattaaaagttgtgtgttaaggggaaaaccctctgaatgtttttatgtgtaagtgcctaaagaaccgtagaaacagtacatcaaaagctcttataaaagaaaaactgattgaacattagccagaaacaaaatatgatttacatttttttttttggttgctgggactgaataccctaaaaactaagagatgtgagtggggaaaatgtctaattgataagaaagttgatttatattatatttacatgcatcttctaagattgcctttacagtagccaatcagaactttaaaaaaaaaaaagctaacaacatagatcctatgtgttgcccttaagactaaaatactttgcacacgtgattgaatggctcacttaagttgttgaatttccttatacatttaaagtgtacttccgttaagaattattccattttaaatgggtaactttcagcttccgaactattttcctaaacattccagttgtgtattataaaagatcaaaatatctctaggtggtagtacaattttcatttataacgtggaaaagttaactgttaggtttaacattagtattagtgtttttgcaattgctcatagaaaagaacactgaataatggttttcatacaatttttgtaaaacattcttctcccagtttgattccaaatgcttttccccaaattgtctaatatatcataagctagtgtttccttgtatttaatttttccttccaacacaatatttaggaaaaatatgaataacattgtgagtagcgggagacaacacgaaaaagaaacctttcattgttgtggaggggtaggtgttatgtgattgatgcccttcctggcgtttgttttatcctgttattttctcaaaaaagagcacggctttttcttaaatacatttaaattcagaattgcttgcaaaagattggcctggatagatagacatcctagatttaagatagtaccatcttaaaagtatgttgaaaggtaaaataaatcatttcaaaatacttaactttcctaataaggatgttaggttttcttctctttcattagctggccataagtcaaggtccttataacactaggaaattacctttttttactttcaaaattgcattatagtgaattactgtttacaaaatacacatactgtgaacagatataagtttctgtcttttataaggtttgtagaatgaatgtttttttaaagtgagtattatatgttaaatattttaagttttttataaatactagtaactgtttactaatttttgtttggtcaaatgcttgtaaatgtagctgaaagaagatagggagaaactgcggatcccaaactgttccctttttcatttcttgaaatgttaccactacagacatttttttaaggtgaataaacagttgtgatgtgctgtacctaaaatcatgtttaatcgtataaggaaacatttcaatacacttatacaggaagaaaactatagatgaagtacatgtgtgtgattcagtctgattcacagaattctgagagtaatatggaataaaacaactccacttagatgataactgaagcatttcctgccttgtgaaaatttggattttaaattgctgttagaatgggaaatttggacactttatatcattgtataatttcagaatttagtttctgtatcttttggaaaacatgattatagcaaaaacatagaaaataatctattactaaaacaccataaatgtaaaactagtatgcttggctgttaactctaaagatgttacttatgtctgtttttaaaacatgcatgtatttaacaattttatcatagtattgtcatggaaaaaataaatatattttcttacatctta

SEQ ID NO: 5492 - DNA, 2681 bp, Homo sapiens
gagtgtctactccaagacctgggacttccgtttcggtccagccgggctgcggccattgtttgtgtggactgagtgttttggccatcccggtccactctcacaggctccgttaagtgacatgaactctcaggaggactgagccagaagcggacagggcaagacgagctgtgcttgaaggaagaggggcagaaaatcgagggtcagggactgagaagctactccggtttagaaaccccagagacacccgtgtagatgggtacatcacggcttctctcccacgttaagacttaataaagaaagcctgatctttgaccagatggcagtaacatttgaagatgtgactattatttttacatgggaggagtggaaattcctggattcttctcaaaaaagactctacagggaggtcatgtgggagaactacacaaatgtcatgtcagtagaaaactggaatgagagctacaaatcccaagaagaaaaattcagatacttagaatatgaaaatttttcctactggcaaggctggtggaatgctggcgcccagatgtatgagaatcagaactatggggaaactgttcaagggacagattccaaagacctcacacagcaagatcgttcccagtgtcaggaatggttaatactctccacacaagtaccagggtatgggaactatgaactgacttttgaaagcaaaagtctcaggaacttaaaatataaaaattttatgccttggcagtccttagaaacaaaaaccactcaagactatggtagagaaatctacatgagtggttcacatggttttcaagggggcagataccgtcttggcatatccaggaaaaacctctccatggaaaaagaacagaagctcatagttcagcattcttatatcccagtggaggaagcccttccacagtatgttggggtgatatgtcaagaagacctactgagagattcaatggaagaaaagtactgtggatgtaataaatgtaaaggaatttattattggaactcacggtgtgttttccacaagagaaatcaacctggagaaaacctctgtcaatgctccatctgtaaagcatgcttctctcagagatcagacttgtatagacatccaagaaaccacataggtaagaagctgtacggatgtgatgaagttgacggtaactttcatcagagctccggagttcactttcatcagagagttcacataggggaggtaccttatagctgtaatgcatgtggtaagagcttcagccagatctctagtcttcacaatcatcaaagagtccacacagaagagaaattctataaaattgagtgtgataaagacctcagtagaaattcattacttcacattcaccagagacttcacataggagagaagccttttaaatgtaatcagtgtggtaagagttttaatcggagttcagtacttcatgttcatcagagagtccacacaggagaaaaaccatataagtgtgatgagtgtggtaagggtttcagccagagctcaaatcttcgaattcatcagttagtacacacaggagagaagtcttataaatgtgaagactgtggtaaaggctttacccagcgctcaaatcttcaaattcatcagagagtgcatacaggagagaaaccttataaatgtgatgactgtggaaaggactttagtcacagctcagatcttcgcattcatcagagagtccatacaggggagaaaccctatacttgtcctgaatgtgggaagggcttcagtaagagttcaaagcttcacactcatcaaagagtacatactggagagaaaccctacaaatgtgaagagtgtggcaagggattcagtcagcgttcacatcttctcattcatcagagagtccatacaggagaaaagccctataaatgtcatgattgtggaaagggttttagtcacagttctaatcttcacattcatcagagggtccatacaggagagaagccttatcaatgtgctaagtgtggtaaaggtttcagtcatagctcagctcttcgaattcatcaaagagtccatgcaggagagaaaccttacaaatgccgtgaatattataagggatttgatcataattcacatcttcacaataatcatagaagaggaaacttataaatattgttcatttagttaacagctttaatcaaagtttacctaacctttaaaccctataaatcctgctgttaaggaaatcttataaataacacaagtaatcccaagcaacatttatagtttcccctatctcccactaagaattatttgcttcaaaaggagatctttagaaaaaaccctatatatttaaaattatagtgtatttttctttacctactataaatataatacagtcataaatatattaaacatttaaggagaaaactcttcattctatttcattctagtctttttttctgtgcattttaatgtgcatgaaattgtgtgttcaattttgtattttcactgtcttcaaaatatttacttaaattttggtttgaattgaaactggttggccaactgttaaacgacatctcttaactcccctaaaaactccctaggaagtaacagaaaagatggaaacacatagaacttaaaactcagttttggccggtagaattcaattgtttatggacaaaagccacctaataaaagataggaaagcatt

SEQ ID NO: 5493 - DNA, 5877 bp, Homo sapiens
agaacacaaagtgagctgcacaccatatatggagaaacccgtttcttaaaactagtgatgaactcatgctctgttctgttttctcaaagctgaagtcggctaggtttgcaaagctgtgggctgagcactcaggcaatcacactctcagaaactgcggcggctctggactgcagcctcccaaggctccatgccagacaaagcatgcgtgtcacacttgctacaatagcctggatggtttcttttgtctccaattattcacacacagcaaatattttgccagatatcgaaaatgaagatttcatcaaagactgcgttcgaatccataacaagttccgatcagaggtgaaaccaacagccagtgatatgctatacatgacttgggacccagcactagcccaaattgcaaaagcatgggccagcaattgccagttttcacataatacacggctgaagccaccccacaagctgcacccaaacttcacttcactgggagagaacatctggactgggtctgtgcccattttttctgtgtcttccgccatcacaaactggtatgacgaaatccaggactatgacttcaagactcggatatgcaaaaaagtctgtggccactacactcaggttgtttgggcagatagttacaaagttggctgcgcagttcaattttgccctaaagtttctggctttgacgctctttccaatggagcacattttatatgcaactacggaccaggagggaattacccaacttggccatataagagaggagccacctgcagtgcctgccccaataatgacaagtgtttggacaatctctgtgttaaccgacagcgagaccaagtcaaacgttactactctgttgtatatccaggctggcccatatatccacgtaacagatacacttctctctttctcattgttaattcagtaattctaatactgtctgttataattaccattttggtacagcacaagtaccctaatttagttcttttggactaatacaattcaggaaagaaaaaacccaaaaaccaacctcattcacatatggctttttttttaaccaataacaattaggtgtacttctattttaaaacatttcagaaaaaaatatatgttatagcaatactcttactcaaaagaagaaatttcctaactctatcagataaactcatctttagtataaataagcattatttgcaggttgccacaggtggacttttagtaagtaacctaacccatgtttcagcttctaaatctgcaaaatgagcaaggtacagtagcacatttttaggtgattcttagtaactccagtagccttcattagttaaaaacattattattttttgcatgctgcttcgactctaaatatctggttttccctgtctttttggtttactacttccccagattcagaacagaggagtaactaggggatctgattttagaggccttaattttctgttcatggactgttaaaagtaaaaccaaactttcaaaagggataaacctaaatatttacttgttatcattagagagggaacatcaaatgctgggacatcattactaaccaatagcatcagacactggatttaatggataatcacaatggtcgtaatgtatacaaagacttatataccactttctcgtataaatttttcaaaaaatacaataataatataatttataaagaacactcttctatgaacaaccaccaccaccaaaaaaaaaaaaagccctcagaaaatttctcacaaataaggcaactaatgcctgatatctcaaaatcctttacaaaaggagatagttctagtcaaggagttttgggtatgttacttttttttcttctttttcttttcatctgcctccatcttaagtgcaatttcttcagctgtaagagctcccagtttcttattctttgctttcttaaccttttccttgatgctggccacatcaattttagtttcagtagaagctagacaaattaaaagcacaacacatgtaatactttagattttaccaagtaaaacaaagaatatatgtttaacaaagaatatatgtttaaggcagttaacttcagagtattcttataattgaataattgaaaggtgatcacagtataaaatataaaaacacttgcctaaagcagttagaaatttcttcagattaagataaaacaaatcataaaatactttatatattagtacaagtatacataaaaatggcataaatggcataattgaaccaattactggattcaactatattaagactatttccttaaatcctacttcagactaaattattttacctacattcttttccatattttggaacttctgagtcattattttccatcttgcacattaaaataatttaaaattacatgtatcccttctcaataagtttaatcagctaaccctaagctagaggtcaaaatctacttcctctaatatcaaaacgaaaatttaaagttttccaaatattaattcaatattaattgaatattcaatgaattaattcatttaatgttagattaattcattgaatattaattcaatgaatgactaattaatagtattttaacaagattttggtatatttaacaacattttggtaataaagacaataatttgagagtgtgtggaagtccccctaatagaagccaactatctaatcaatgccaaaagtgtgaacaaaatagagaaaggaagcagtgaaaaagaatgcaactttttcttaccattcaaagtacaggatcacagcataaaagaatcataagataaaacatcaaactacccagcaacctgagaagcacagagtgttaaagcctccaccgtgtggagaaactaaattagggtaactagctattgagtatattgagtaccttcaaagcactcaactgacaggttttacagactggaaattataatacttatgacatttctaccttttatataaccaataatctaccatagaatgtagtatttttaaagctattaacaagcaatatattaaaataataatgtattatatctgtttctgacccagtctatgtacaatattgctggtgagccctctcccttcagtgtgtcactgttcactttggagggttactttaggaagaggataagtgttaccacaggggaaaaaaatgcagaagaggatgcatcagaagaaatggcatgacaatgttttctcttagtgtcttttaaatactaggttagtgcgaaagtgatttctgccatttaaaaaccacaatcactttcgcactaatagctcctgaataagacctgtcagcatcctttagtctaaggtgatgagaaatccatgttaccgatatagaagccaaactctaagccaagatcacataaagagaagaaaaagtacaacttctgataattcctctttgagaggcatgacagcagagctcagggatcttcttgcatttctacagaagatgcactggctgccctgggtttgtatctttcacaacaaagagtcttttccaagcacagaccagaggtcaggagaggactgtcaatccagtttgcactgaaataggcattagctgcctctaaattataaattatctcagccatcccttgtccttaggattagtaattaatgaaatgctaagagaactgatgaaaagatacaactgtttcttaaaaagattcagacaaatttattatgggtttacttttcctaattaataaagacttttacatcatagaaagcattaccttccttaggtttcacaattggtttttccttaggtggaataaatgctttgtttctttcctcttgtctcttactgatggcttctgcttgtttagcctacattaataaataaaaaatatatcagttaaatgtatttatagttaaataattcaagtatctatgaactttgctattcatgtgagccagacataaagtgccgtacctttattgcttccattttctgccgcttcttctgatttgccttcaaaaagtattcaccactagccaattctttatcgatctgttgaaaacggtatttacaattacatcagaaataatgtagaggagaagtcatgtcctaagcaagtcacaatatccttagggtaaaaacaatggggtcaaactgatttattaataaaaatggtagtgacataaaggaaacagagtctaagctgaggggaatacatacacaaaagtgtggaggtaggaaagcacctccatggaatacaacccagagtagttcagggatatggcatggaaggtcactgattcagaaaagtgtgagaagaaactggagagagagttttggggaaaatttgaagaagcttcaatggcagacaaagtaggagggataagatttagaaatgactgtaggtttctgagaagactgtaaagaccaaagaataattttaatggagaggaatgaagaatagatgagagcctggaataaaggtagtggcatgcagaataaaagccagaactatcaggaattggtgactaattagcaaaagcaacagcttgttcattcaatatacagccaacatgtaaaatgtgtataactgacctgtctcccacttacatagcattattatatctaaggcactgttctaagctctttataattactcatttaatcctcactaacaattctttaagataggtattaccattactcccactttaggtatggggaaacttaagtatggatgggataaataactcgcccagtcacataatgaattaagtgttaagaacaagtcaatcgagacatcactgtttcaagaagcttacacagctacagaagaaagataagtcaattactacaagaaagggccataagaaataaggcaggtgttatggaagcatggtttaatgactgcatcactccactttccccctaactactatcaatttcctccatgatccaaaacttccattgttttttcactatgatcatcattttccccgtcaatcacaaatcttccctgaaagactccaaccatggttgtggaaaaaagagatgtagaaagcaatgagttcacatgctgagcagaagtagaaagggaaggctttaggatatagccaaggaagggaataatgaagcaagaacccccaggagacaggtgaagatggaattcaaagaacacatagaagaggctgatgcaggtggaagaaaacccatacgtgagagaagaggaaacagaaaggggttcttatctggtggtctcaaatatttcaataaaatgcaatgtcatatgctaaacatgggagggcactgagagaattaagaggaaacatgaattttgaatgaaattaatccaaagataaaactttctctaacttaatttggtagccacgttgcaaggaagaagtcaagtttttagactgatccaagttttagagctttgctgagaaggtgggacagaagtaaaaaggggcatgaatcaaaacaatgatgtgcaagaacaaaatggaaactggtcatggtgggaaaggaaatgaagcagaagacacctgacaaaaggaatcataacttagaaaaacggtgggtgttacaatttacaatttaagatttcagaacaagaacaaccatagagcacacagtcacaataatgttgccaaatcagagaaaagagtattgcagactaaacgaacttttatccatggaacatttacagtggctacagggtcacaaacctcctggatgcagtttataatcaatgtgaacgccccactgcacacccccatgcactcagctcaaaatatgcctatttatatttaccctcagtttcttatagctctgcacacacacacacaatatatatatatacacatatcccacctgaaatactttcaataaagtttctgaccaaa

SEQ ID NO: 5494 - DNA, 3268 bp, Homo sapiens
agtacccaagcgagccatttaacatggcggaggatgtttcctcagcggccccgagcccgcggggctgtgcggatggtagggatgccgaccctactgaggagcagatggcagaaacagagagaaacgacgaggagcagttcgaatgccaggaactgctcgagtgccaggtgcaggtgggggcccccgaggaggaggaggaggaggaggaggacgcgggcctggtggccgaggccgaggccgtggctgccggctggatgctcgatttcctctgcctctctctttgccgagctttccgcgacggccgctccgaggacttccgcaggacccgcaacagcgcagaggctattattcatggactatccagtctaacagcttgccagttgagaacgatatacatatgtcagtttttgacaagaattgcagcaggaaaaacccttgatgcacagtttgaaaatgatgaacgaattacacccttggaatcagccctgatgatttggggttcaattgaaaaggaacatgacaaacttcatgaagaaatacagaatttaattaaaattcaggctatagctgtttgtatggaaaatggcaactttaaagaagcagaagaagtctttgaaagaatatttggtgatccaaattctcatatgcctttcaaaagcaaattgcttatgataatctctcagaaagatacatttcattccttttttcaacacttcagctacaaccacatgatggagaaaattaagagttatgtgaattatgtgctaagtgaaaaatcatcaacctttctaatgaaggcagcggcaaaagtagtagaaagcaaaaggacaagaacaataacttctcaagataaacctagtggtaatgatgttgaaatggaaactgaagctaatttggatacaagaaaaaggtctcacaagaatcttttcttatctaagttgcaacatggaacccagcaacaagaccttaataagaaagaaagaagagtaggaactcctcaaagtacaaaaaagaaaaaagaaagcagaagagccactgaaagcagaatacctgtttcaaagagtcagccggtaactcctgaaaaacatcgagctagaaaaagacaggcatggctttgggaagaagacaagaatttgagatctggcgtgaggaaatatggagagggaaactggtctaaaatactgttgcattataaattcaacaaccggacaagtgtcatgttaaaagacagatggaggaccatgaagaaactaaaactgatttcctcagacagcgaagactgattgtgtttgtaaaagcttgatgaaaggacagttaagtattttgatcactgcattttgtttgaaacttgtgtcattgatgtaatttaaaacttttgtttaaagcattacagtatttttctgtgaccatcaattaatgagggtttgtgctaccagagttaaagcatatgctatcattgtattctttaagaaccttattttgataaaatgtaaatttgttgaaccctgccacatttagtatccccacccccaaatcctgttccaatgaaaaaattaaaacctgatacgaaaaaaaaaaaattccagttaacctattttgtgtctgtaggctgacctcaaccctgtaacgtaacccattaaaatgaatttctttttttttaagacagagtttctctctgttgcccaggctggagtgcagtggcgcaatttcagctcactgcaacctctgcctcccaggttcaagtgattctcctgcctcagcctcctgagtagctgggattacaggcacacaccaccacgcccagctaatttttgtatttttagtagaggcggggtttcaccatgctggtcaggatgttctccaactcctgacttcatgatccacccacctcggcctcccaaagtgctgagattacagacgtgagccactgcgtcctgcctaaaatgaattttctagatgattgaataacagtagtcctttgatagaagataatgacttggtttatggccttaatatactacttaattacttaagatgtttattaatagaatgataaatgtacagagtaacctataagcatgacatacttttgctttcagtagtttcatgtaaagaaaaaaacttgaaaatagtaatacctgagtacccatgggaataatagacactggggaggtagggtggggagcgggagcaagagctgaaaaacttacctactggggactgtgctcactacctgggtgacaggatcatacgtaccccaaacctcaacatcacacagtatactcagctaacaaacctgcccatgtgtttcctgaatctaaaataaaaatcgaaataatttttttaaaaaagaaaaagacaatagtattacccatgggacaaaatttgtactattagcaagaatcattttgtgtctcatttagaaacaatttgacttttgttccagtgtttaaactttgacaaaaatggttttgaatagatctttataacctgatgccataaatacaagattctctgataccttcatttaatatatcaatattgggcctaaaacagtattctgtaaagcttaaattggtattaactatgatcatcttgatgtctatgatagataataaacaaggtcatacataccttactaaacaattttggtttttcaccaacattttattctttaaaagatttagactaacagaattatttagcatttcgagtcatgtgctttatttagcaagtgagtaaaaatattggaatattgaagtatttgcataaaaaatcaaatggtggtgttttgtaatctctattgtatttcctattaaggtttcatatattactttcccattgttcctgaatttgttatcctatatataaacagaaacatggatgagtaccatatacttcctgactcctttatcttgttacaccacaagatactgcactatttattggagatattttgatgattagtgccaaggctggcatcatgagccaaaatagacttgttaagtcaacctcattccaaacacctgctatagatcatcaaatctaagttgccattaattgtaagatgtcctgttatttcacacacacaactagaaaagaaaaatcggtatcaattatagtatggtgctttcttattttgaattttacttattagaagagctattttagatgtatttaaacataagatttttatcacataacttgtggatacaaaaaaagagaaattgtaagcaaaataagttgggtaatatattcctaaaacctc

SEQ ID NO: 5495 - DNA, 12625 bp, Homo sapiens
gctgtccccaagccgattggtacttcttgtcaggaagaaacgccaagaggtgggagtgcctggggagggaggcaggcggtccctaccgcaggcgcggggagctgcctttccgcccctccgcctgctttccaagcctggactcttaggagtggctgaagctgcggagcgcttttggagcctgtgaatgaaccctcctcctctccctcctccttcttctcgctgagtctcctcctcggctctgacggtacagtgatataatgatgatgggtgtcacaacccgcatttgaacttgcaggcgagctgccccgagcctttctggggaagaactccaggcgtgcggacgcaacagccgagaacattaggtgttgtggacaggagctgggaccaagatcttcggccagccccgcatcctcccgcatcttccagcaccgtcccgcaccctccgcatccttccccgggccaccacgcttcctatgtgacccgcctgggcaacgccgaacccagtcgcgcagcgctgcagtgaattttccccccaaactgcaataagccgccttccaaggccaagatgttcataaatataaagagcatcttatggatgtgttcaaccttaatagtaacccatgcgctacataaagtcaaagtgggaaaaagcccaccggtgaggggctccctctctggaaaagtcagcctaccttgtcatttttcaacgatgcctactttgccacccagttacaacaccagtgaatttctccgcatcaaatggtctaagattgaagtggacaaaaatggaaaagatttgaaagagactactgtccttgtggcccaaaatggaaatatcaagattggtcaggactacaaagggagagtgtctgtgcccacacatcccgaggctgtgggcgatgcctccctcactgtggtcaagctgctggcaagtgatgcgggtctttaccgctgtgacgtcatgtacgggattgaagacacacaagacacggtgtcactgactgtggatggggttgtgtttcactacagggcggcaaccagcaggtacacactgaattttgaggctgctcagaaggcttgtttggacgttggggcagtcatagcaactccagagcagctctttgctgcctatgaagatggatttgagcagtgtgacgcaggctggctggctgatcagactgtcagatatcccatccgggctcccagagtaggctgttatggagataagatgggaaaggcaggagtcaggacttatggattccgttctccccaggaaacttacgatgtgtattgttatgtggatcatctggatggtgatgtgttccacctcactgtccccagtaaattcaccttcgaggaggctgcaaaagagtgtgaaaaccaggatgccaggctggcaacagtgggggaactccaggcggcatggaggaacggctttgaccagtgcgattacgggtggctgtcggatgccagcgtgcgccaccctgtgactgtggccagggcccagtgtggaggtggtctacttggggtgagaaccctgtatcgttttgagaaccagacaggcttccctccccctgatagcagatttgatgcctactgctttaaacctaaagaggctacaaccatcgatttgagtatcctcgcagaaactgcatcacccagtttatccaaagaaccacaaatggtttctgatagaactacaccaatcatccctttagttgatgaattacctgtcattccaacagagttccctcccgtgggaaatattgtcagttttgaacagaaagccacagtccaacctcaggctatcacagatagtttagccaccaaattacccacacctactggcagtaccaagaagccctgggatatggatgactactcaccttctgcttcaggacctcttggaaagctagacatatcagaaattaaggaagaagtgctccagagtacaactggcgtctctcattatgctacggattcatgggatggtgtcgtggaagataaacaaacacaagaatcggttacacagattgaacaaatagaagtgggtcctttggtaacatctatggaaatcttaaagcacattccttccaaggaattccctgtaactgaaacaccattggtaactgcaagaatgatcctggaatccaaaactgaaaagaaaatggtaagcactgtttctgaattggtaaccacaggtcactatggattcaccttgggagaagaggatgatgaagacagaacacttacagttggatctgatgagagcaccttgatctttgaccaaattcctgaagtcattacggtgtcaaagacttcagaagacaccatccacactcatttagaagacttggagtcagtctcagcatccacaactgtttcccctttaattatgcctgataataatggatcatccatggatgactgggaagagagacaaactagtggtaggataacggaagagtttcttggcaaatatctgtctactacaccttttccatcacagcatcgtacagaaatagaattgtttccttattctggtgataaaatattagtagagggaatttccacagttatttatccttctctacaaacagaaatgacacatagaagagaaagaacagaaacactaataccagagatgagaacagatacttatacagatgaaatacaagaagagatcactaaaagtccatttatgggaaaaacagaagaagaagtcttctctgggatgaaactctctacatctctctcagagccaattcatgttacagagtcttctgtggaaatgaccaagtcttttgatttcccaacattgataacaaagttaagtgcagagccaacagaagtaagagatatggaggaagactttacagcaactccaggtactacaaaatatgatgaaaatattacaacagtgcttttggcccatggtactttaagtgttgaagcagccactgtatcaaaatggtcatgggatgaagataatacaacatccaagcctttagagtctacagaaccttcagcctcttcaaaattgccccctgccttactcacaactgtggggatgaatggaaaggataaagacatcccaagtttcactgaagatggagcagatgaatttactcttattccagatagtactcaaaagcagttagaggaggttactgatgaagacatagcagcccatggaaaattcacaattagatttcagccaactacatcaactggtattgcagaaaagtcaactttgagagattctacaactgaagaaaaagttccacctatcacaagcactgaaggccaagtttatgcaaccatggaaggaagtgctttgggtgaagtagaagatgtggacctctctaagccagtatctactgttccccaatttgcacacacttcagaggtggaaggattagcatttgttagttatagtagcacccaagagcctactacttatgtagactcttcccataccattcctctttctgtaattcccaagacagactggggagtgttagtaccttctgttccatcagaagatgaagttctaggtgaaccctctcaagacatacttgtcattgatcagactcgccttgaagcgactatttctccagaaactatgagaacaacaaaaatcacagagggaacaactcaggaagaattcccttggaaagaacagactgcagagaaaccagttcctgctctcagttctacagcttggactcccaaggaggcagtaacaccactggatgaacaagagggcgatggatcagcatatacagtctctgaagatgaattgttgacaggttctgagagggtcccagttttagaaacaactccagttggaaaaattgatcacagtgtgtcttatccaccaggtgctgtaactgagcacaaagtgaaaacagatgaagtggtaacactaacaccacgcattgggccaaaagtatctttaagtccagggcctgaacaaaaatatgaaacagaaggtagtagtacaacaggatttacatcatctttgagtccttttagtacccacattacccagcttatggaagaaaccactactgagaaaacatccctagaggatattgatttaggctcaggattatttgaaaagcccaaagccacagaactcatagaattttcaacaatcaaagtcacagttccaagtgatattaccactgccttcagttcagtagacagacttcacacaacttcagcattcaagccatcttccgcgatcactaagaaaccacctctcatcgacagggaacctggtgaagaaacaaccagtgacatggtaatcattggagaatcaacatctcatgttcctcccactacccttgaagatattgtagccaaggaaacagaaaccgatattgatagagagtatttcacgacttcaagtcctcctgctacacagccaacaagaccacccactgtggaagacaaagaggcctttggacctcaggcgctttctacgccacagcccccagcaagcacaaaatttcaccctgacattaatgtttatattattgaggtcagagaaaataagacaggtcgaatgagtgatttgagtgtaattggtcatccaatagattcagaatctaaagaagatgaaccttgtagtgaagaaacagatccagtgcatgatctaatggctgaaattttacctgaattccctgacataattgaaatagacctataccacagtgaagaaaatgaagaagaagaagaagagtgtgcaaatgctactgatgtgacaaccaccccatctgtgcagtacataaatgggaagcatctcgttaccactgtgcccaaggacccagaagctgcagaagctaggcgtggccagtttgaaagtgttgcaccttctcagaatttctcggacagctctgaaagtgatactcatccatttgtaatagccaaaacggaattgtctactgctgtgcaacctaatgaatctacagaaacaactgagtctcttgaagttacatggaagcctgagacttaccctgaaacatcagaacatttttcaggtggtgagcctgatgttttccccacagtcccattccatgaggaatttgaaagtggaacagccaaaaaaggggcagaatcagtcacagagagagatactgaagttggtcatcaggcacatgaacatactgaacctgtatctctgtttcctgaagagtcttcaggagagattgccattgaccaagaatctcagaaaatagcctttgcaagggctacagaagtaacatttggtgaagaggtagaaaaaagtacttctgtcacatacactcccactatagttccaagttctgcatcagcatatgtttcagaggaagaagcagttaccctaataggaaatccttggccagatgacctgttgtctaccaaagaaagctgggtagaagcaactcctagacaagttgtagagctctcagggagttcttcgattccaattacagaaggctctggagaagcagaagaagatgaagatacaatgttcaccatggtaactgatttatcacagagaaatactactgatacactcattactttagacactagcaggataatcacagaaagcttttttgaggttcctgcaaccaccatttatccagtttctgaacaaccttctgcaaaagtggtgcctaccaagtttgtaagtgaaacagacacttctgagtggatttccagtaccactgttgaggaaaagaaaaggaaggaggaggagggaactacaggtacggcttctacatttgaggtatattcatctacacagagatcggatcaattaattttaccctttgaattagaaagtccaaatgtagctacatctagtgattcaggtaccaggaaaagttttatgtccttgacaacaccaacacagtctgaaagggaaatgacagattctactcctgtctttacagaaacaaatacattagaaaatttgggggcacagaccactgagcacagcagtatccatcaacctggggttcaggaagggctgaccactctcccacgtagtcctgcctctgtctttatggagcagggctctggagaagctgctgccgacccagaaaccaccactgtttcttcattttcattaaacgtagagtatgcaattcaagccgaaaaggaagtagctggcactttgtctccgcatgtggaaactacattctccactgagccaacaggactggttttgagtacagtaatggacagagtagttgctgaaaatataacccaaacatccagggaaatagtgatttcagagcgattaggagaaccaaattatggggcagaaataaggggcttttccacaggttttcctttggaggaagatttcagtggtgactttagagaatactcaacagtgtctcatcccatagcaaaagaagaaacggtaatgatggaaggctctggagatgcagcatttagggacacccagacttcaccatctacagtacctacttcagttcacatcagtcacatatctgactcagaaggacccagtagcaccatggtcagcacttcagccttcccctgggaagagtttacatcctcagctgagggctcaggtgagcaactggtcacagtcagcagctctgttgttccagtgcttcccagtgctgtgcaaaagttttctggtacagcttcctccattatcgacgaaggattgggagaagtgggtactgtcaatgaaattgatagaagatccaccattttaccaacagcagaagtggaaggtacgaaagctccagtagagaaggaggaagtaaaggtcagtggcacagtttcaacaaactttccccaaactatagagccagccaaattatggtctaggcaagaagtcaaccctgtaagacaagaaattgaaagtgaaacaacatcagaggaacaaattcaagaagaaaagtcatttgaatcccctcaaaactctcctgcaacagaacaaacaatctttgattcacagacatttactgaaactgaactcaaaaccacagattattctgtactaacaacaaagaaaacttacagtgatgataaagaaatgaaggaggaagacacttctttagttaacatgtctactccagatccagatgcaaatggcttggaatcttacacaactctccctgaagctactgaaaagtcacattttttcttagctactgcattagtaactgaatctataccagctgaacatgtagtcacagattcaccaatcaaaaaggaagaaagtacaaaacattttccgaaaggcatgagaccaacaattcaagagtcagatactgagctcttattctctggactgggatcaggagaagaagttttacctactctaccaacagagtcagtgaattttactgaagtggaacaaatcaataacacattatatccccacacttctcaagtggaaagtacctcaagtgacaaaattgaagactttaacagaatggaaaatgtggcaaaagaagttggaccactcgtatctcaaacagacatctttgaaggtagtgggtcagtaaccagcacaacattaatagaaattttaagtgacactggagcagaaggacccacggtggcacctctccctttctccacggacatcggacatcctcaaaatcagactgtcaggtgggcagaagaaatccagactagtagaccacaaaccataactgaacaagactctaacaagaattcttcaacagcagaaattaacgaaacaacaacctcatctactgattttctggctagagcttatggttttgaaatggccaaagaatttgttacatcagcaccaaaaccatctgacttgtattatgaaccttctggagaaggatctggagaagtggatattgttgattcatttcacacttctgcaactactcaggcaaccagacaagaaagcagcaccacatttgtttctgatgggtccctggaaaaacatcctgaggtgccaagcgctaaagctgttactgctgatggattcccaacagtttcagtgatgctgcctcttcattcagagcagaacaaaagctcccctgatccaactagcacactgtcaaatacagtgtcatatgagaggtccacagacggtagtttccaagaccgtttcagggaattcgaggattccaccttaaaacctaacagaaaaaaacccactgaaaatattatcatagacctggacaaagaggacaaggatttaatattgacaattacagagagtaccatccttgaaattctacctgagctgacatcggataaaaatactatcatagatattgatcatactaaacctgtgtatgaagacattcttggaatgcaaacagatatagatacagaggtaccatcagaaccacatgacagtaatgatgaaagtaatgatgacagcactcaagttcaagagatctatgaggcagctgtcaacctttctttaactgaggaaacatttgagggctctgctgatgttctggctagctacactcaggcaacacatgatgaatcaatgacttatgaagatagaagccaactagatcacatgggctttcacttcacaactgggatccctgctcctagcacagaaacagaattagacgttttacttcccacggcaacatccctgccaattcctcgtaagtctgccacagttattccagagattgaaggaataaaagctgaagcaaaagccctggatgacatgtttgaatcaagcactttgtctgatggtcaagctattgcagaccaaagtgaaataataccaacattgggccaatttgaaaggactcaggaggagtatgaagacaaaaaacatgctggtccttcttttcagccagaattctcttcaggagctgaggaggcattagtagaccatactccctatctaagtattgctactacccaccttatggatcagagtgtaacagaggtgcctgatgtgatggaaggatccaatcccccatattacactgatacaacattagcagtttcaacatttgcgaagttgtcttctcagacaccatcatctcccctcactatctactcaggcagtgaagcctctggacacacagagatcccccagcccagtgctctgccaggaatagacgtcggctcatctgtaatgtccccacaggattcttttaaggaaattcatgtaaatattgaagcgactttcaaaccatcaagtgaggaataccttcacataactgagcctccctctttatctcctgacacaaaattagaaccttcagaagatgatggtaaacctgagttattagaagaaatggaagcttctcccacagaacttattgctgtggaaggaactgagattctccaagatttccaaaacaaaaccgatggtcaagtttctggagaagcaatcaagatgtttcccaccattaaaacacctgaggctggaactgttattacaactgccgatgaaattgaattagaaggtgctacacagtggccacactctacttctgcttctgccacctatggggtcgaggcaggtgtggtgccttggctaagtccacagacttctgagaggcccacgctttcttcttctccagaaataaaccctgaaactcaagcagctttaatcagagggcaggattccacgatagcagcatcagaacagcaagtggcagcgagaattcttgattccaatgatcaggcaacagtaaaccctgtggaatttaatactgaggttgcaacaccaccattttcccttctggagacttctaatgaaacagatttcctgattggcattaatgaagagtcagtggaaggcacggcaatctatttaccaggacctgatcgctgcaaaatgaacccgtgccttaacggaggcacctgttatcctactgaaacttcctacgtatgcacctgtgtgccaggatacagcggagaccagtgtgaacttgattttgatgaatgtcactctaatccctgtcgtaatggagccacttgtgttgatggttttaacacattcaggtgcctctgccttccaagttatgttggtgcactttgtgagcaagataccgagacatgtgactatggctggcacaaattccaagggcagtgctacaaatactttgcccatcgacgcacatgggatgcagctgaacgggaatgccgtctgcagggtgcccatctcacaagcatcctgtctcacgaagaacaaatgtttgttaatcgtgtgggccatgattatcagtggataggcctcaatgacaagatgtttgagcatgacttccgttggactgatggcagcacactgcaatacgagaattggagacccaaccagccagacagcttcttttctgctggagaagactgtgttgtaatcatttggcatgagaatggccagtggaatgatgttccctgcaattaccatctcacctatacgtgcaagaaaggaacagtcgcttgcggccagccccctgttgtagaaaatgccaagacctttggaaagatgaaacctcgttatgaaatcaactccctgattagataccactgcaaagatggtttcattcaacgtcaccttccaactatccggtgcttaggaaatggaagatgggctatacctaaaattacctgcatgaacccatctgcataccaaaggacttattctatgaaatactttaaaaattcctcatcagcaaaggacaattcaataaatacatccaaacatgatcatcgttggagccggaggtggcaggagtcgaggcgctgatccctaaaatggcgaacatgtgttttcatcatttcagccaaagtcctaacttcctgtgcctttcctatcacctcgagaagtaattatcagttggtttggatttttggaccaccgttcagtcattttgggttgccgtgctcccaaaacattttaaatgaaagtattggcattcaaaaagacagcagacaaaatgaaagaaaatgagagcagaaagtaagcatttccagcctatctaatttctttagttttctatttgcctccagtgcagtccatttcctaatgtataccagcctactgtactatttaaaatgctcaatttcagcaccgatggccatgtaaataagatgatttaatgttgattttaatcctgtatataaaataaaaagtcacaatgagtttgggcatatttaatgatgattatggagccttagaggtctttaatcattggttcggctgcttttatgtagtttaggctggaaatggtttcacttgctctttgactgtcagcaagactgaagatggcttttcctggacagctagaaaacacaaaatcttgtaggtcattgcacctatctcagccataggtgcagtttgcttctacatgatgctaaaggctgcgaatgggatcctgatggaactaaggactccaatgtcgaactcttctttgctgcattcctttttcttcacttacaagaaaggcctgaatggaggacttttctgtaaccaggaacattttttaggggtcaaagtgctaataattaactcaaccaggtctactttttaatggctttcataacactaactcataaggttaccgatcaatgcatttcatacggatatagacctagggctctggagggtgggggattgttaaaacacatgcaaaaaaaaaaaaaaaaaaaaaaaaagaaattttgtatatataaccattttaatcttttataaagttttgaatgttcatgtatgaatgctgcagctgtgaagcatacataaataaatgaagtaagccatactgatttaatttattggatgttattttccctaagacctgaaaatgaacatagtatgctagttatttttcagtgttagccttttactttcctcacacaatttggaatcatataatataggtactttgtccctgattaaataatgtgacggatagaatgcatcaagtgtttattatgaaaagagtggaaaagtatatagcttttagcaaaaggtgtttgcccattctaagaaatgagcgaatatatagaaatagtgtgggcatttcttcctgttaggtggagtgtatgtgttgacatttctccccatctcttcccactctgttttctccccattatttgaataaagtgactgctgaagatgactttgaatccttatccacttaatttaatgtttaaagaaaaacctgtaatggaaagtaagactccttccctaatttcagtttagagcaacttgaagaagagtagacaaaaaataaaatgcacatagaaaaagagaaaaagggcacaaagggattggcccaatattgattctttttttataaaacctcctttggcttagaaggaatgactctagctacaataatacacagtatgtttaagcaggttcccttggttgttgcattaaatgtaatccacctttaggtattttagagcacagaacaacactgtgttgatctagtaggtttctatttttcctttctctttacaatgcacataatactttcctgtatttatatcataacgtgtatagtgtaaaatgtgaatgactttttttgtgaatgaaaatctaaaatctttgtaactttttatatctgcttttgtttcaccaaagaaacctaaaatccttcttttactacac

SEQ ID NO: 5496 - DNA, 3217 bp, Homo sapiens
aaagattgatctctgggctggtgaacataatctctgtcccagtcagaaaaggagagaggaaattagcagagcgattggtggagaatgatatctgtcaaaagaaacacttggagagcactgagtttagtaataggtgactgccggaaaaaagggaactttgaatattgtcaagatcgtactgagaagcactccacaatgccagactcacctgtggatgtgaagacgcaatctaggctgactcctccaacaatgccacctcccccaactactcaaggagctccaagaaccagttcatttacaccgacaacgttaactaatggcacgagccattctcctacagccttgaatggcgccccctcaccacccaatggcttcagcaatgggccttcctcttcttcctcctcctctctggctaatcaacagctgcccccagcctgtggtgccaggcaactcagcaagctgaaaaggttccttactaccctgcagcagtttggcaatgacatttcacccgagataggagaaagagttcgcaccctcgttctgggactagtgaactccactttgacaattgaagaatttcattccaaactgcaagaagctactaacttcccactgagaccttttgtcatcccatttttgaaggccaacttgcccctgctgcagcgtgagctcctccactgcgcaagactggccaaacagaaccctgcccagtacctcgcccagcatgaacagctgcttctggatgccagcaccacctcacctgttgactcctcagagctgcttctcgatgtgaacgaaaacgggaagaggcgaactccagacagaaccaaagaaaatggctttgacagagagcctttgcactcagaacatccaagcaagcgaccatgcactattagcccaggccagcggtacagtccaaataacggcttatcctaccagcccaatggcctgcctcaccctaccccacctccacctcagcattaccgtttggatgatatggccattgcccaccactacagggactcctatcgacaccccagccacagggacctcagggacagaaacagacctatggggttgcatggcacacgtcaagaagaaatgattgatcacagactaacagacagagaatgggcagaagagtggaaacatcttgaccatctgttaaactgcataatggacatggtagaaaaaacaaggcgatctctcaccgtactaaggcggtgtcaagaagcagaccgggaagaattgaattactggatccggcggtacagtgacgccgaggacttaaaaaaaggtggcggcagtagcagcagccactctaggcagcagagtcccgtcaacccagacccagttgcactagacgcgcatcgggaattccttcacaggcctgcgtctggatacgtgccagaggagatctggaagaaagctgaggaggccgtcaatgaggtgaagcgccaggcgatgacggagctgcagaaggccgtgtctgaggcggagcggaaagcccacgacatgatcacaacagagagggccaagatggagcgcacggtcgccgaggccaaacggcaggcggcggaggacgcactggcagttatcaatcagcaggaggattcaagcgagagttgctggaattgtggccgtaaagcgagtgaaacctgcagtggctgtaacacagcccgatactgtggctcattttgccagcacaaagactgggagaagcaccatcacatctgtggacagaccctgcaggcccagcagcagggagacacacctgcagtcagctcctctgtcacgcccaacagcggggctgggagcccgatggacacaccaccagcagccactccgaggtcaaccaccccgggaaccccttccaccatagagacaacccctcgctagacgtgaactcagaactgtcggaggaaagacaacacaaccaacgcgaaaccaattcctcatcctcagatgctcaaagttgttttttttgtttgtttgtttattagatgaattatcctatttcagtacttcagcaagagagaacctaactgtatcttgaggtggtagtaaaacacagagggccagtaacgggtcgtaatgacttattgtggataacaaagatatcttttctttagagaactgaaaagagagcagagaatataacatgaaatgatagatttgacctcctccctgttattttcaagtagctgggattttaaactagatgacctcattaaccgatgctttaccaaacagcaaaccaagagattgctaattgctgttgaaagcaaaaatgctaatattaaaagtcacaatgttctttatatacaataatggaaaaaaaaaaaagaggaaaaccctcaagggcatgagcattggatacagcagtagacattttaacaagaagatgaatggcgtccgtgggttgctaactgaactttgaagacccgctacaaaacgcgcagatgtgcagcagattggaaggagacacagatgttcggtttttttcctgtttctgaaaagaaataataatatccaggtcaacagaatgaaaaatgaaagatgatttgcaatgggatgtatgaatacagcagcaagaaaaaaaaatgccataatacaaaaggctccatatatatatatatatatatatatatacacacacacacacgcacatatacacacacacacacacacacacacacacacacacacacacacacacacacacacaagtaagagactcagcctgcagttaattagcattctggcagttttgacatcagccagctgccctaaataacccttcaacgtttcttcacttttgcaaggttccacagagtaagacattgggtctattccagctcattcattttatattgaaaaaaataattttaaaaatggtggcttcagctccagcccctttccaaaatttttcaaccccaccctgtttggatttttaattaaaaactagtagttctcttggtgttaaaacacttctgtcctgtgaggtttcccaatggtgtttttcttgtaaatgtgttggacaaatgtgaagatgcattgtagtttaaccatatgcccacatttagtctctttattcctagttggtgagaaacctgtatctttctatgctgcttttatatctgtatgtattagtgatatttctctagtagttaaaaaaaaaaaaaggaaaaaaagactctttttggttgtcctcaag

SEQ ID NO: 5497 - DNA, 4276 bp, Homo sapiens
gtttctcatagttggcgtcttctaaaggaaaaacactaaaatgaggaactcagcggaccgggagcgacgcagcttgagggaagcatccctagctgttggcgcagaggggcgaggctgaagccgagtggcccgaggtgtctgaggggctggggcaaaggtgaaagagtttcagaacaagcttcctggaacccatgacccatgaagtcttgtcgacatttataccgtctgagggtagcagctcgaaagtagaagaagtggagtgttgccagggacggcagtatctctttgtgtgaccctggcggcttatgggacgttggcttcagacctttgtgatacaccatgctgcgtgggacgatgacggcgtggagaggaatgaggcctgaggtcacactggcttgcctcctcctagccacagcaggctgctttgctgacttgaacgaggtccctcaggtcaccgtccagcctgcgtccaccgtccagaagcccggaggcactgtgatcttgggctgcgtggtggaacctccaaggatgaatgtaacctggcgcctgaatggaaaggagctgaatggctcggatgatgctctgggtgtcctcatcacccacgggaccctcgtcatcactgcccttaacaaccacactgtgggacggtaccagtgtgtggcccggatgcctgcgggggctgtggccagcgtgccagccactgtgacactagccaatctccaggacttcaagttagatgtgcagcacgtgattgaagtggatgagggaaacacagcagtcattgcctgccacctgcctgagagccaccccaaagcccaggtccggtacagcgtcaaacaagagtggctggaggcctccagaggtaactacctgatcatgccctcagggaacctccagattgtgaatgccagccaggaggacgagggcatgtacaagtgtgcagcctacaacccagtgacccaggaagtgaaaacctccggctccagcgacaggctacgtgtgcgccgctccaccgctgaggctgcccgcatcatctaccccccagaggcccaaaccatcatcgtcaccaaaggccagagtctcattctggagtgtgtggccagtggaatcccacccccacgggtcacctgggccaaggatgggtccagtgtcaccggctacaacaagacgcgcttcctgctgagcaacctcctcatcgacaccaccagcgaggaggactcaggcacctaccgctgcatggccgacaatggggttgggcagcccggggcagcggtcatcctctacaatgtccaggtgtttgaaccccctgaggtcaccatggagctatcccagctggtcatcccctggggccagagtgccaagcttacctgtgaggtgcgtgggaaccccccgccctccgtgctgtggctgaggaatgctgtgcccctcatctccagccagcgcctccggctctcccgcagggccctgcgcgtgctcagcatggggcctgaggacgaaggcgtctaccagtgcatggccgagaacgaggttgggagcgcccatgccgtagtccagctgcggacctccaggccaagcataaccccaaggctatggcaggatgctgagctggctactggcacacctcctgtatcaccctccaaactcggcaaccctgagcagatgctgagggggcaaccggcgctccccagacccccaacgtcagtggggcctgcttccccgcagtgtccaggagagaaggggcagggggctcccgccgaggctcccatcatcctcagctcgccccgcacctccaagacagactcatatgaactggtgtggcggcctcggcatgagggcagtggccgggcgccaatcctctactatgtggtgaaacaccgcaagcaggtcacaaattcctctgacgattggaccatctctggcattccagccaaccagcaccgcctgaccctcaccagacttgaccccgggagcttgtatgaagtggagatggcagcttacaactgtgcgggagagggccagacagccatggtcaccttccgaactggacggcggcccaaacccgagatcatggccagcaaagagcagcagatccagagagacgaccctggagccagtccccagagcagcagccagccagaccacggccgcctctcccccccagaagctcccgacaggcccaccatctccacggcctccgagacctcagtgtacgtgacctggattccccgtgggaatggtgggttcccaatccagtccttccgtgtggagtacaagaagctaaagaaagtgggagactggattctggccaccagcgccatccccccatcgcggctgtccgtggagatcacgggcctagagaaaggcacctcctacaagtttcgagtccgggctctgaacatgctgggggagagcgagcccagcgccccctctcggccctacgtggtgtcgggctacagcggtcgcgtgtacgagaggcccgtggcaggtccttatatcaccttcacggatgcggtcaatgagaccaccatcatgctcaagtggatgtacatcccagcaagtaacaacaacaccccaatccatggcttttatatctattatcgacccacagacagtgacaatgatagtgactacaagaaggatatggtggaaggggacaagtactggcactccatcagccacctgcagccagagacctcctacgacattaagatgcagtgcttcaatgaaggaggggagagcgagttcagcaacgtgatgatctgtgagaccaaagctcggaagtcttctggccagcctggtcgactgccacccccaactctggccccaccacagccgccccttcctgaaaccatagagcggccggtgggcactggggccatggtggctcgctccagcgacctgccctatctgattgtcggggtcgtcctgggctccatcgttctcatcatcgtcaccttcatccccttctgcttgtggagggcctggtctaagcaaaaacatacaacagacctgggttttcctcgaagtgcccttccaccctcctgcccgtatactatggtgccattgggaggactcccaggccaccaggccagtggacagccctacctcagtggcatcagtggacgggcctgtgctaatgggatccacatgaataggggctgcccctcggctgcagtgggctacccgggcatgaagccccagcagcactgcccaggcgagcttcagcagcagagtgacaccagcagcctgctgaggcagacccatcttggcaatggatatgacccccaaagtcaccagatcacgaggggtcccaagtctagcccggacgagggctctttcttatacacactgcccgacgactccactcaccagctgctgcagccccatcacgactgctgccaacgccaggagcagcctgctgctgtgggccagtcaggggtgaggagagcccccgacagtcctgtcctggaagcagtgtgggaccctccatttcactcagggcccccatgctgcttgggccttgtgccagttgaagaggtggacagtcctgactcctgccaagtgagtggaggagactggtgtccccagcaccccgtaggggcctacgtaggacaggaacctggaatgcagctctccccggggccactggtgcgtgtgtcttttgaaacaccacctctcacaatttaggcagaagctgatatcccagaaagactatatattgttttttttttaaaaaaaaaaagaagaaaaaagagacagagaaaattggtatttatttttctattatagccatatttatatatttatgcacttgtaaataaatgtatatgttttataattctggagagacataaggagtcctacccgttgaggttggagagggaaaataaagaagctgccacctaacaggagtcacccaggaaagcaccgcacaggctggcgcgggacagactcctaacctggggcctctgcagtggcaggcgaggctgcaggaggcccacagataagctggcaagaggaaggatcccaggcacatggttcatcacgagcatgagggaacagcaaggggcacggtatcacagcctggagacacccacacagatggctggatccggtgctacgggaaacattttcctaagatgcccatgagaacagaccaagatgtgtacagcactatgagcattaaaaaaccttccagaatcaataatccgtggcaacatatctctgtaaaaacaaacactgtaacttctaaataaatgtttagtcttccctgtaa

SEQ ID NO: 5498 - DNA, 5831 bp, Homo sapiens
tcccgggaccccgggagagcggtcaatgtgtggtcgctgcgtttcctctgcctgcgccgggcatcacttgcgcgccgcagaaagtccgtctggcagcctggatatcctctcctaccggcacccgcagacgcccctgcagccgcggtcggcgcccgggctccctagccctgtgcgctcaactgtcctgcgctgcggggtgccgcgagttccacctccgcgcctccttctctagacaggcgctgggagaaagaaccggctcccgagttctgggcatttcgcccggctcgaggtgcaggatgcagagcaaggtgctgctggccgtcgccctgtggctctgcgtggagacccgggccgcctctgtgggtttgcctagtgtttctcttgatctgcccaggctcagcatacaaaaagacatacttacaattaaggctaatacaactcttcaaattacttgcaggggacagagggacttggactggctttggcccaataatcagagtggcagtgagcaaagggtggaggtgactgagtgcagcgatggcctcttctgtaagacactcacaattccaaaagtgatcggaaatgacactggagcctacaagtgcttctaccgggaaactgacttggcctcggtcatttatgtctatgttcaagattacagatctccatttattgcttctgttagtgaccaacatggagtcgtgtacattactgagaacaaaaacaaaactgtggtgattccatgtctcgggtccatttcaaatctcaacgtgtcactttgtgcaagatacccagaaaagagatttgttcctgatggtaacagaatttcctgggacagcaagaagggctttactattcccagctacatgatcagctatgctggcatggtcttctgtgaagcaaaaattaatgatgaaagttaccagtctattatgtacatagttgtcgttgtagggtataggatttatgatgtggttctgagtccgtctcatggaattgaactatctgttggagaaaagcttgtcttaaattgtacagcaagaactgaactaaatgtggggattgacttcaactgggaatacccttcttcgaagcatcagcataagaaacttgtaaaccgagacctaaaaacccagtctgggagtgagatgaagaaatttttgagcaccttaactatagatggtgtaacccggagtgaccaaggattgtacacctgtgcagcatccagtgggctgatgaccaagaagaacagcacatttgtcagggtccatgaaaaaccttttgttgcttttggaagtggcatggaatctctggtggaagccacggtgggggagcgtgtcagaatccctgcgaagtaccttggttacccacccccagaaataaaatggtataaaaatggaataccccttgagtccaatcacacaattaaagcggggcatgtactgacgattatggaagtgagtgaaagagacacaggaaattacactgtcatccttaccaatcccatttcaaaggagaagcagagccatgtggtctctctggttgtgtatgtcccaccccagattggtgagaaatctctaatctctcctgtggattcctaccagtacggcaccactcaaacgctgacatgtacggtctatgccattcctcccccgcatcacatccactggtattggcagttggaggaagagtgcgccaacgagcccagccaagctgtctcagtgacaaacccatacccttgtgaagaatggagaagtgtggaggacttccagggaggaaataaaattgaagttaataaaaatcaatttgctctaattgaaggaaaaaacaaaactgtaagtacccttgttatccaagcggcaaatgtgtcagctttgtacaaatgtgaagcggtcaacaaagtcgggagaggagagagggtgatctccttccacgtgaccaggggtcctgaaattactttgcaacctgacatgcagcccactgagcaggagagcgtgtctttgtggtgcactgcagacagatctacgtttgagaacctcacatggtacaagcttggcccacagcctctgccaatccatgtgggagagttgcccacacctgtttgcaagaacttggatactctttggaaattgaatgccaccatgttctctaatagcacaaatgacattttgatcatggagcttaagaatgcatccttgcaggaccaaggagactatgtctgccttgctcaagacaggaagaccaagaaaagacattgcgtggtcaggcagctcacagtcctagagcgtgtggcacccacgatcacaggaaacctggagaatcagacgacaagtattggggaaagcatcgaagtctcatgcacggcatctgggaatccccctccacagatcatgtggtttaaagataatgagacccttgtagaagactcaggcattgtattgaaggatgggaaccggaacctcactatccgcagagtgaggaaggaggacgaaggcctctacacctgccaggcatgcagtgttcttggctgtgcaaaagtggaggcatttttcataatagaaggtgcccaggaaaagacgaacttggaaatcattattctagtaggcacggcggtgattgccatgttcttctggctacttcttgtcatcatcctacggaccgttaagcgggccaatggaggggaactgaagacaggctacttgtccatcgtcatggatccagatgaactcccattggatgaacattgtgaacgactgccttatgatgccagcaaatgggaattccccagagaccggctgaagctaggtaagcctcttggccgtggtgcctttggccaagtgattgaagcagatgcctttggaattgacaagacagcaacttgcaggacagtagcagtcaaaatgttgaaagaaggagcaacacacagtgagcatcgagctctcatgtctgaactcaagatcctcattcatattggtcaccatctcaatgtggtcaaccttctaggtgcctgtaccaagccaggagggccactcatggtgattgtggaattctgcaaatttggaaacctgtccacttacctgaggagcaagagaaatgaatttgtcccctacaagaccaaaggggcacgattccgtcaagggaaagactacgttggagcaatccctgtggatctgaaacggcgcttggacagcatcaccagtagccagagctcagccagctctggatttgtggaggagaagtccctcagtgatgtagaagaagaggaagctcctgaagatctgtataaggacttcctgaccttggagcatctcatctgttacagcttccaagtggctaagggcatggagttcttggcatcgcgaaagtgtatccacagggacctggcggcacgaaatatcctcttatcggagaagaacgtggttaaaatctgtgactttggcttggcccgggatatttataaagatccagattatgtcagaaaaggagatgctcgcctccctttgaaatggatggccccagaaacaatttttgacagagtgtacacaatccagagtgacgtctggtcttttggtgttttgctgtgggaaatattttccttaggtgcttctccatatcctggggtaaagattgatgaagaattttgtaggcgattgaaagaaggaactagaatgagggcccctgattatactacaccagaaatgtaccagaccatgctggactgctggcacggggagcccagtcagagacccacgttttcagagttggtggaacatttgggaaatctcttgcaagctaatgctcagcaggatggcaaagactacattgttcttccgatatcagagactttgagcatggaagaggattctggactctctctgcctacctcacctgtttcctgtatggaggaggaggaagtatgtgaccccaaattccattatgacaacacagcaggaatcagtcagtatctgcagaacagtaagcgaaagagccggcctgtgagtgtaaaaacatttgaagatatcccgttagaagaaccagaagtaaaagtaatcccagatgacaaccagacggacagtggtatggttcttgcctcagaagagctgaaaactttggaagacagaaccaaattatctccatcttttggtggaatggtgcccagcaaaagcagggagtctgtggcatctgaaggctcaaaccagacaagcggctaccagtccggatatcactccgatgacacagacaccaccgtgtactccagtgaggaagcagaacttttaaagctgatagagattggagtgcaaaccggtagcacagcccagattctccagcctgactcggggaccacactgagctctcctcctgtttaaaaggaagcatccacacccccaactcctggacatcacatgagaggtgctgctcagattttcaagtgttgttctttccaccagcaggaagtagccgcatttgattttcatttcgacaacagaaaaaggacctcggactgcagggagccagtcttctaggcatatcctggaagaggcttgtgacccaagaatgtgtctgtgtcttctcccagtgttgacctgatcctctttttcattcatttaaaaagcatttatcatgccccctgctgcgggtctcaccatgggtttagaacaaagacgttcaagaaatggccccatcctcaaagaagtagcagtacctggggagctgacacttctgtaaaactagaagataaaccaggcaatgtaagtgttcgaggtgttgaagatgggaaggatttgcagggctgagtctatccaagaggctttgtttaggacgtgggtcccaagccaagccttaagtgtggaattcggattgatagaaaggaagactaacgttaccttgctttggagagtactggagcctgcaaatgcattgtgtttgctctggtggaggtgggcatggggtctgttctgaaatgtaaagggttcagacggggtttctggttttagaaggttgcgtgttcttcgagttgggctaaagtagagttcgttgtgctgtttctgactcctaatgagagttccttccagaccgttacgtgtctcctggccaagccccaggaaggaaatgatgcagctctggctccttgtctcccaggctgatcctttattcagaataccacaaagaaaggacattcagctcaaggctccctgccgtgttgaagagttctgactgcacaaaccagcttctggtttcttctggaatgaataccctcatatctgtcctgatgtgatatgtctgagactgaatgcgggaggttcaatgtgaagctgtgtgtggtgtcaaagtttcaggaaggattttacccttttgttcttccccctgtccccaacccactctcaccccgcaacccatcagtattttagttatttggcctctactccagtaaacctgattgggtttgttcactctctgaatgattattagccagacttcaaaattattttatagcccaaattataacatctattgtattatttagacttttaacatatagagctatttctactgatttttgcccttgttctgtcctttttttcaaaaaagaaaatgtgttttttgtttggtaccatagtgtgaaatgctgggaacaatgactataagacatgctatggcacatatatttatagtctgtttatgtagaaacaaatgtaatatattaaagccttatatataatgaactttgtactattcacattttgtatcagtattatgtagcataacaaaggtcataatgctttcagcaattgatgtcattttattaaagaacattgaaaaacttgaaggaa

SEQ ID NO: 5499 - DNA, 2116 bp, Homo sapiens
catatcagaatcacactgtggtttttctgggatcagagaagggaatcatcttgaagtttttggccagaataggaaatagtggttttctaaatgacagccttttcctggaggagatgagtgtttacaactctgaaaaatgcagctatgatggagtcgaagacaaaaggatcatgggcatgcagctggacagagcaagcagctctctgtatgttgcgttctctacctgtgtgataaaggttccccttggccggtgtgaacgatatgggaagtgtaaaaaaacctgtattgcctccagagacccatattgtggatggataaaggaaggtggtgcctgcagccatttatcacccaacagcagactgacttttgagcaggacatagagcgtggcaatacagatggtctgggggactgtcacaattcctttgtggcactgaatggagtgattcgggaaagttacctcaaaggccacgaccagctggttcccgtcaccctcttggccattgcagtcatcctggctttcgtcatgggggccgtcttctcgggcatcaccgtctactgcgtctgtgatcatcggcgcaaagacgtggctgtggtgcagcgcaaggagaaggagctcacccactcgcgccggggctccatgagcagcgtcaccaagctcagcggcctctttggggacactcaatccaaagacccaaagccggaggccatcctcacgccactcatgcacaacggcaagctcgccactcccggcaacacggccaagatgctcattaaagcagaccagcaccacctggacctgacggccctccccaccccagagtcaaccccaacgctgcagcagaagcggaagcccagccgcggcagccgcgagtgggagaggaaccagaacctcatcaatgcctgcacaaaggacatgccccccatgggctcccctgtgattcccacggacctgcccctgcgggcctcccccagccacatccccagcgtggtggtcctgcccatcacgcagcagggctaccagcatgagtacgtggaccagcccaaaatgagcgaggtggcccagatggcgctggaggaccaggccgccacactggagtataagaccatcaaggaacatctcagcagcaagagtcccaaccatggggtgaaccttgtggagaacctggacagcctgccccccaaagttccacagcgggaggcctccctgggtcccccgggagcctccctgtctcagaccggtctaagcaagcggctggaaatgcaccactcctcttcctacggggttgactataagaggagctaccccacgaactcgctcacgagaagccaccaggccaccactctcaaaagaaacaacactaactcctccaattcctctcacctctccagaaaccagagctttggcaggggagacaacccgccgcccgccccgcagagggtggactccatccaggtgcacagctcccagccatctggccaggccgtgactgtctcgaggcagcccagcctcaacgcctacaactcactgacaaggtcggggctgaagcgtacgccctcgctaaagccggacgtaccccccaaaccatcctttgctcccctttccacatccatgaagcccaatgatgcgtgtacataatcccagggggagggggtcaggtgtcgaaccagcaggcaaggcgaggtgcccgctcagctcagcaaggttctcaactgcctcgagtacccaccagaccaagaaggcctgcggcagagccgaggacgctgggtcctcctctctgggacacaggggtactcacgaaaactgggccgcgtggtttggtgaaggtttgcaacggcggggactcaccttcattctcttccttcactttcccccacaccctacaacaggtcggacccacaaaagacttcagttatcatcacaaacatgagccaaaagcacatacctaccccatcccccacccccacacacacacacacacacacatgcacacaacacatacacacacacgcacagaggtgaacagaaactgaaacattttgtccacaacttcacgggacgtggccagactgggtttgcgttccaacctgcaaaacacaaatacattttttaaaatc

SEQ ID NO: 5500 - DNA, 4880 bp, Homo sapiens
gaaactgttgggagaggaatcgtatctccatatttcttctttcagccccaatccaagggttgtagctggaactttccatcagttcttcctttctttttcctctctaagcctttgccttgctctgtcacagtgaagtcagccagagcagggctgttaaactctgtgaaatttgtcataagggtgtcaggtatttcttactggcttccaaagaaacatagataaagaaatctttcctgtggcttcccttggcaggctgcattcagaaggtctctcagttgaagaaagagcttggaggacaacagcacaacaggagagtaaaagatgccccagggctgaggcctccgctcaggcagccgcatctggggtcaatcatactcaccttgcccgggccatgctccagcaaaatcaagctgttttcttttgaaagttcaaactcatcaagattatgctgctcactcttatcattctgttgccagtagtttcaaaatttagttttgttagtctctcagcaccgcagcactggagctgtcctgaaggtactctcgcaggaaatgggaattctacttgtgtgggtcctgcacccttcttaattttctcccatggaaatagtatctttaggattgacacagaaggaaccaattatgagcaattggtggtggatgctggtgtctcagtgatcatggattttcattataatgagaaaagaatctattgggtggatttagaaagacaacttttgcaaagagtttttctgaatgggtcaaggcaagagagagtatgtaatatagagaaaaatgtttctggaatggcaataaattggataaatgaagaagttatttggtcaaatcaacaggaaggaatcattacagtaacagatatgaaaggaaataattcccacattcttttaagtgctttaaaatatcctgcaaatgtagcagttgatccagtagaaaggtttatattttggtcttcagaggtggctggaagcctttatagagcagatctcgatggtgtgggagtgaaggctctgttggagacatcagagaaaataacagctgtgtcattggatgtgcttgataagcggctgttttggattcagtacaacagagaaggaagcaattctcttatttgctcctgtgattatgatggaggttctgtccacattagtaaacatccaacacagcataatttgtttgcaatgtccctttttggtgaccgtatcttctattcaacatggaaaatgaagacaatttggatagccaacaaacacactggaaaggacatggttagaattaacctccattcatcatttgtaccacttggtgaactgaaagtagtgcatccacttgcacaacccaaggcagaagatgacacttgggagcctgagcagaaactttgcaaattgaggaaaggaaactgcagcagcactgtgtgtgggcaagacctccagtcacacttgtgcatgtgtgcagagggatacgccctaagtcgagaccggaagtactgtgaagatgttaatgaatgtgctttttggaatcatggctgtactcttgggtgtaaaaacacccctggatcctattactgcacgtgccctgtaggatttgttctgcttcctgatgggaaacgatgtcatcaacttgtttcctgtccacgcaatgtgtctgaatgcagccatgactgtgttctgacatcagaaggtcccttatgtttctgtcctgaaggctcagtgcttgagagagatgggaaaacatgtagcggttgttcctcacccgataatggtggatgtagccagctctgcgttcctcttagcccagtatcctgggaatgtgattgctttcctgggtatgacctacaactggatgaaaaaagctgtgcagcttcaggaccacaaccatttttgctgtttgccaattctcaagatattcgacacatgcattttgatggaacagactatggaactctgctcagccagcagatgggaatggtttatgccctagatcatgaccctgtggaaaataagatatactttgcccatacagccctgaagtggatagagagagctaatatggatggttcccagcgagaaaggcttattgaggaaggagtagatgtgccagaaggtcttgctgtggactggattggccgtagattctattggacagacagagggaaatctctgattggaaggagtgatttaaatgggaaacgttccaaaataatcactaaggagaacatctctcaaccacgaggaattgctgttcatccaatggccaagagattattctggactgatacagggattaatccacgaattgaaagttcttccctccaaggccttggccgtctggttatagccagctctgatctaatctggcccagtggaataacgattgacttcttaactgacaagttgtactggtgcgatgccaagcagtctgtgattgaaatggccaatctggatggttcaaaacgccgaagacttacccagaatgatgtaggtcacccatttgctgtagcagtgtttgaggattatgtgtggttctcagattgggctatgccatcagtaatgagagtaaacaagaggactggcaaagatagagtacgtctccaaggcagcatgctgaagccctcatcactggttgtggttcatccattggcaaaaccaggagcagatccctgcttatatcaaaacggaggctgtgaacatatttgcaaaaagaggcttggaactgcttggtgttcgtgtcgtgaaggttttatgaaagcctcagatgggaaaacgtgtctggctctggatggtcatcagctgttggcaggtggtgaagttgatctaaagaaccaagtaacaccattggacatcttgtccaagactagagtgtcagaagataacattacagaatctcaacacatgctagtggctgaaatcatggtgtcagatcaagatgactgtgctcctgtgggatgcagcatgtatgctcggtgtatttcagagggagaggatgccacatgtcagtgtttgaaaggatttgctggggatggaaaactatgttctgatatagatgaatgtgagatgggtgtcccagtgtgcccccctgcctcctccaagtgcatcaacaccgaaggtggttatgtctgccggtgctcagaaggctaccaaggagatgggattcactgtcttgatattgatgagtgccaactgggggagcacagctgtggagagaatgccagctgcacaaatacagagggaggctatacctgcatgtgtgctggacgcctgtctgaaccaggactgatttgccctgactctactccaccccctcacctcagggaagatgaccaccactattccgtaagaaatagtgactctgaatgtcccctgtcccacgatgggtactgcctccatgatggtgtgtgcatgtatattgaagcattggacaagtatgcatgcaactgtgttgttggctacatcggggagcgatgtcagtaccgagacctgaagtggtgggaactgcgccacgctggccacgggcagcagcagaaggtcatcgtggtggctgtctgcgtggtggtgcttgtcatgctgctcctcctgagcctgtggggggcccactactacaggactcagaagctgctatcgaaaaacccaaagaatccttatgaggagtcgagcagagatgtgaggagtcgcaggcctgctgacactgaggatgggatgtcctcttgccctcaaccttggtttgtggttataaaagaacaccaagacctcaagaatgggggtcaaccagtggctggtgaggatggccaggcagcagatgggtcaatgcaaccaacttcatggaggcaggagccccagttatgtggaatgggcacagagcaaggctgctggattccagtatccagtgataagggctcctgtccccaggtaatggagcgaagctttcatatgccctcctatgggacacagacccttgaagggggtgtcgagaagccccattctctcctatcagctaacccattatggcaacaaagggccctggacccaccacaccaaatggagctgactcagtgaaaactggaattaaaaggaaagtcaagaagaatgaactatgtcgatgcacagtatcttttctttcaaaagtagagcaaaactataggttttggttccacaatctctacgactaatcacctactcaatgcctggagacagatacgtagttgtgcttttgtttgctcttttaagcagtctcactgcagtcttatttccaagtaagagtactgggagaatcactaggtaacttattagaaacccaaattgggacaacagtgctttgtaaattgtgttgtcttcagcagtcaatacaaatagatttttgtttttgttgttcctgcagccccagaagaaattaggggttaaagcagacagtcacactggtttggtcagttacaaagtaatttctttgatctggacagaacatttatatcagtttcatgaaatgattggaatattacaataccgttaagatacagtgtaggcatttaactcctcattggcgtggtccatgctgatgattttgcaaaatgagttgtgatgaatcaatgaaaaatgtaatttagaaactgatttcttcagaattagatggcttattttttaaaatatttgaatgaaaacattttatttttaaaatattacacaggaggcttcggagtttcttagtcattactgtccttttcccctacagaattttccctcttggtgtgattgcacagaatttgtatgtattttcagttacaagattgtaagtaaattgcctgatttgttttcattatagacaacgatgaatttcttctaattatttaaataaaatcaccaaaaacataaa

SEQ ID NO: 5501 - DNA, 6327 bp, Homo sapiens
ggcccggcggcagcccccgcagtcgctgaagcggccgcgcccgccgggggagggagtagccgctggggaggctccaagttggcggagcggcgaggacccctggactcctctgcgtcccgccccgggagtggctgcgaggctaggcgagccgggaaagggggcgccgcccagccccgagccccgcgccccgtgccccgagcccggagccccctgcccgccgcggcaccatgcgcgccgagccggcgtgaccggctccgcccgcggccgccccgcagctagcccggcgctctcgccggccacacggagcggcgcccgggagctatgagccatgaagccgcccggcagcagctcgcggcagccgcccctggcgggctgcagccttgccggcgcttcctgcggcccccaacgcggccccgccggctcggtgcctgccagcgccccggcccgcacgccgccctgccgcctgcttctcgtccttctcctgctgcctccgctcgccgcctcgtcccggccccgcgcctggggggctgctgcgcccagcgctccgcattggaatgaaactgcagaaaaaaatttgggagtcctggcagatgaagacaatacattgcaacagaatagcagcagtaatatcagttacagcaatgcaatgcagaaagaaatcacactgccttcaagactcatatattacatcaaccaagactcggaaagcccttatcacgttcttgacacaaaggcaagacaccagcaaaaacataataaggctgtccatctggcccaggcaagcttccagattgaagccttcggctccaaattcattcttgacctcatactgaacaatggtttgttgtcttctgattatgtggagattcactacgaaaatgggaaaccacagtactctaagggtggagagcactgttactaccatggaagcatcagaggcgtcaaagactccaaggtggctctgtcaacctgcaatggacttcatggcatgtttgaagatgataccttcgtgtatatgatagagccactagagctggttcatgatgagaaaagcacaggtcgaccacatataatccagaaaaccttggcaggacagtattctaagcaaatgaagaatctcactatggaaagaggtgaccagtggccctttctctctgaattacagtggttgaaaagaaggaagagagcagtgaatccatcacgtggtatatttgaagaaatgaaatatttggaacttatgattgttaatgatcacaaaacgtataagaagcatcgctcttctcatgcacataccaacaactttgcaaagtccgtggtcaaccttgtggattctatttacaaggagcagctcaacaccagggttgtcctggtggctgtagagacctggactgagaaggatcagattgacatcaccaccaaccctgtgcagatgctccatgagttctcaaaataccggcagcgcattaagcagcatgctgatgctgtgcacctcatctcgcgggtgacatttcactataagagaagcagtctgagttactttggaggtgtctgttctcgcacaagaggagttggtgtgaatgagtatggtcttccaatggcagtggcacaagtattatcgcagagcctggctcaaaaccttggaatccaatgggaaccttctagcagaaagccaaaatgtgactgcacagaatcctggggtggctgcatcatggaggaaacaggggtgtcccattctcgaaaattttcaaagtgcagcattttggagtatagagactttttacagagaggaggtggagcctgccttttcaacaggccaacaaagctatttgagcccacggaatgtggaaatggatacgtggaagctggggaggagtgtgattgtggttttcatgtggaatgctatggattatgctgtaagaaatgttccctctccaacggggctcactgcagcgacgggccctgctgtaacaatacctcatgtctttttcagccacgagggtatgaatgccgggatgctgtgaacgagtgtgatattactgaatattgtactggagactctggtcagtgcccaccaaatcttcataagcaagacggatatgcatgcaatcaaaatcagggccgctgctacaatggcgagtgcaagaccagagacaaccagtgtcagtacatctggggaacaaaggctgcagggtctgacaagttctgctatgaaaagctgaatacagaaggcactgagaagggaaactgcgggaaggatggagaccggtggattcagtgcagcaaacatgatgtgttctgtggattcttactctgtaccaatcttactcgagctccacgtattggtcaacttcagggtgagatcattccaacttccttctaccatcaaggccgggtgattgactgcagtggtgcccatgtagttttagatgatgatacggatgtgggctatgtagaagatggaacgccatgtggcccgtctatgatgtgtttagatcggaagtgcctacaaattcaagccctaaatatgagcagctgtccactcgattccaagggtaaagtctgttcgggccatggggtgtgtagtaatgaagccacctgcatttgtgatttcacctgggcagggacagattgcagtatccgggatccagttaggaaccttcacccccccaaggatgaaggacccaagggtcctagtgccaccaatctcataataggctccatcgctggtgccatcctggtagcagctattgtccttgggggcacaggctggggatttaaaaatgtcaagaagagaaggttcgatcctactcagcaaggccccatctgaatcagctgcgctggatggacaccgccttgcactgttggattctgggtatgacatactcgcagcagtgttactggaactattaagtttgtaaacaaaacctttgggtggtaatgactacggagctaaagttggggtgacaaggatggggtaaaagaaaactgtctcttttggaaataatgtcaaagaacacctttcaccacctgtcagtaaacgggggagggggcaaaagaccatgctataaaaagaactgttccagaatcttttttttccctaatggacgaaggaacaacacacacacaaaaattaaatgcaataaaggaatcattaaaaaaaatagtaaatgattttttttccctcagcctgctggcacttaatatcttctaaatgatttggcatgatttttttttctttactaccgatgacaaactccagtggcatgaagatctaattttcaaaagggtaaaaactgcatggcatatatacaacaagctagcaagccaattctcagcaaaacctgcaacagaattcctaaagtgaagatgacagatgaacacaaagaagctgcctgggcctcttcacttaaacatgtccccacaccccatcctctcggagccccacttcttaccccccacctcccaccctctataatccccactccccattggagaccaggccagggcagaactccacggaccttgctcttgttgattcactttccccattgtgttttctcctggactgagcatcctttggaaatgggagctggaatttgaacaatgatgctattgtatagttcttttataaatgtaaatatggaaataagagattttgacacatcattttcacttgtctgtattgagatattttccttgtaaaggttctctgtaaacttgagttgattttttgctccccatcttttttgtttcttgtctctctttctctgtctctgtccttctctcttgtaacgtgttatacaatgactcttgggcttgcttaaaaagacagatatagccacagatgcagggagtttgggcacaaaacacgtgcagtttaaagttggtgtgcgttaaaccaaaaataaaaggggggacataaacaacaaaataacccatatcaaagacacaaaattatgtaaatggaaatatatgtactaagtttcgaaaattttttgatgtcattataaacctatgtaaataatgtaagaaagtagacaccctttcagattaatcacaaaagtgccaagctcatgattttggttttcggttttgacaattttctttccctgtctttaatgtgaaaggaggataaacttaaagccttaaataaaaaaatttttttaaatgttaaaagcttggaaaaaattaagctttccattttatttgtatttgttagtgtcaatatttcatccatgctcattttcctgcctcaaaatatatatggtagaaccctattggaaaagtggtaatgggaatagaaggagcagttacctttgtatccgcattgttaaaataggcttttatgctgtgctgtgctttcaagaaaccttgtttgacctctggcattttactgatcagtggaccgttgcactggattataatgggattctactatatacaaatccacattgttcttctccctccagccagatttgcagatgtaatctgggctttccaagtccctctgagtttccttcacttttactgatttttttcttctaaatatggtcaagatagcttctgtcacatgttaagtaaataagctgaagaaatttggtcccggctttgttttaatgtacaaaccggtatgtgatcacttcagtgagcatccctctatagatgggctttagtaaagactgtcccaaagagcccctacttctctaatgcccccccccttttttttttaggaaaagaacatgcagttttactcatcacttcttcatgacaccaaatccattgctaggtttagctcctggtcccttttcagcaagattcatgttatccgtcttacaactttgattttggaaagtattatgtcctaaaaatgcactgcttaacacagtggggtttttttcccccgaggtgtctttaactggggaagtaccacaaacatagagcagagactttaatttctatattctacaatagaccatcaccaaacatcttatcatgttgttgctttctgagtaataggtgctacgcaggtaggcgggctttctctaggactaggtgtacgtttattttgtaataacagggctatctacaaggcctctcagccttactcctggcttcataggacacaggtagcatccctctagtcattggcaatggctctttcagctcggaggaagcttggaggaaactcagattacttggtatcttttcctgttgctgcattgcttagtgtttccttgttgctgggtcctactctctagtagatactaaactgctgtgaagtacaccatacacatttcactaagattccagagccaccttggtgacataacagaaacaaaatcatgttggttacaaaacaaattaaatctctattgttaacttttaagcatttcacaaacaacattgtaaatgtgcgatgttacgttttaaatcagaccacagtggtccccaaatattatgtacatatggcaaatgtcagtgtaactttttgttacactggcaatttcataggtaatcgaacctatgctccaatgttaaattatttgtgtatatgtaaaatacacaagctttaagctatgtgtgtatgaatatgaaagttaatgcaaccatatcaattgtaaaaatggattataattatttttgatggtattaggttatgtagtttcaaactctttgctgtattttgttttgcacctgccattcatttgctaatttttgtggcgtggagattcttttttattaatttgagctcacagcacaagtgtatcactgtttaatgttacccaacaagagttagtgttaagtgatgatcaagttcccatttcacctgctctacttttgctgcattaattaatgacacccggatgaggagacgtgcgctaacttcattgctcatctgggatagtgcatgagcccattgaattagagctgctcctactagataactgagcagtacacataagtgcatgttatgaaacatgaatcacatagagcagtggagttttaccaagtggtgtgtgtggtttttgttttttactatgcaaagatgggaaatgcacaaacttttcaaagactagtgtctgaagaactttacaaacaatacttgaaccctttctttaaagttatcccatcatgttttatagtcattgttgcttccattgttagtttccattttcaagtgctttgtaattttttaagtgcactacctgaaattttgtttgaaattaataaattcattcgtatcttgttggctgcctatgaatggagattcagtagtcattgtatgcatctttaagtcaaatgtgtattaaaactttcgttaacgta

SEQ ID NO: 5502 - DNA, 2700 bp, Homo sapiens
agcgcggtgggtgcggctgtgagacggcaggagacttctgccccgcggtgcacgcgaccctcgagacgacagcgcggctactgccagcagcgaaggcgcctcccgcggagcgccccgacggcgcccgctcgcccatgccgagctgagcgcggcagcggcggcgggatgctggcgctgctggccgccagcgtggcgctcgccgtggccgctggggcccaggacagcccggcgcccggtagccgcttcgtgtgcacggcactgcccccagaggcggtgcacgccggctgcccgctgcccgcgatgcccatgcagggcggcgcgcagagtcccgaggaggagctgagggccgcggtgctgcagctgcgcgagaccgtcgtgcagcagaaggagacgctgggcgcgcagcgcgaggccatccgcgagctcacgggcaagctagcgcgctgcgaggggctggcgggcggcaaggcgcgcggcgcgggggccacgggcaaggacactatgggcgacctgccgcgggaccccggccacgtcgtggagcagctcagccgctcgctgcagaccctcaaggaccgcctggagagcctcgagcaccagctcagagcaaacgtgtccaatgctgggctgcccggcgacttccgcgaggtgctccagcagcggctgggggagctggagaggcagcttctgcgcaaggtggcagagctggaggacgagaagtccctgctgcacaatgagacctcggctcaccggcagaagaccgagagcaccctgaacgcgctgctgcagagggtcaccgagctggagcgaggcaatagcgcctttaagtcaccagatgcgttcaaggtgtccctcccactccgcacaaactacctatacggcaagatcaagaagacgctgcctgagctgtacgccttcaccatctgcctgtggctgcggtccagcgcctcaccaggcattggcacccccttctcctatgcggtgccagggcaggccaacgagatcgtgctgatcgagtggggcaacaaccccatcgagctgctcatcaacgacaaggttgcgcagctgcccctgtttgtcagtgacggcaagtggcaccacatctgtgtcacctggacgacacgggatggcatgtgggaggcattccaggacggagagaagctgggcactggggagaacctggccccctggcaccccatcaagcccgggggcgtgctgatccttggacaagagcaggacaccgtggggggtaggtttgatgccactcaggcatttgtcggggagctcagccagttcaacatatgggaccgcgtccttcgcgcacaagaaattgtcaacatcgccaactgctccacaaacatgccgggcaacatcatcccgtgggtggacaataacgtcgatgtgttcggaggggcctccaagtggcccgtggagacgtgtgaggagcgtctccttgacttgtagccgccttctcctctgtccaggaggccgggatcaggctgttgccatggaagttcagggccatagactgccccacttaaactcttgtcagtctgggctcagggttcccagagctcattccccaggaatctctaagaccagggctggggcagtgtctgtcactggcttgtttgttccctaccaatattctgttgctgtttgaagtagtgccagggtcccctgggaagatgcccccaagacacctgccccaagtgggtggatatctgccttcctgctgcaagtggaggcaggtccagcagcccctcttcagagcccctgtaaatgctatcgcagcctgagtcctgccgccttccagttccttggtgtcccgtgcaccccttctgtctgtcccctttcatggctgtgcagccgtcccgctggagtggccatgtcccttgtgcattgagtgcatccccgctggtgactaagctcgcagcaagcggctaccccccgatctgcaaaagggcctctccctttgtgttctatacattgtgaatcttcccgtctgaagaacgcccagcctgcccagacaaagccccgccttccccaaagcagaggggctgtctgtgtctccagaaaggggacatcgggggggaggggggctcagaaaggagaagggctgtgatctccggtcccttcccccatcatccttccttagactgatgctttgactgaatcatcactagctatggcattaaaaggcctctcttctcatctggtgccaaaggttccgttgcagctttttacaaccatccggtgtggtttggaggatttgttttttttttttcccaacagaaaagaacagccattagaagaaggctcccattttctgatgttccgccccactgtgaagagtgtgctcgttttaaattcatgttgattcttgtaagcactggactgtcttcatcaagtatttccctacagaactcctcaagaaaacagagatcatttggctagagattgtctgagtgactccaagctactcactgtattggacgggagtagtaatttattttaaagataaagtgactaagtggggaaatttataaagctaaatattatatattttatttttcatacatgtttgaagtgcaaatctgtggatattccatttgtaggaccaagtcgacatgcccatcctgacattgtatgctacgagaactcttctgatgatggaatttcgattaaagtgcactgaaagat

SEQ ID NO: 5503 - DNA, 3032 bp, Homo sapiens
aggcgcagaggagggcggtgttgagaccggcggagcggcgggacccctaggtggcggagggacgctccgggaaagcgaggggcgctacgagctctggcccacgtgacctgccgggggcgggagcagggggcgcgccggcctcctgcggtgcccctgccttggggaggggccgtgaccacccgtctgtcgcccgaggcggccgccgctgcaccttcaccgcgtacccgggacccgcccgcccgcgggagaaatgttgctgaagtgctgctgaaagggccagagatgcaaggatttgggatacattttgaacctttaagctgtctgacattgacctcctttcattattaataaagaagaatcaggagcttaggatgtattaacaccaactcattaatatactaaccggacaatgttctacaaacaattctacattgtaaaggactggattggcacaaaataaaataattttattttattcagcttataatatgactcgatggaggaaaatttgataagcatgagagaagaccattcttttcatgttcgttacagaatggaagcttcttgcctagagctggccttggaaggggaacgtctatgtaaatcaggagactgccgcgctggcgtgtcattctttgaagctgcagttcaagttggaactgaagacctaaaaacacttagcgctatttacagccagttgggcaatgcttatttctatttgcatgattatgccaaagcattagaatatcaccatcatgatttaacccttgcaaggactattggagaccagctgggggaagcgaaagctagtggtaatctgggaaacaccttaaaagttcttgggaattttgacgaagccatagtttgttgtcagcgacacctagatatttccagagagcttaatgacaaggtgggagaagcaagagcactttacaatcttgggaatgtgtatcatgccaaagggaaaagttttggttgccctggtccccaggatgtaggagaatttccagaagaagtgagagatgctctgcaggcagccgtggatttttatgaggaaaacctatcattagtgactgctttgggtgaccgagcggcacaaggacgtgcctttggaaatcttggaaacacacattacctccttggcaacttcagggatgcagttatagctcatgagcagcgtctccttattgcaaaagaatttggagataaagcagctgaaagaagagcatatagcaaccttggaaatgcatatatatttcttggtgaatttgaaactgcctcggaatactacaagaagacactactgttggcccgacagcttaaagaccgagctgtagaagcacagtcttgttacagtcttggaaatacatatactttacttcaagactatgaaaaggccattgattatcatctgaagcacttagcaattgctcaagagctgaatgatagaattggtgaaggaagagcatgttggagcttaggaaatgcatacacagcactaggaaatcatgatcaagcaatgcattttgctgaaaagcacttggaaatttcaagagaggttggggataaaagtggtgaactaacagcacgacttaatctctcagaccttcaaatggttcttggtctgagctacagcacaaataactccataatgtctgaaaatactgaaattgatagcagtttgaatggtgtacgccccaagttgggacgccggcatagtatggaaaatatggaacttatgaagttaacaccagaaaaggtacagaactggaacagtgaaattcttgctaagcaaaaacctcttattgccaaaccttctgcaaagctactctttgtcaacagactgaaggggaaaaaatacaaaacgaattcctccactaaagttctccaagatgccagtaattctattgaccaccgaattccaaattctcagaggaaaatcagtgcagatactattggagatgaagggttctttgacttattaagccgatttcaaagcaataggatggatgatcagagatgttgcttacaagaaaagaactgccatacagcttcaacaacaacttcttccactccccctaaaatgatgctaaaaacatcatctgttcctgtggtatcccccaacacggatgagtttttagatcttcttgccagctcacagagtcgccgtctggatgaccagagggctagtttcagtaatttgccagggcttcgtctaacacaaaacagccagtcggtacttagccacctgatgactaatgacaacaaagaggctgatgaagatttctttgacatccttgtaaaatgtcaaggatccagattagatgatcaaagatgtgctccaccacctgctaccacaaagggtccgacagtaccagatgaagactttttcagccttattttacggtcccagggaaagagaatggatgaacagagagttcttttacaaagagatcaaaacagagacactgactttgggctaaaggactttttgcaaaataatgctttgttggagtttaaaaattcagggaaaaaatcggcagaccattagttactatggatttattttttttcctttcaaacacggtaaggaaacaatctattacttttttccttaaaaggagaatttatagcactgtaatacagcttaaaatatttttagaatgatgtaaatagttaaccttcagtagtctattaaggcattaatacttctctggacatgcgcgtttgagggtggaggggtcctgtaaggtgcttcatcgtctgtgattactgcttgggatgtgttctttggcagcttgtgagattactttacctagtgtttataaagtaggaagttaagtgaatcatagattagaatttaatactcttatggaaataattttttaacatcttaattgacaatggcgtttttttatacataaccatggatgtagtgggaaacaatgttgtttggtaaaaataatgtacttgatcaatgtaaaaaagtatataaaatagtcttactaaaaatctaggtttttttttcctcc

SEQ ID NO: 5504 - DNA, 3102 bp, Homo sapiens
ttttccattaaaagcactgcaaattttagcctctaatgagattggagtcagttgacttggctttaaatattgcctcttccattttccagcttctgttactagccattgtgagcttcagtttcttcatctgcaaaatgggcataatacaatctattcttgccacatcaagggattgttattcctttaaaaaaaaaccaataccaaagaagcctacaatgttggccttagccaaaattctgttgatttcaacgttgttttattcacttctatcggggagccatggaaaagaaaatcaagacataaacacaacacagaacattgcagaagtttttaaaacaatggaaaataaacctatttctttggaaagtgaagcaaacttaaactcagataaagaaaatataaccacctcaaatctcaaggcgagtcattcccctcctttgaatctacccaacaacagccacggaataacagatttctccagtaactcatcagcagagcattctttgggcagtctaaaacccacatctaccatttccacaagccctcccttgatccatagctttgtttctaaagtgccttggaatgcacctatagcagatgaagatcttttgcccatctcagcacatcccaatgctacacctgctctgtcttcagaaaacttcacttggtctttggtcaatgacaccgtgaaaactcctgataacagttccattacagttagcatcctctcttcagaaccaacttctccatctgtgacccccttgatagtggaaccaagtggatggcttaccacaaacagtgatagcttcactgggtttaccccttatcaagaaaaaacaactctacagcctaccttaaaattcaccaataattcaaaactctttccaaatacgtcagatccccaaaaagttctgcgattagacaatgcaccggaaccttatgatgtgagttttgggaattctagctactacaatccaactttgaatgattcagccatgccagaaagtgaagaaaatgcacgtgatggcattcctatggatgacatacctccacttcgtacttctgtatagaactaacagcaaaaaggcgttaaacagcaagtgtcatctacatcctagccttttgacaaattcatctttcaaaaggttacacaaaattactgtcacgtggattttgtcaaggagaatcataaaagcaggagaccagtagcagaaatgtagacaggatgtatcatccaaaggttttctttcttacaatttttggccatcctgaggcatttactaagtagccttaatttgtattttagtagtattttcttagtagaaaatatttgtggaatcagataaaactaaaagatttcaccattacagccctgcctcataactaaataataaaaattattccaccaaaaaattctaaaacaatgaagatgactctttactgctctgcctgaagccctagtaccataattcaagattgcattttcttaaatgaaaattgaaagggtgctttttaaagaaaatttgacttaaagctaaaaagaggacatagcccagagtttctgttattgggaaattgaggcaatagaaatgacagacctgtattctagtacgttataattttctagatcagcacacacatgatcagcccactgagttatgaagctgacaatgactgcattcaacggggccatggcaggaaagctgaccctacccaggaaagtaatagcttctttaaaagtcttcaaaggttttgggaattttaacttgtcttaatatatcttaggcttcaattatttgggtgccttaaaaactcaatgagaatcatggtaaaaaaaaaaagttaaccaaagaatatacctgtacataatttgtacagttttaagttgttagataggaactggatttcttatgtattagacattattgctcaatcataatggaatagattctgcatccctaaatgtatgaaccataaggttaaaaaagatgaatggaaatatcaaacaactttttactgagcatcagtttcataatcaataatataagaagattaatttggattctagtatgtttcagtttgtttttaattaccaccttcctttggtagaaaaaatatgttccttgatgtaggaaagtctaggttttagagattagaggatgagatcaagagttaaattcctaaagaagcactgaatatatgaagagagcaaacaaatcaagtaccaacctagaggctttatttttgaattgattcatggtgtgtgtgtgtgtgtgtgtgtgtgtgtgtgtgtgtgtgtaacacagaaacagcttcagaaaataagggatagaaagtaatgaagaaagtacttaccccatattgccataaaaatagcaaagaagactgtccctccattatcgaacaaatatgtcacctgagtagaaaacaaacagaaatattagtcatgcaaattgattataataagccagtgaatactgtttgcactcaggtactatgattttttctcaaatagaatcatattattttatagtacagaaatattatatatgaattcctttcatgggtcttgcaacaatttcacatgatttttctcatggggagaggtgaagaaacaacattagccctcttctctcctctcttgattccctttataccccaccatcatttctgattataaataattctaccattctatggaagtatttgtgggtcacagattgtcaaactacttaatgaaagttgtatgaaattagtttttcaggtgaggcattcctagttgcaattcctgttagcaaaacttctaggagtggggaagttggaaaatgcaggattcttccagtgagccagcatttcccatagctaaccctattctcttagtctttcaaaatgtagaatgggtccaataatggctataagatgtaataaatcccatcttaatttgttttaaaagtttcataaatcactgaacacttatgaaacaaagtgttttttaatcagatatcaactgaaacttcataaaggatgcatagttttataatgttattgaatcaaattttaaggcttgtattgtttgattttaataaagtataaattcaattt

SEQ ID NO: 5505 - DNA, 5124 bp, Homo sapiens
ggcttctgctgggcagggccggctgttaatctcgcctggcggagcggacaccggggcgtggtgggggagatgggccttataggtggcgtccgctggtgagaaacaccttgcgcaggtaaaagggtggcggcgagagggagttcccacccgtggctttcttagagaaatgaagtcttaagtcttaaatagacaacaaggaggggccgatcggtgtcttttggacgcgtctggagcccctccctccgccaaaggaaaagccccttggatgagaggcaggcgcttcagagaagctaagaaaagcacctctccgcgcgccccacctcctccgcctcgcgctcctcctgagcagcgggcccagactgcgctccggccgcggccctcgccccgcggagccctcctaccccggcccgacgctcggcccgcgacctgccccgagccctctccatggaggcagcccgcccctccggctcctggaacggagccctctgccggctgctcctgctgaccctcgcgatcttaatatttgccagtgatgcctgcaaaaatgtgacattacatgttccctccaaactagatgccgagaaacttgttggtagagttaacctgaaagagtgctttacagctgcaaatctaattcattcaagtgatcctgacttccaaattttggaggatggttcagtctatacaacaaatactattctattgtcctcggagaagagaagttttaccatattactttccaacactgagaaccaagaaaagaagaaaatatttgtctttttggagcatcaaacaaaggtcctaaagaaaagacatactaaagaaaaagttctaaggcgcgccaagagaagatgggctccaattccttgttcgatgctagaaaactccttgggtccttttccacttttccttcaacaggttcaatctgacacggcccaaaactataccatatactattccataagaggtcctggagttgaccaagaacctcggaatttattttatgtggagagagacactggaaacttgtattgtactcgtcctgtagatcgtgagcagtatgaatcttttgagataattgcctttgcaacaactccagatgggtatactccagaacttccactgcccctaataatcaaaatagaggatgaaaatgataactacccaatttttacagaagaaacttatacttttacaatttttgaaaattgcagagtgggcactactgtgggacaagtgtgtgctactgacaaagatgagcctgacacgatgcacacacgcctgaagtactccatcattgggcaggtgccaccatcacccaccctattttctatgcatccaactacaggcgtgatcaccacaacatcatctcagctagacagagagttaattgacaagtaccagttgaaaataaaagtacaagacatggatggtcagtattttggtctacagacaacttcaacttgtatcattaacattgatgatgtaaatgaccacttgccaacatttactcgtacttcttatgtgacatcagtggaagaaaatacagttgatgtggaaatcttacgagttactgttgaggataaggacttagtgaatactgctaactggagagctaattataccattttaaagggcaatgaaaatggcaattttaaaattgtaacagatgccaaaaccaatgaaggagttctttgtgtagttaagcctttgaattatgaagaaaagcaacagatgatcttgcaaattggtgtagttaatgaagctccattttccagagaggctagtccaagatcagccatgagcacagcaacagttactgttaatgtagaagatcaggatgagggccctgagtgtaaccctccaatacagactgttcgcatgaaagaaaatgcagaagtgggaacaacaagcaatggatataaagcatatgacccagaaacaagaagtagcagtggcataaggtataagaaattaactgatccaacagggtgggtcaccattgatgaaaatacaggatcaatcaaagttttcagaagcctggatagagaggcagagaccatcaaaaatggcatatataatattacagtccttgcatcagaccaaggagggagaacatgtacggggacactgggcattatacttcaagacgtgaatgataacagcccattcatacctaaaaagacagtgatcatctgcaaacccaccatgtcatctgcggagattgttgcggttgatcctgatgagcctatccatggcccaccctttgactttagtctggagagttctacttcagaagtacagagaatgtggagactgaaagcaattaatgatacagcagcacgtctttcctatcagaatgatcctccatttggctcatatgtagtacctataacagtgagagatagacttggcatgtctagtgtcacttcattggatgttacactgtgtgactgcattaccgaaaatgactgcacacatcgtgtagatccaaggattggcggtggaggagtacaacttggaaagtgggccatccttgcaatattgttgggcatagcattgctcttttgcatcctgtttacgctggtctgtggggcttctgggacgtctaaacaaccaaaagtaattcctgatgatttagcccagcagaacctaattgtatcaaacacagaagctcctggagatgacaaagtgtattctgcgaatggcttcacaacccaaactgtgggcgcttctgctcagggagtttgtggcaccgtgggatcaggaatcaaaaacggaggtcaggagaccatcgaaatggtgaaaggaggacaccagacctcggaatcctgccggggggctggccaccatcacaccctggactcctgcaggggaggacacacggaggtggacaactgcagatacacttactcggagtggcacagttttactcagccccgtcttggtgaaaaagtgtatctgtgtaatcaagatgaaaatcacaagcatgcccaagactatgtcctgacatataactatgaaggaagaggatcggtggctgggtctgtaggttgttgcagtgaacgacaagaagaagatgggcttgaatttttggataatttggagcccaaatttaggacactagcagaagcatgcatgaagagatgagtgtgttctaataagtctctgaaagccagtggctttatgacttttaaaaaaaattacaaaccaagaattttttaaagcagaagatgctatttgtgggggtttttctctcattatttggatggaatctctttggtcaaatgcacatttacagagagacactataaacaagtacacaaatttttcaatttttacatatttttaaattacttatcttctatccaaggaggtctacagagaaattaaagtctgccttatttgttacatttgggtataatgacaacagccaatttatagtgcaataaaatgtaattaattcaagtccttattatagactatttgaagcacaacctaatggaaaattgtagagaccttgctttaacattatctccagttaattaagtgttcatgtggtgcttggaaactgttgttttcctgaacatctaaagtgtgtagactgcattcttgctattattttattcttgtaatgtgaccttttcactgtgcaaagggagatttctagccaggcattgactattacaatttcattttggtggagtttagttttaggttttattgtatataaaatcctgcactgaatctgtgtctcctctgttacctacttttgccagtgaaatttaagttttaaaatactttcagaatgtatttttactactgcaagtttttggtctttaaaatgtcaagtagcatctctctctttctctctgtctctttctgtttctctctccagttttttttttttttttaatttccatatgggctaaagaatccaaatattttaaaaatctgtctctcttttcttctctcataaagtgaattattccttttttttgttttatgtaagtgtatatattcttagtttttcttgaaatcattgtaatgttaactttgttgtttcaaatatcttggtgattgcttcattatctcttcaacaaaaaaaacctttaattttgccattgaaactgtagaactatgccatgcttttattagaagcagtgctctgtgttaacaacaagaatggtgtaattagaattgggatgtggatatttactgtatgacaacacatttacagttctgtaatgcaaggatgcagtttaaaaatgtgaagtagtgatggtttttgaaataagctttaaaatatagggatcttgaaggctccctggggtaactattttataacttagataaaatggctagtcatatctgtgtgtttgtaaagttatttttttaatattttaagattacaattttaacaaatgtagaaatgagccaaactatttaaattttaaaacagtaaaacaaaatgaaacttaatagctcacaaaattccagtccatgtttcatgacttattttagtcaatgaattttctatttatactaaacatatggacattttaaatgtgtttctaatatttttgattatctataatgtgcctgtcttcaattcacaagattgggttataacaattatttgccagattaacactagggaattatttgataaccagcttatcttatcagtagttttattgctgatcaggcaaaaatagttttccaaagttatttttaataaagtatatacaaaattcttatatattactagtcatgataaagtaaattaagcagtttttaaaacttagtgtgagtttgttcatcacaggtctgatatgagtttaagggatttcgcactccctgaatcagagaagtaagaccccttccttagattcctgttatacattttttaaaatgtagagtttgttttggagacattttcagtgcattgttattgccatatttatataatatgactattctaaaggctgtgaggccatggggtattggttaagttgcttgcttttgctttgtccattttcatcattttaaaatgggggataataacagaacttgtttcctagggccattgtaagtcacttgaataaaaaatagttttgaagc

SEQ ID NO: 5506 - DNA, 3304 bp, Homo sapiens
aaagcacctgtgagcttgcggaagtcagttcagactccagcccgctccagcccggcccgacccgaccgcacccggcgcctgccctcgctcggcgtccccggccagccatgggcccttggagccgcagcctctcggcgctgctgctgctgctgcaggtctcctcttggctctgccaggagccggagccctgccaccctggctttgacgccgagagctacacgttcacggtgccccggcgccacctggagagaggccgcgtcctgggcagagtgaattttgaagattgcaccggtcgacaaaggacagcctatttttccctcgacacccgattcaaagtgggcacagatggtgtgattacagtcaaaaggcctctacggtttcataacccacagatccatttcttggtctacgcctgggactccacctacagaaagttttccaccaaagtcacgctgaatacagtggggcaccaccaccgccccccgccccatcaggcctccgtttctggaatccaagcagaattgctcacatttcccaactcctctcctggcctcagaagacagaagagagactgggttattcctcccatcagctgcccagaaaatgaaaaaggcccatttcctaaaaacctggttcagatcaaatccaacaaagacaaagaaggcaaggttttctacagcatcactggccaaggagctgacacaccccctgttggtgtctttattattgaaagagaaacaggatggctgaaggtgacagagcctctggatagagaacgcattgccacatacactctcttctctcacgctgtgtcatccaacgggaatgcagttgaggatccaatggagattttgatcacggtaaccgatcagaatgacaacaagcccgaattcacccaggaggtctttaaggggtctgtcatggaaggtgctcttccaggaacctctgtgatggaggtcacagccacagacgcggacgatgatgtgaacacctacaatgccgccatcgcttacaccatcctcagccaagatcctgagctccctgacaaaaatatgttcaccattaacaggaacacaggagtcatcagtgtggtcaccactgggctggaccgagagagtttccctacgtataccctggtggttcaagctgctgaccttcaaggtgaggggttaagcacaacagcaacagctgtgatcacagtcactgacaccaacgataatcctccgatcttcaatcccaccacgtacaagggtcaggtgcctgagaacgaggctaacgtcgtaatcaccacactgaaagtgactgatgctgatgcccccaataccccagcgtgggaggctgtatacaccatattgaatgatgatggtggacaatttgtcgtcaccacaaatccagtgaacaacgatggcattttgaaaacagcaaagggcttggattttgaggccaagcagcagtacattctacacgtagcagtgacgaatgtggtaccttttgaggtctctctcaccacctccacagccaccgtcaccgtggatgtgctggatgtgaatgaagcccccatctttgtgcctcctgaaaagagagtggaagtgtccgaggactttggcgtgggccaggaaatcacatcctacactgcccaggagccagacacatttatggaacagaaaataacatatcggatttggagagacactgccaactggctggagattaatccggacactggtgccatttccactcgggctgagctggacagggaggattttgagcacgtgaagaacagcacgtacacagccctaatcatagctacagacaatggttctccagttgctactggaacagggacacttctgctgatcctgtctgatgtgaatgacaacgcccccataccagaacctcgaactatattcttctgtgagaggaatccaaagcctcaggtcataaacatcattgatgcagaccttcctcccaacttggcctcccagagtattgggattacagacatgagccactgcacctgcccagctccccaactccctgccattttttaagagacagtttcgctccatcgcccaggcctgggatgcagtgatgtgatcatagctcactgtaacctcaaactctggggctcaagcagttctcccaccagcctcctttttatttttttgtacagatggggtcttgctatgttgcccaagctggtcttaaactcctggcctcaagcaatccttctgccttggccccccaaagtgctgggattgtgggcatgagctgctgtgcccagcctccatgttttaatatcaactctcactcctgaattcagttgctttgcccaagataggagttctctgatgcagaaattattgggctcttttagggtaagaagtttgtgtctttgtctggccacatcttgactaggtattgtctactctgaagacctttaatggcttccctctttcatctcctgagtatgtaacttgcaatgggcagctatccagtgacttgttctgagtaagtgtgttcattaatgtttatttagctctgaagcaagagtgatatactccaggacttagaatagtgcctaaagtgctgcagccaaagacagagcggaactatgaaaagtgggcttggagatggcaggagagcttgtcattgagcctggcaatttagcaaactgatgctgaggatgattgaggtgggtctacctcatctctgaaaattctggaaggaatggaggagtctcaacatgtgtttctgacacaagatccgtggtttgtactcaaagcccagaatccccaagtgcctgcttttgatgatgtctacagaaaatgctggctgagctgaacacatttgcccaattccaggtgtgcacagaaaaccgagaatattcaaaattccaaatttttttcttaggagcaagaagaaaatgtggccctaaagggggttagttgaggggtagggggtagtgaggatcttgatttggatctctttttatttaaatgtgaatttcaacttttgacaatcaaagaaaagacttttgttgaaatagctttactgtttctcaagtgttttggagaaaaaaatcaaccctgcaatcactttttggaattgtcttgatttttcggcagttcaagctatatcgaatatagttctgtgtagagaatgtcactgtagttttgagtgtatacatgtgtgggtgctgataattgtgtattttctttgggggtggaaaaggaaaacaattcaagctgagaaaagtattctcaaagatgcatttttataaattttattaaacaattttgtt

SEQ ID NO: 5507 - DNA, 3438 bp, Homo sapiens
acttgcaaatcgctgtgtgctcgcagaagccagcacttccacagtctctaaccttcccatggcgagtgctgcagctctatcagcagaacctttctctccgtgtgaggaagagcttttttcccccctttccttttttttttttttcctttccccttaatcagaagcactgaatgaaagccaatcagagagagctcgcccccgttttcttcggttccctgctgtccagagttaaaagtgatgctgagaaagagcttgagttagattgaagtagaatcagtgatagaaaataacagccgaaaacaaacaaaaaggggacatagtgacaatttctcctgggttattttggctggaaccaacttccattatccagaagctgataaaaaagctttgggaaacatgaacaaaacattgatgaaatgttggaaaccagttgaaacacagtaaaaccaactgggtaaaataggaccacttctcttcatctacactgggatttgtcaagaagtgaactatgacaatacatcaatttttgctactgtttctattctgggtatgcctgccacatttctgctctccagaaataatgttcagaaggacgcctgtgccacagcaaagaattttaagttcacgtgtaccaaggagtgatggcaaaattctccatcgtcaaaaacgtggttggatgtggaatcaatttttcttacttgaagaatatacaggatctgattatcagtacgtaggcaagctacattcagaccaagataaaggagatggatcactcaaatatatcttatctggagatggagctggtactctttttattattgatgaaaaaacaggtgatattcatgccacaaggcgaattgatagggaggaaaaggccttttatactctacgcgcacaagctattaacagaagaactctgaggccagtagagccagagtcagagtttgtgatcaaaattcatgatatcaatgacaatgagccaacgttcccagaagaaatctatacagctagtgttcccgaaatgtctgttgtaggtacttctgtggtgcaagtcacagctacagatgccgatgacccttcatatgggaacagcgccagagtcatttacagcatacttcaagggcagccctatttctctgtggagcctgaaacaggtatcatcaggactgctttaccgaacatgaacagagaaaacagagagcaataccaagtggtcatccaggccaaagacatgggcggccagatgggaggcttatcggggacaaccactgtgaacatcacgctgacagatgtcaatgacaacccaccacgtttcccccagaacactattcatcttcgagttcttgaatcctccccagttggcacagccattggaagtgtcaaagcaactgatgctgacactgggaaaaatgctgaagtagaataccgaattattgatggtgacggtactgatatgtttgacatcgtgactgagaaggacacacaggaaggcatcatcactgtgaaaaagccactcgactatgagagccgaagactttatactctgaaagtcgaagcagaaaacacccatgtagatccccgtttttattacctaggaccatttaaagatactaccatagtgaaaatctctatagaagatgtggatgaacctcctgtttttagtaggtcctcctatctgtttgaagttcatgaagatattgaagtgggcacaatcattggtactgtaatggcaagggacccagattctatttccagccccattagattttccttggatcgccatactgaccttgacagaatctttaacattcattcaggaaatggatctctttatacatcaaaacctcttgaccgtgaactatctcagtggcataatcttactgttattgctgctgaaatcaacaatcccaaagagacaacacgcgtggctgtttttgtgagaattttggatgttaatgacaatgccccacagtttgctgtgttctatgacacttttgtatgtgaaaatgccagaccagggcagctaatacagactataagtgcagtagacaaagatgaccctttaggtggacagaaattttttttcagtttagctgctgtcaatccaaacttcacagtacaggataatgaagataatactgccagaatcttaaccagaaaaaatggattcaatagacatgaaatcagtacctatctcttgcctgtggtgatatcagacaatgattacccaattcagagcagcacaggcacactgaccattcgagtgtgtgcttgtgacagccaaggcaacatgcaatcctgcagtgctgaagccctgctcctccctgccggcctcagcactggggccttgatcgccatcctcctctgcatcatcattctactggttatagtagtactgtttgcagctctgaaaagacagcgaaaaaaagagcctctgatcttgtcaaaagaagatatcagagacaacattgtgagctataacgatgagggtggtggagaggaggacacccaggcctttgatatcggcaccctgaggaatcctgcagccattgaggaaaaaaagctccggcgagatattattccagaaacgttatttattcctcggaggactcctacagctccagataacacggacgtccgggatttcattaatgaaaggctaaaagagcatgatcttgaccccaccgcacccccctacgactcacttgcaacctatgcctatgaaggaaatgattccattgctgaatctctgagttcattagaatcaggtactactgaaggagaccaaaactacgattacctccgagaatggggccctcggtttaataagctagcagaaatgtatggtggtggggaaagtgacaaagactcttaacgtaggatatatgttctgttcaaacaagagaaagtaactctacccatgctgtctccacttcacaatatttgatattcaggagcattttcctgccagtcagcacaattttttttctcatttacttcttaatttgttcattaattacattaattctttcctgtaggatgtctcatggaatatatatgacattttatttaatcacttccaagagccaaagctatggaaatacagtgttgtccatcttagtaaataaaagataatttcagaaacatgaacaggatagttctcccttaagcaacctcacaaacaagccgcttctgttaggtacatgtcctgcccttgcaaatgaagcttttaaaaaggtgaagaaaaattttacagtatatcctgttctgtacattaaattaaaaaaacaaaaatgtacatgtgatgttagtaggtgtgatatgcaacctggtatacagacatttgtgcaatttcatttcatcaaattctatctgctaatgttttatatttatatttttgtatttatttttaaaaaaataaaccagtttttacaacta

SEQ ID NO: 5508 - DNA, 2039 bp, Homo sapiens
gcggctcccggggcgccggccctcccccgcccccacccccgcggtccctcggaccagcgctggaggcgcgtggtgtggacgcgcgcttcggagttggagggcggcgcccaggaccctggtgggagagtgtgtgcgtcgcgctggagggcgggaggcgggggcgggaggtgccggtcgagggagccccgctctcagagctccaggggaggagcgaggggagcgcggagcccggcgcctacagctcgccatggtgcgccccctgaacccgcgaccgctgccgcccgtagtcctgatgttgctgctgctgctgccgccgtcgccgctgcctctcgcagccggagacccccttcccacagaaagccgactcatgaacagctgtctccaggccaggaggaagtgccaggctgatcccacctgcagtgctgcctaccaccacctggattcctgcacctctagcataagcaccccactgccctcagaggagccttcggtccctgctgactgcctggaggcagcacagcaactcaggaacagctctctgataggctgcatgtgccaccggcgcatgaagaaccaggttgcctgcttggacatctattggaccgttcaccgtgcccgcagccttggtaactatgagctggatgtctccccctatgaagacacagtgaccagcaaaccctggaaaatgaatctcagcaaactgaacatgctcaaaccagactcagacctctgcctcaagtttgccatgctgtgtactctcaatgacaagtgtgaccggctgcgcaaggcctacggggaggcgtgctccgggccccactgccagcgccacgtctgcctcaggcagctgctcactttcttcgagaaggccgccgagccccacgcgcagggcctgctactgtgcccatgtgcccccaacgaccggggctgcggggagcgccggcgcaacaccatcgcccccaactgcgcgctgccgcctgtggcccccaactgcctggagctgcggcgcctctgcttctccgacccgctttgcagatcacgcctggtggatttccagacccactgccatcccatggacatcctaggaacttgtgcaacagagcagtccagatgtctacgagcatacctggggctgattgggactgccatgacccccaactttgtcagcaatgtcaacaccagtgttgccttaagctgcacctgccgaggcagtggcaacctgcaggaggagtgtgaaatgctggaagggttcttctcccacaacccctgcctcacggaggccattgcagctaagatgcgttttcacagccaactcttctcccaggactggccacaccctacctttgctgtgatggcacaccagaatgaaaaccctgctgtgaggccacagccctgggtgccctctcttttctcctgcacgcttcccttgattctgctcctgagcctatggtagctggacttccccagggccctcttcccctccaccacacccaggtggacttgcagcccacaaggggtgaggaaaggacagcagcaggaaggaggtgcagtgcgcagatgagggcacaggagaagctaagggttatgacctccagatccttactggtccagtcctcattccctccaccccatctccacttctgattcatgctgcccctccttggtggccacaatttagccatgtcatctggtggtgaccagctccaccaagcccctttctgagcccttcctcttgactaccaggatcaccagaatctaataagttagccattctctattgcattccagattagggttagggtagggaggactgggtgttctgaggcagcctagaaagtcattctcctttgtgaagaaggctcctgccccctcgtctcctcctctgagtggaggatggaaaactactgcctgcactgccctgtccccggatcctgccgaacatctgggcatcaggagctggagcctgtgggccttgctttattcctattattgtcctaaagtctctctgggctcttggatcatgattaaacctttgacttaag

SEQ ID NO: 5509 - DNA, 4611 bp, Homo sapiens
aaaaaacgagcgtgcaagcagagatgctgctccacaccgctcaggccgcgagcagcagcaaggcgcaccgccactgtcgccgctgcagccagggctgctccgaaggccggcgtggcggcaaccggcacctctgtccccgccgcgcttctcctcgccgcccacgccgtggggtcaggaacgcggcgtctggcgctgcagacgcccgctgagttgcagaagcccacggagcggcgcccggcgcgccacggcccgtagcagtccggtgctgctctccgcccgcgtccggctcgtggccccctacttcgggcaccatggacacctcccggctcggtgtgctcctgtccttgcctgtgctgctgcagctggcgaccgggggcagctctcccaggtctggtgtgttgctgaggggctgccccacacactgtcattgcgagcccgacggcaggatgttgctcagggtggactgctccgacctggggctctcggagctgccttccaacctcagcgtcttcacctcctacctagacctcagtatgaacaacatcagtcagctgctcccgaatcccctgcccagtctccgcttcctggaggagttacgtcttgcgggaaacgctctgacatacattcccaagggagcattcactggcctttacagtcttaaagttcttatgctgcagaataatcagctaagacacgtacccacagaagctctgcagaatttgcgaagccttcaatccctgcgtctggatgctaaccacatcagctatgtgcccccaagctgtttcagtggcctgcattccctgaggcacctgtggctggatgacaatgcgttaacagaaatccccgtccaggcttttagaagtttatcggcattgcaagccatgaccttggccctgaacaaaatacaccacataccagactatgcctttggaaacctctccagcttggtagttctacatctccataacaatagaatccactccctgggaaagaaatgctttgatgggctccacagcctagagactttagatttaaattacaataaccttgatgaattccccactgcaattaggacactctccaaccttaaagaactaggatttcatagcaacaatatcaggtcgatacctgagaaagcatttgtaggcaacccttctcttattacaatacatttctatgacaatcccatccagtttgttgggagatctgcttttcaacatttacctgaactaagaacactgactctgaatggtgcctcacaaataactgaatttcctgatttaactggaactgcaaacctggagagtctgactttaactggagcacagatctcatctcttcctcaaaccgtctgcaatcagttacctaatctccaagtgctagatctgtcttacaacctattagaagatttacccagtttttcagtctgccaaaagcttcagaaaattgacctaagacataatgaaatctacgaaattaaagttgacactttccagcagttgcttagcctccgatcgctgaatttggcttggaacaaaattgctattattcaccccaatgcattttccactttgccatccctaataaagctggacctatcgtccaacctcctgtcgtcttttcctataactgggttacatggtttaactcacttaaaattaacaggaaatcatgccttacagagcttgatatcatctgaaaactttccagaactcaaggttatagaaatgccttatgcttaccagtgctgtgcatttggagtgtgtgagaatgcctataagatttctaatcaatggaataaaggtgacaacagcagtatggacgaccttcataagaaagatgctggaatgtttcaggctcaagatgaacgtgaccttgaagatttcctgcttgactttgaggaagacctgaaagcccttcattcagtgcagtgttcaccttccccaggccccttcaaaccctgtgaacacctgcttgatggctggctgatcagaattggagtgtggaccatagcagttctggcacttacttgtaatgctttggtgacttcaacagttttcagatcccctctgtacatttcccccattaaactgttaattggggtcatcgcagcagtgaacatgctcacgggagtctccagtgccgtgctggctggtgtggatgcgttcacttttggcagctttgcacgacatggtgcctggtgggagaatggggttggttgccatgtcattggttttttgtccatttttgcttcagaatcatctgttttcctgcttactctggcagccctggagcgtgggttctctgtgaaatattctgcaaaatttgaaacgaaagctccattttctagcctgaaagtaatcattttgctctgtgccctgctggccttgaccatggccgcagttcccctgctgggtggcagcaagtatggcgcctcccctctctgcctgcctttgccttttggggagcccagcaccatgggctacatggtcgctctcatcttgctcaattccctttgcttcctcatgatgaccattgcctacaccaagctctactgcaatttggacaagggagacctggagaatatttgggactgctctatggtaaaacacattgccctgttgctcttcaccaactgcatcctaaactgccctgtggctttcttgtccttctcctctttaataaaccttacatttatcagtcctgaagtaattaagtttatccttctggtggtagtcccacttcctgcatgtctcaatccccttctctacatcttgttcaatcctcactttaaggaggatctggtgagcctgagaaagcaaacctacgtctggacaagatcaaaacacccaagcttgatgtcaattaactctgatgatgtcgaaaaacagtcctgtgactcaactcaagccttggtaacctttaccagctccagcatcacttatgacctgcctcccagttccgtgccatcaccagcttatccagtgactgagagctgccatctttcctctgtggcatttgtcccatgtctctaattaatatgtgaaggaaaatgttttcaaaggttgagaacctgaaaatgtgagattgagtatatcagagcagtaattaataagaagagctgaggtgaaactcggtttaaaaaccaaaaaagaatctctcagttagtaagaaaaggctgaaaacctcttgatacttgagagtgaatataagtctaaatgctgctttgtataatttgttcagctaagggatagatcgatcacactatttaagtgagcccagatcaaaaaagcagattgaaattttctttagaaaagattctccatgatttgaattgcattctctttaaactcaccaatgtaatcattttgggaggagggagaacccacttgctttccaaatgggtttatttaaacccacaaactcaagaggttgttgggggaattaggaaaataagggttttcaatgacctacattgctaggtagaggctgtgatccatgggatttcattctaatgaccatgtgaagatgtttgagtcctcctttgcctttcctcagaaagaatccttctaaggcacaaatcccttagatggataatgtaaggtattgttaactcactcatattgagatcatttttagagataccaggttttatgtatcagcactagatggttccaccctcatgggataaaactgcttacaagtattttgaaagaaaaactgaccaaaattcttaaattgttactaaggcaatcatgcacaggtgacgtatgtcttatctgatttgtttttaactccttggtgcccaaagctcagaagggaattccactgccagcaatgaacatacctggaaaagaaagtaagcaatctgggattttttttctgggttagtaaagaatttttgcaataagttttatcagttgattcaaactgatgtgcatcttaatgatcaaatgtgcacattacataaattaagtccactgatacaacttcttacacatgtatctctagtagctctggcaaacccaatatctgacaccactttggactcaagagactcagtaacgtattatcctgtttatttagcttggttttagctgtgttctctctggataacccacttgatgttaggaacattacttctctgcttattccatattaatactgtgttaggtattttaagaagcaagttattaaataagaaaagtcaaagtattaattcttaccttctattatcctatattagcttcaatacatccaaaccaaatggctgttaggtagatttatttttatataagcatgtttattttgatcagatgttttaacttggatttgaaaaaatacatttatgagatgttttataagatgtgtaaatatagaactgtatttattactatagtaaaggttcagtaacattaaggaccatgataatgataataaaccttgtacagtggcatattctttgatttatattgtgtttctctgcccattttctttaaattcattaactgtatatatgtaaatatatagtacttgtaaatagattccaaatttgcttttctattgggtaaaaaataaatttgtaataaaatgtgtgactatgaaacaaaa

SEQ ID NO: 5510 - DNA, 7084 bp, Homo sapiens
gcggacactcctctcggctcctccccggcagcggcggcggctcggagcgggctccggggctcgggtgcagcggccagcgggcgcctggcggcgaggattacccggggaagtggttgtctcctggctggagccgcgagacgggcgctcagggcgcggggccggcggcggcgaacgagaggacggactctggcggccgggtcgttggccgcggggagcgcgggcaccgggcgagcaggccgcgtcgcgctcaccatggtcagctactgggacaccggggtcctgctgtgcgcgctgctcagctgtctgcttctcacaggatctagttcaggttcaaaattaaaagatcctgaactgagtttaaaaggcacccagcacatcatgcaagcaggccagacactgcatctccaatgcaggggggaagcagcccataaatggtctttgcctgaaatggtgagtaaggaaagcgaaaggctgagcataactaaatctgcctgtggaagaaatggcaaacaattctgcagtactttaaccttgaacacagctcaagcaaaccacactggcttctacagctgcaaatatctagctgtacctacttcaaagaagaaggaaacagaatctgcaatctatatatttattagtgatacaggtagacctttcgtagagatgtacagtgaaatccccgaaattatacacatgactgaaggaagggagctcgtcattccctgccgggttacgtcacctaacatcactgttactttaaaaaagtttccacttgacactttgatccctgatggaaaacgcataatctgggacagtagaaagggcttcatcatatcaaatgcaacgtacaaagaaatagggcttctgacctgtgaagcaacagtcaatgggcatttgtataagacaaactatctcacacatcgacaaaccaatacaatcatagatgtccaaataagcacaccacgcccagtcaaattacttagaggccatactcttgtcctcaattgtactgctaccactcccttgaacacgagagttcaaatgacctggagttaccctgatgaaaaaaataagagagcttccgtaaggcgacgaattgaccaaagcaattcccatgccaacatattctacagtgttcttactattgacaaaatgcagaacaaagacaaaggactttatacttgtcgtgtaaggagtggaccatcattcaaatctgttaacacctcagtgcatatatatgataaagcattcatcactgtgaaacatcgaaaacagcaggtgcttgaaaccgtagctggcaagcggtcttaccggctctctatgaaagtgaaggcatttccctcgccggaagttgtatggttaaaagatgggttacctgcgactgagaaatctgctcgctatttgactcgtggctactcgttaattatcaaggacgtaactgaagaggatgcagggaattatacaatcttgctgagcataaaacagtcaaatgtgtttaaaaacctcactgccactctaattgtcaatgtgaaaccccagatttacgaaaaggccgtgtcatcgtttccagacccggctctctacccactgggcagcagacaaatcctgacttgtaccgcatatggtatccctcaacctacaatcaagtggttctggcacccctgtaaccataatcattccgaagcaaggtgtgacttttgttccaataatgaagagtcctttatcctggatgctgacagcaacatgggaaacagaattgagagcatcactcagcgcatggcaataatagaaggaaagaataagatggctagcaccttggttgtggctgactctagaatttctggaatctacatttgcatagcttccaataaagttgggactgtgggaagaaacataagcttttatatcacagatgtgccaaatgggtttcatgttaacttggaaaaaatgccgacggaaggagaggacctgaaactgtcttgcacagttaacaagttcttatacagagacgttacttggattttactgcggacagttaataacagaacaatgcactacagtattagcaagcaaaaaatggccatcactaaggagcactccatcactcttaatcttaccatcatgaatgtttccctgcaagattcaggcacctatgcctgcagagccaggaatgtatacacaggggaagaaatcctccagaagaaagaaattacaatcagagatcaggaagcaccatacctcctgcgaaacctcagtgatcacacagtggccatcagcagttccaccactttagactgtcatgctaatggtgtccccgagcctcagatcacttggtttaaaaacaaccacaaaatacaacaagagcctggaattattttaggaccaggaagcagcacgctgtttattgaaagagtcacagaagaggatgaaggtgtctatcactgcaaagccaccaaccagaagggctctgtggaaagttcagcatacctcactgttcaaggaacctcggacaagtctaatctggagctgatcactctaacatgcacctgtgtggctgcgactctcttctggctcctattaaccctctttatccgaaaaatgaaaaggtcttcttctgaaataaagactgactacctatcaattataatggacccagatgaagttcctttggatgagcagtgtgagcggctcccttatgatgccagcaagtgggagtttgcccgggagagacttaaactgggcaaatcacttggaagaggggcttttggaaaagtggttcaagcatcagcatttggcattaagaaatcacctacgtgccggactgtggctgtgaaaatgctgaaagagggggccacggccagcgagtacaaagctctgatgactgagctaaaaatcttgacccacattggccaccatctgaacgtggttaacctgctgggagcctgcaccaagcaaggagggcctctgatggtgattgttgaatactgcaaatatggaaatctctccaactacctcaagagcaaacgtgacttattttttctcaacaaggatgcagcactacacatggagcctaagaaagaaaaaatggagccaggcctggaacaaggcaagaaaccaagactagatagcgtcaccagcagcgaaagctttgcgagctccggctttcaggaagataaaagtctgagtgatgttgaggaagaggaggattctgacggtttctacaaggagcccatcactatggaagatctgatttcttacagttttcaagtggccagaggcatggagttcctgtcttccagaaagtgcattcatcgggacctggcagcgagaaacattcttttatctgagaacaacgtggtgaagatttgtgattttggccttgcccgggatatttataagaaccccgattatgtgagaaaaggagatactcgacttcctctgaaatggatggctcctgaatctatctttgacaaaatctacagcaccaagagcgacgtgtggtcttacggagtattgctgtgggaaatcttctccttaggtgggtctccatacccaggagtacaaatggatgaggacttttgcagtcgcctgagggaaggcatgaggatgagagctcctgagtactctactcctgaaatctatcagatcatgctggactgctggcacagagacccaaaagaaaggccaagatttgcagaacttgtggaaaaactaggtgatttgcttcaagcaaatgtacaacaggatggtaaagactacatcccaatcaatgccatactgacaggaaatagtgggtttacatactcaactcctgccttctctgaggacttcttcaaggaaagtatttcagctccgaagtttaattcaggaagctctgatgatgtcagatacgtaaatgctttcaagttcatgagcctggaaagaatcaaaacctttgaagaacttttaccgaatgccacctccatgtttgatgactaccagggcgacagcagcactctgttggcctctcccatgctgaagcgcttcacctggactgacagcaaacccaaggcctcgctcaagattgacttgagagtaaccagtaaaagtaaggagtcggggctgtctgatgtcagcaggcccagtttctgccattccagctgtgggcacgtcagcgaaggcaagcgcaggttcacctacgaccacgctgagctggaaaggaaaatcgcgtgctgctccccgcccccagactacaactcggtggtcctgtactccaccccacccatctagagtttgacacgaagccttatttctagaagcacatgtgtatttatacccccaggaaactagcttttgccagtattatgcatatataagtttacacctttatctttccatgggagccagctgctttttgtgatttttttaatagtgcttttttttttttgactaacaagaatgtaactccagatagagaaatagtgacaagtgaagaacactactgctaaatcctcatgttactcagtgttagagaaatccttcctaaacccaatgacttccctgctccaacccccgccacctcagggcacgcaggaccagtttgattgaggagctgcactgatcacccaatgcatcacgtaccccactgggccagccctgcagcccaaaacccagggcaacaagcccgttagccccagggatcactggctggcctgagcaacatctcgggagtcctctagcaggcctaagacatgtgaggaggaaaaggaaaaaaagcaaaaagcaagggagaaaagagaaaccgggagaaggcatgagaaagaatttgagacgcaccatgtgggcacggagggggacggggctcagcaatgccatttcagtggcttcccagctctgacccttctacatttgagggcccagccaggagcagatggacagcgatgaggggacattttctggattctgggaggcaagaaaaggacaaatatcttttttggaactaaagcaaattttagaactttacctatggaagtggttctatgtccattctcattcgtggcatgttttgatttgtagcactgagggtggcactcaactctgagcccatacttttggctcctctagtaagatgcactgaaaacttagccagagttaggttgtctccaggccatgatggccttacactgaaaatgtcacattctattttgggtattaatatatagtccagacacttaactcaatttcttggtattattctgttttgcacagttagttgtgaaagaaagctgagaagaatgaaaatgcagtcctgaggagaggagttttctccatatcaaaacgagggctgatggaggaaaaaggtcaataaggtcaagggaaaaccccgtctctataccaaccaaaccaattcaccaacacagttgggacccaaaacacaggaagtcagtcacgtttccttttcatttaatggggattccactatctcacactaatctgaaaggatgtggaagagcattagctggcgcatattaagcactttaagctccttgagtaaaaaggtggtatgtaatttatgcaaggtatttctccagttgggactcaggatattagttaatgagccatcactagaagaaaagcccattttcaactgctttgaaacttgcctggggtctgagcatgatgggaatagggagacagggtaggaaagggcgcctactcttcagggtctaaagatcaagtgggccttggatcgctaagctggctctgtttgatgctatttatgcaagttagggtctatgtatttatgatgtctgcaccttctgcagccagtcagaagctggagaggcaacagtggattgctgcttcttggggagaagagtatgcttccttttatccatgtaatttaactgtagaacctgagctctaagtaaccgaagaatgtatgcctctgttcttatgtgccacatccttgtttaaaggctctctgtatgaagagatgggaccgtcatcagcacattccctagtgagcctactggctcctggcagcggcttttgtggaagactcactagccagaagagaggagtgggacagtcctctccaccaagatctaaatccaaacaaaagcaggctagagccagaagagaggacaaatctttgttcttcctcttctttacatacgcaaaccacctgtgacagctggcaattttataaatcaggtaactggaaggaggttaaacacagaaaaaagaagacctcagtcaattctctacttttttttttttttccaaatcagataatagcccagcaaatagtgataacaaataaaaccttagctattcatgtcttgatttcaataattaattcttaatcattaagagaccataataaatactccttttcaagagaaaagcaaaaccattagaattgttactcagctccttcaaactcaggtttgtagcatacatgagtccatccatcagtcaaagaatggttccatctggagtcttaatgtagaaagaaaaatggagacttgtaataatgagctagttacaaagtgcttgttcattaaaatagcactgaaaattgaaacatgaattaactgataatattccaatcatttgccatttatgacaaaaatggttggcactaacaaagaacgagcacttcctttcagagtttctgagataatgtacgtggaacagtctgggtggaatggggctgaaaccatgtgcaagtctgtgtcttgtcagtccaagaagtgacaccgagatgttaattttagggacccgtgccttgtttcctagcccacaagaatgcaaacatcaaacagatactcgctagcctcatttaaattgattaaaggaggagtgcatctttggccgacagtggtgtaactgtatgtgtgtgtgtgtgtgtgtgtgtgtgtgtgtgtgtgggtgtatgtgtgttttgtgcataactatttaaggaaactggaattttaaagttacttttatacaaaccaagaatatatgctacagatataagacagacatggtttggtcctatatttctagtcatgatgaatgtattttgtataccatcttcatataataaacttccaaa

SEQ ID NO: 5511 - DNA, 4866 bp, Homo sapiens
cgctgtctctccccctcggctcggagaggcccttcggcctgagggagcctcgccgcccgtccccggcacacgcgcagccccggcctctcggcctctgccggagaaacagttgggacccctgattttagcaggatggcccaatggaatcagctacagcagcttgacacacggtacctggagcagctccatcagctctacagtgacagcttcccaatggagctgcggcagtttctggccccttggattgagagtcaagattgggcatatgcggccagcaaagaatcacatgccactttggtgtttcataatctcctgggagagattgaccagcagtatagccgcttcctgcaagagtcgaatgttctctatcagcacaatctacgaagaatcaagcagtttcttcagagcaggtatcttgagaagccaatggagattgcccggattgtggcccggtgcctgtgggaagaatcacgccttctacagactgcagccactgcggcccagcaagggggccaggccaaccaccccacagcagccgtggtgacggagaagcagcagatgctggagcagcaccttcaggatgtccggaagagagtgcaggatctagaacagaaaatgaaagtggtagagaatctccaggatgactttgatttcaactataaaaccctcaagagtcaaggagacatgcaagatctgaatggaaacaaccagtcagtgaccaggcagaagatgcagcagctggaacagatgctcactgcgctggaccagatgcggagaagcatcgtgagtgagctggcggggcttttgtcagcgatggagtacgtgcagaaaactctcacggacgaggagctggctgactggaagaggcggcaacagattgcctgcattggaggcccgcccaacatctgcctagatcggctagaaaactggataacgtcattagcagaatctcaacttcagacccgtcaacaaattaagaaactggaggagttgcagcaaaaagtttcctacaaaggggaccccattgtacagcaccggccgatgctggaggagagaatcgtggagctgtttagaaacttaatgaaaagtgcctttgtggtggagcggcagccctgcatgcccatgcatcctgaccggcccctcgtcatcaagaccggcgtccagttcactactaaagtcaggttgctggtcaaattccctgagttgaattatcagcttaaaattaaagtgtgcattgacaaagactctggggacgttgcagctctcagaggatcccggaaatttaacattctgggcacaaacacaaaagtgatgaacatggaagaatccaacaacggcagcctctctgcagaattcaaacacttgaccctgagggagcagagatgtgggaatgggggccgagccaattgtgatgcttccctgattgtgactgaggagctgcacctgatcacctttgagaccgaggtgtatcaccaaggcctcaagattgacctagagacccactccttgccagttgtggtgatctccaacatctgtcagatgccaaatgcctgggcgtccatcctgtggtacaacatgctgaccaacaatcccaagaatgtaaacttttttaccaagcccccaattggaacctgggatcaagtggccgaggtcctgagctggcagttctcctccaccaccaagcgaggactgagcatcgagcagctgactacactggcagagaaactcttgggacctggtgtgaattattcagggtgtcagatcacatgggctaaattttgcaaagaaaacatggctggcaagggcttctccttctgggtctggctggacaatatcattgaccttgtgaaaaagtacatcctggccctttggaacgaagggtacatcatgggctttatcagtaaggagcgggagcgggccatcttgagcactaagcctccaggcaccttcctgctaagattcagtgaaagcagcaaagaaggaggcgtcactttcacttgggtggagaaggacatcagcggtaagacccagatccagtccgtggaaccatacacaaagcagcagctgaacaacatgtcatttgctgaaatcatcatgggctataagatcatggatgctaccaatatcctggtgtctccactggtctatctctatcctgacattcccaaggaggaggcattcggaaagtattgtcggccagagagccaggagcatcctgaagctgacccaggtagcgctgccccatacctgaagaccaagtttatctgtgtgacaccaacgacctgcagcaataccattgacctgccgatgtccccccgcactttagattcattgatgcagtttggaaataatggtgaaggtgctgaaccctcagcaggagggcagtttgagtccctcacctttgacatggagttgacctcggagtgcgctacctcccccatgtgaggagctgagaacggaagctgcagaaagatacgactgaggcgcctacctgcattctgccacccctcacacagccaaaccccagatcatctgaaactactaactttgtggttccagattttttttaatctcctacttctgctatctttgagcaatctgggcacttttaaaaatagagaaatgagtgaatgtgggtgatctgcttttatctaaatgcaaataaggatgtgttctctgagacccatgatcaggggatgtggcggggggtggctagagggagaaaaaggaaatgtcttgtgttgttttgttcccctgccctcctttctcagcagctttttgttattgttgttgttgttcttagacaagtgcctcctggtgcctgcggcatccttctgcctgtttctgtaagcaaatgccacaggccacctatagctacatactcctggcattgcactttttaaccttgctgacatccaaatagaagataggactatctaagccctaggtttctttttaaattaagaaataataacaattaaagggcaaaaaacactgtatcagcatagcctttctgtatttaagaaacttaagcagccgggcatggtggctcacgcctgtaatcccagcactttgggaggccgaggcggatcataaggtcaggagatcaagaccatcctggctaacacggtgaaaccccgtctctactaaaagtacaaaaaattagctgggtgtggtggtgggcgcctgtagtcccagctactcgggaggctgaggcaggagaatcgcttgaacctgagaggcggaggttgcagtgagccaaaattgcaccactgcacactgcactccatcctgggcgacagtctgagactctgtctcaaaaaaaaaaaaaaaaaaaagaaacttcagttaacagcctccttggtgctttaagcattcagcttccttcaggctggtaatttatataatccctgaaacgggcttcaggtcaaacccttaagacatctgaagctgcaacctggcctttggtgttgaaataggaaggtttaaggagaatctaagcattttagacttttttttataaatagacttattttcctttgtaatgtattggccttttagtgagtaaggctgggcagagggtgcttacaaccttgactccctttctccctggacttgatctgctgtttcagaggctaggttgtttctgtgggtgccttatcagggctgggatacttctgattctggcttccttcctgccccaccctcccgaccccagtccccctgatcctgctagaggcatgtctccttgcgtgtctaaaggtccctcatcctgtttgttttaggaatcctggtctcaggacctcatggaagaagagggggagagagttacaggttggacatgatgcacactatggggccccagcgacgtgtctggttgagctcagggaatatggttcttagccagtttcttggtgatatccagtggcacttgtaatggcgtcttcattcagttcatgcagggcaaaggcttactgataaacttgagtctgccctcgtatgagggtgtatacctggcctccctctgaggctggtgactcctccctgctggggccccacaggtgaggcagaacagctagagggcctccccgcctgcccgccttggctggctagctcgcctctcctgtgcgtatgggaacacctagcacgtgctggatgggctgcctctgactcagaggcatggccggatttggcaactcaaaaccaccttgcctcagctgatcagagtttctgtggaattctgtttgttaaatcaaattagctggtctctgaattaagggggagacgaccttctctaagatgaacagggttcgccccagtcctcctgcctggagacagttgatgtgtcatgcagagctcttacttctccagcaacactcttcagtacataataagcttaactgataaacagaatatttagaaaggtgagacttgggcttaccattgggtttaaatcatagggacctagggcgagggttcagggcttctctggagcagatattgtcaagttcatggccttaggtagcatgtatctggtcttaactctgattgtagcaaaagttctgagaggagctgagccctgttgtggcccattaaagaacagggtcctcaggccctgcccgcttcctgtccactgccccctccccatccccagcccagccgagggaatcccgtgggttgcttacctacctataaggtggtttataagctgctgtcctggccactgcattcaaattccaatgtgtacttcatagtgtaaaaatttatattattgtgaggttttttgtcttttttttttttttttttttttggtatattgctgtatctactttaacttccagaaataaacgttatataggaaccgtc

SEQ ID NO: 5512 - DNA, 5366 bp, Homo sapiens
caggctcagaggctgaagcaggaggaaggaaggactggaaggaaaaagagacaggttagagggaaagaggcttgggaagaaaacagcagaaaagaaactgctcattacacttacagagaggcaagtaacggtggagatgaggacagagggaaccaagactctgaaagacaaaaaatacaaatagagcgaaagaggaaaaaaatgtcaagaagaacatccatccggagaaatgaagagaatgaaagttttaagctgcagagccgttctgtgcttttccggcacaaaattatatcgctgattttaagcccttttgcatttgccagccgttgacattaagaggcatgtttaacggtgccaacagcatctccttttccttctcctcttcctcttcttcttcttcctcctcctcctcctctttttcctcctcctcgttctcctcccatcagcaagaagacaaaccgaggacagtcttgaaatatcgaaatttcctctttgggatttgccagcgccaagactgtcggaataaaggacgctgactattgtattattgttattttattaattagtcagtggaaagattacagatgaggaaaggggacgcctgtcacccttcctgtgctaagatttaaaaaaaaatgaggctggattgcgggaagctctaaaatgaagcaaaaggagtaagatttttaaagacagaaagccacaggagcccccacgtagcgcacttttatttgtattttttcagatttttttttgtttcgtggtggtgggggaggtgattgggtggctgactggctgcgggaagctacttcctttccttttggagatgattgtgctattattgtttgccttgctctggatggtggaaggagtcttttcccagcttcactacacggtacaggaggagcaggaacatggcactttcgtggggaatatcgctgaagatctgggtctggacattacaaaactttcggctcgcgggtttcagacggtgcccaactcaaggaccccttacttagacctcaacctggagacaggggtgctgtacgtgaacgagaaaatagaccgcgaacaaatctgcaaacagagcccctcctgtgtcctgcacctggaggtctttctggagaaccccctggagctgttccaggtggagatcgaggtgctggacattaatgacaaccccccctctttcccggagccagacctgacggtggaaatctctgagagcgccacgccaggcactcgcttccccttggagagcgcattcgacccagacgtgggcaccaactccttgcgcgactacgagatcacccccaacagctacttctccctggacgtgcagacccagggggatggcaaccgattcgctgagctggtgctggagaagccactggaccgagagcagcaagcggtgcaccgctacgtgctgaccgcggtggacggaggaggtgggggaggagtaggagaaggagggggaggtggcgggggagcaggcctgcccccccagcagcagcgcaccggcacggccctactcaccatccgagtgctggactccaatgacaatgtgcccgctttcgaccaacccgtctacactgtgtccctaccagagaactctcccccaggcactctcgtgatccagctcaacgccaccgacccggacgagggccagaacggtgaggtcgtgtactccttcagcagccacatttcgccccgggcgcgggagcttttcggactctcgccgcgcactggcagactggaggtaagcggcgagttggactatgaagagagcccagtgtaccaagtgtacgtgcaagccaaggacctgggccccaacgccgtgcctgcgcactgcaaggtgctagtgcgagtactggatgctaatgacaacgcgccagagatcagcttcagcaccgtgaaggaagcggtgagtgagggcgcggcgcccggcactgtggtggcccttttcagcgtgactgaccgcgactcagaggagaatgggcaggtgcagtgcgagctactgggagacgtgcctttccgcctcaagtcttcctttaagaattactacaccatcgttaccgaagcccccctggaccgagaggcgggggactcctacaccctgactgtagtggctcgggaccggggcgagcctgcgctctccaccagtaagtcgatccaggtacaagtgtcggatgtgaacgacaacgcgccgcgtttcagccagccggtctacgacgtgtatgtgactgaaaacaacgtgcctggcgcctacatctacgcggtgagcgccaccgaccgggatgagggcgccaacgcccagcttgcctactctatcctcgagtgccagatccagggcatgagcgtcttcacctacgtttctatcaactctgagaacggctacttgtacgccctgcgctccttcgactatgagcagctgaaggacttcagttttcaggtggaagcccgggacgctggcagcccccaggcgctggctggtaacgccactgtcaacatcctcatagtggatcaaaatgacaacgcccctgccatcgtggcgcctctaccagggcgcaacgggactccagcgcgtgaggtgctgccccgctcggcggagccgggttacctgctcacccgcgtggccgccgtggacgcggacgacggcgagaacgcccggctcacttacagcatcgtgcgtggcaacgaaatgaacctctttcgcatggactggcgcaccggggagctgcgcacagcacgccgagtcccggccaagcgcgacccccagcggccttatgagctggtgatcgaggtgcgcgaccatgggcagccgcccctttcctccaccgccaccctggtggttcagctggtggatggcgccgtggagccccagggcgggggcgggagcggaggcggagggtcaggagagcaccagcgccccagtcgctctggcggcggggaaacctcgctagacctcaccctcatcctcatcatcgcgttgggctcggtgtccttcatcttcctgctggccatgatcgtgctggccgtgcgttgccaaaaagagaagaagctcaacatctatacttgtctggccagcgattgctgcctctgctgctgctgctgcggtggcggaggttcgacctgctgtggccgccaagcccgggcgcgcaagaagaaactcagcaagtcagacatcatgctggtgcagagctccaatgtacccagtaacccggcccaggtgccgatagaggagtccgggggctttggctcccaccaccacaaccagaattactgctatcaggtatgcctgacccctgagtccgccaagaccgacctgatgtttcttaagccctgcagcccttcgcggagtacggacactgagcacaacccctgcggggccatcgtcaccggttacaccgaccagcagcctgatatcatctccaacggaagcattttgtccaacgagactaaacaccagcgagcagagctcagctatctagttgacagacctcgccgagttaacagttctgcattccaggaagccgacatagtaagctctaaggacagtggtcatggagacagtgaacagggagatagtgatcatgatgccaccaaccgtgcccagtcagctggtatggatctcttctccaattgcactgaggaatgtaaagctctgggccactcagatcggtgctggatgccttcttttgtcccttctgatggacgccaggctgctgattatcgcagcaatctgcatgttcctggcatggactctgttccagacactgaggtgtttgaaactccagaagcccagcctggggcagagcggtccttttccacctttggcaaagagaaggcccttcacagcactctggagaggaaggagctggatggactgctgactaatacgcgagcgccttacaaaccaccatatttgacacggaaaaggatatgctagtcaattctacaggacttacctgaagcagcatgatttgcacaaagtcgaccaacaaaagcatcaacttttcaacttcattatcttggccatccagttagtcatgtgtaactgagtattagatttcggatggagtcatcatggccaattataggacctaattgctctcagcaggcctgagaaatgagttgaaatgtgcagaactgtagaaactttagaggcaacagattttgcctccccgatcagtgtgtgcctgtttacagcactatctatctttctctctccaaatgtcactgagccctttagatgtttatattcaccacgagaagccagtcataaagataaaggaaatttgtgcattataaatgcaatatcactgttttaaacttgactgttttatattatttttgtgtgatcaagtgttccgcaagctattccaactttacaagagaaattgtgattatgttcttttcacctgtgggttataaaaaatgttgtattctgaagacccacaaaatatcaaagacattctgtagtttatacaccgtgttgcaaagtgtttactgtactatttcaaagcttctaaataaatataaaatatatatattatattatataattttcctaaaatgtggtacaactcagttggtttttaaatggatgcatacagtccacatcatacaataaaataaaaggtaattcagggtcccaaagacaaacttactaagaaaaaatcattaatagttttctcccaatttccatatcttactcaaccgtgtttttccttgtttaaaagaaaatgatgctctaagctacaaaattttgtcaaaaactcatattgaattttcaatgccaaagatgtagctattgatgttatcagacagagcactgactatgtactatcaaactatctaacaatctgcataagtctgattctatttctatgactttgaatttagaatcacttaaagcttttataaagaatcgataaattcacctgtatttgttgttagaaaaaaactgggtgtctgtacattttgtggtgtaaaatatgtaattgaagattactattttaagaagtcatcagtcatatcactcacacagaattttattttacatagttttgtgacttaattacacatgaatataaaatctataattctatatgaatatatagagatatagaaacatctgaactggtaaagaataactataaaatatgaaagctctaaatttaaaataaatttagagatagaatcatggtacattattgtttcagtattccatgtgaaaattttatagcttaaatgtagtcagtgtttgattaatgaaaaaattcttcatgagtcagccttcaaaagttaagcttgccttttacttttatgtcaacaatattaattattaaatttagtaagacgca

SEQ ID NO: 5513 - DNA, 5856 bp, Homo sapiens
gggaaatggctttaattctgacggcagggctgtgagggactagcgggaacccgagccttttgtcaaggaactgcggcgtcggtggccagtcatccccgccgccgcggagccgctgcactgctgggggatctcccagcagctctgacgagcgcgggctgcagcatgggcagaaaacgctgccctgcagattagctgggtggattttttaagcgcaccccaccccccaaacccataaaataacaaaaccaacccgcagtggccgaccggagatagctaagatgccgcgcaggagtttccacctggatgtttgaggttgtgtagatgtggccggcacccttgagagtggagctagggggtgcagactgagcagtgaacagaaggagccttggacagggctgggccagcctcccgagttccaggagcgaattgcaaacccaccgggaaaatgagcgaagagacggtccccgaggctgcctcgccgccgcccccgcaggggcagccttactttgaccgcttctcagaggacgaccccgagtacatgcgccttcgcaaccgggcggcggacctgcggcaggacttcaacctgatggagcagaagaagcgcgtcaccatgatcctgcagagtccctctttcagggaggagctggaaggcctcatccaggagcagatgaagaaggggaacaactcctccaacatctgggccctgcgacagatcgcggacttcatggccagcacctcccacgcagtcttcccgacatcttccatgaatgtctccatgatgacgcctatcaatgacctccacacagctgactccctgaacctggccaaaggggagcggctcatgcggtgcaagatcagcagtgtctaccgactcctggacctctatggctgggcccagctgagtgacacctatgtcacgttgagagtcagcaaggagcaggaccacttcctgatcagccctaagggagtttcttgcagtgaagtcacagcgtccagcctgatcaaggtgaacattctgggagaggtggtggagaagggcagcagctgcttcccagtggacaccacaggcttctgtctgcactcggccatctatgcagcgaggcccgacgtgcgctgcatcatccacctgcacacaccggccacagcagcggtgtcggccatgaagtggggcctcctgcctgtctcccacaatgccctgctggtgggggacatggcctattatgacttcaatggggaaatggagcaggaagccgatcggatcaacctgcagaagtgccttggacccacctgcaagatcctggtgctaagaaaccatggagtggttgctctgggtgacacggtagaggaggcattttacaagatcttccacctgcaggctgcatgtgagatacaggtgtcggctctgtccagtgccgggggagtggagaacctcatcctcctggagcaggagaagcaccggccccatgaggtgggctccgtgcagtgggccgggagcacctttgggcctatgcagaagagtcggctgggggagcatgagtttgaggccctcatgaggatgctggacaacctgggctacagaacaggttacacgtatcgccacccctttgttcaagagaaaaccaaacacaaaagtgaggtggagattccagccacggtcacagccttcgtgtttgaggaggacggtgccccggtgcccgccctgcgacagcatgcccagaagcagcagaaggagaagacccgctggctcaatacgcccaacacctacctgcgggtcaatgtggccgatgaggtccagaggagcatgggcagcccccgacccaagaccacgtggatgaaggctgacgaggtggagaaatccagcagtggcatgccgattcgcatcgaaaacccaaaccaatttgtgcctctctatactgacccccaggaagtactggagatgaggaacaagattcgagaacaaaaccgacaagatgtgaagtcagcggggcctcagtcccagctcctggcgagcgtcattgccgagaagagccgaagcccgtctacagagagccagctgatgtccaagggagacgaggataccaaagacgattcagaggagacggtgcccaaccccttcagccaactcactgaccaggagttggaggagtacaagaaagaggtggagaggaagaaactagaacttgatggagagaaagaaactgccccagaagagcctggctcacctgcaaagtctgcacctgcttctccagtgcagagcccagcgaaggaggcagagacaaagagccctttagtctctccttccaagtctttagaggaaggtactaagaagacagaaacaagcaaagccgccaccacagagcccgaaacaacccagccggaaggggtggtggtcaacgggagggaggaggagcagacggcagaggaaatcctcagcaaaggcctgagccagatgaccaccagtgctgacacggatgttgatacctctaaggacaaaaccgagtcggtcaccagcggccccatgtccccagagggctcaccttccaagtctccctcaaagaagaaaaagaaattccgaaccccctccttcctgaaaaagagcaaaaagaaggagaaagtggagtcctgattcatgacacccttgggctccctcctgcctcctctctctcctccccttcccttctcccatctctgtccctgcaagcacagggctaaggagggatagagtaggaccctggaccacattcggaaggggaacttagagatcacccgaccaacccttcgttttacagttgcccaagagaaatcaggtgacttgcccaaggtcacacagctagttagcggcagagcctgcactcgaattcaggtctcctgacttccagtccagtgctccttctactacacaacactgcctagttgtgggctgcctttgtttggatgctgtccaccaatctgagcctagggcaagaaggccagaaatgggccgtgagctctcacaggctcagactaaatcagaggtcaaggcttcccctgagtaaggtccatttcttcccaggaatccaatctcctgtggatggagctatctctacatttaaaaatctcttctcttttccactttgggtccctgccctgctgctcaaagtgactagccaaattgacccctccaacagaaagtaatctttgttcccaagggctgatggcttagcttgtactaccccaaacattaaccctgagctttcttcatggaacctcttgaatgatggatggaagagctataagaggtggtaggcataggggcaagccatgtaagctgaggattggggatggtttcatcaacataagaggccaggaacttgacccctttgaattgtgcatctcaggcacttcaaaactaaaaccaaatttagcataggaaaaagttgtttaatgctcagggcagaaatttggggaagttgaaatcctctgttggctttgggttgtataaggaggatcaaaacaacagaggaaatgctgactttctagctttgcatgacacctggagcaatgcactgtacctgcctcactcctgtccagtggtcaggtttcccctgaccttccctcacccccagaaacacttgcttacagaccgaaactggcatcttactcttggcaccttgacttgcaccctctgaggttccaactcagtcattctttgtccagcagaggagaatcagaaatgagcccttcaggattaatcctcttgcaccagctctcagagaaatgctgggtatccctgtccttgtccctatctgtccatcctggggcctggtaatggccacagttattgttttaaatgccaacactgtcttctcatgttcttccgtggggcattgattaatgagcatttgttggctcctaaaaattagacaatccattctcttgaaagcaccgtgtcttgaaagaatatttttccttttgatctgactatcgtgaaaatatttttgaaagttcttaatcatagttttccacttttgagcacttgctatctatagacactgtgcaggcttcacatacattacattctttaaccctcacagtaatcctttgaggggggtaagatcattcccattttgtgggtgaggaaattgaccccctaaaatgataattgacttgtcccagctgacttggctagaaagatctggatcctggatttgaatccaggtcagtctgagtccagagcccttgctcttaacagctatggtgaacagacaactttaatccccaggggtggtggttttcatccaggatttgtctctatgactgttctccattgcataatgttagcacgtgaagcaaaggtagggaacaccctgtgctcatcctcatcactgcacgtgaagttcctggtcaatgtggactgtggtgatgctactgtgtgcctctgacaaaggagaggcaagagccttctggttggggcgggaaataccatccatagttggctatttcttgagaaggaaggaaactgacctaggaccaaggtaaacctgacactgtgtctctctagtgcagattcctaactgctaccccaggctccatctctgttctacttcctgattgggtcaaattttaggagggacaacccactcatgcctcagaaaaatctgtcatatgggaaatgcctttaaaagccaatcccttgatgccttcttttaaaaagtagatttcacacttattcatttatccttacatggtatttgttaaggatccactgagcaccaggcattatgctgacgttgaaagagagccatcattatgactagaataataagtggcaaacgatgttgtgagaatggtgaacacgacctctgatgcagccttttgtgtgcgagttgttctacttcgggggtgatgttgattgcctctgcattcaacacactctattcccttgacaatgaggcctcacttaggcctcattgggtggagtcttgctgcagcattattctgggaatttatgccatgggcccactttctattgatagatgaacctgtcagttggttcattcctcatgcattccaaaaacatgcattgagcttgggtcaagggccaggcatgaggataggcatagttcctgccctcaagaagttcatgagcataggaggtgtatagacaaattgcaaaacaggcaagggtaccaaggtggcataagaaagcatcaattaactatcttggggaccagagaaaccctgagagaagcaatggctgctaaggttttaaaacaaagagtaaatttccagtagaatgaaaggattggcagggcatgccacaatgagggaagaatgtgcaaaggtgtggacgcatgaaatgccatgatgggttccgctgagcaacgtggcattgccagagcatgatgtggaagctcaggggttgaggggtcccttcataggtaggcagggctgaatcctaaggaaactggtaggaagtgtggaggagctagacttgtcatggaaggggtttggagccactggagcctttaaatcaggatagagtcatgatcagaattgcattttaggaaaatccctttggtggctgaatggagactgtggactggatgggcgtgggatggtggcatgggagctatgaggcctttttgaaatgtcaatactaaaacatagttgatggcctgctttacacgatgtttcctctacagcagatagtgagtttccaacacaaaatttatttccataaaagtctttggataaagcaccttaagagggattttcaacaaggagaggggagcattcaaagagctaatgtttccagttttattttgtcttggtgtagaattgctgggagaggtgtccagccatcctgccatttct

SEQ ID NO: 5514 - DNA, 2604 bp, Homo sapiens; identical to SEQ ID NO: 1379

SEQ ID NO: 5515 - DNA, 862 bp, Homo sapiens
cgctacagcatctctcggacggaggccgctgacctctgcaaggctttcaatagcaccttgcccacaatggcccagatggagaaagctctgagcatcggatttgagacctgcaggtatgggttcatagaagggcacgtggtgattccccggatccaccccaactccatctgtgcagcaaacaacacaggggtgtacatcctcacatccaacacctcccagtatgacacatattgcttcaatgcttcagctccacctgaagaagattgtacatcagtcacagacctgcccaatgcctttgatggaccaattaccataactattgttaaccgtgatggcacccgctatgtccagaaaggagaatacagaacgaatcctgaagacatctaccccagcaaccctactgatgatgacgtgagcagcggctcctccagtgaaaggagcagcacttcaggaggagaccaagacacattccaccccagtggggggtcccataccactcatggatctgaatcagatggacactcacatgggagtcaagaaggtggagcaaacacaacctctggtcctataaggacaccccaaattccagaatggctgatcatcttggcatccctcttggccttggctttgattcttgcagtttgcattgcagtcaacagtcgaagaaggtgtgggcagaagaaaaagctagtgatcaacagtggcaatggagctgtggaggacagaaagccaagtggactcaacggagaggccagcaagtctcaggaaatggtgcatttggtgaacaaggagtcgtcagaaactccagaccagtttatgacagctgatgagacaaggaacctgcagaatgtggacatgaaga

SEQ ID NO: 5516 - DNA, 484 bp, Homo sapiens; identical to SEQ ID NO: 2739

SEQ ID NO: 5517 - DNA, 4572 bp, Homo sapiens
gggagtttgaagacagaaaggaaaggggagaaacctgcagagagcatcaaaggatggggggtgctataaaagaagcaggggggtcctttgaaagaaatctatcatgcactgaaatgctttctggagaaggtgccattattttcctcccctcttgctcagatgaaaggagccagcaaggacagtcctgaaatattcctcaggggactttttgtcattgttcctctttcctcttgcacagagctatttgctgacctttccagaggaatctcagtccagctgagaagacagttcttaataaaaacaaaaaaatgcaaaaaccaattcctgctgtttgaatgggaatggtagcttgcttgctgcagttcttttcctgtgacattttggaatgtctgcagaaacttaaaaaaaagaaaaaaaaaaccttaaaaactccctggattaggcaagagaaaaggaagtttttttttgctaaacaggagtaaatgagaggtggtaacttatccctaagccaggacctggatgatcaaaaccttcaaattctagggatcagcacttcaaaaataacaagtaaacaagcatgaggagtggctgttgggtttcgctcagaggcaggttttaaaggaagccaaaaccgggttcagaacttcaggcctgtacgatgcctgaagaccggaattctggggggtgcccggctggtgccttagcctcaactcctttcatccctaaaactacatacagaagaatcaaacggtgttttagttttcggaaaggcatttttggacagaaactggaggatactgttcgttatgagaagagatatgggaaccgtctggctccgatgttggtggagcagtgcgtggactttatccgacaaagggggctgaaagaagagggtctctttcgactgccaggccaggctaatcttgttaaggagctccaagatgcctttgactgtggggagaagccatcatttgacagcaacacagatgtacacacggtggcatcacttcttaagctgtacctccgagaacttccagaaccagttattccttatgcgaagtatgaagattttttgtcatgtgccaaactgctcagcaaggaagaggaagcaggtgttaaggaattagcaaagcaggtgaagagtttgccagtggtaaattacaacctcctcaagtatatttgcagattcttggatgaagtacagtcctactcgggagttaacaaaatgagtgtgcagaacttggcaacggtctttggtcctaatatcctgcgccccaaagtggaagatcctttgactatcatggagggcactgtggtggtccagcagttgatgtcagtgatgattagcaaacatgattgcctctttcccaaagatgcagaactacaaagcaagccccaagatggagtgagcaacaacaatgaaattcagaagaaagccaccatggggcagttacagaacaaggagaacaataacaccaaggacagccctagtaggcagtgctcctgggacaagtctgagtcaccccagagaagcagcatgaacaatggatcccccacagctctatcaggcagcaaaaccaacagcccaaagaacagtgttcacaagctagatgtgtctagaagcccccctctcatggtcaaaaagaacccagcctttaataagggtagtgggatagttaccaatgggtccttcagcagcagtaatgcagaaggtcttgagaaaacccaaaccacccccaatgggagcctacaggccagaaggagctcttcactgaaggtatctggtaccaaaatgggcacgcacagtgtacagaatggaacggtgcgcatgggcattttgaacagcgacacactcgggaaccccacaaatgttcgaaacatgagctggctgccaaatggctatgtgaccctgagggataacaagcagaaagaacaagctggagagttaggccagcacaacagactgtccacctatgataatgtccatcaacagttctccatgatgaaccttgatgacaagcagagcattgacagtgctacctggtccacttcctcctgtgaaatctccctccctgagaactccaactcctgtcgctcttctaccaccacctgcccagagcaagacttttttggggggaactttgaggaccctgttttggatgggcccccgcaggacgacctttcccaccccagggactatgaaagcaaaagtgaccacaggagtgtgggaggtcgaagtagtcgtgccaccagtagcagtgacaacagtgagacatttgtgggcaacagcagcagcaaccacagtgcactgcacagtttagtttccagcctgaaacaggaaatgaccaaacagaagatagagtatgagtccaggataaagagcttagaacagcgaaacttgactttggaaacagaaatgatgagcctccatgatgaactggatcaggagaggaaaaagttcacaatgatagaaataaaaatgcgaaatgccgagcgagcaaaagaagatgccgagaaaagaaatgacatgctacagaaagaaatggagcagtttttttccacgtttggagaactgacagtggaacccaggagaaccgagagaggaaacacaatatggattcagtgagcctgctttcgcctgctgtctctgatggctctggcaaggactccagggattctggtgggatatgacttagaaccaggtggctggtcacctggatgtacagaagtctaactggtgaaggaatatcatttacagacattaaacatccatatctgcaatgtgtaccaaagttatatcatgccccataatgctactgtcaagtgttacaactggatatgtgtatatagagtagtttttcaaaagtaaactaaaaatgagaagcatatttcaagaattattttattgcaagtcttgtatttaaatgttaaatcaatatgttgttgcaatttagcttgctttcaagcttcaccccttgcacttaacataagctatttttggcattgtgttatcatcggcttattttatagatcaatatttttatttcccttttttgctgaggaaatgaagataagcaaaaatataaatatatatataaatatatgagttattaaaatcagaagaatactttgtggctgtgctgtttgtgccaatagactttgtcatgaccaaaaagagaaatgtaaatagttttataaaatacagtcgaatcaccaggaacctttgagctgcttttaaaattcttcccctggcaccactcagttttgcttttgcgaggcgatttgacataggaactttgagactccatgagaaagtccctttctgaggcccactgtctaccttgccagatcctcagtgcgtatcgccaatgcaggatgctccttagaaaagaaaaaatggtaaagaatggcatttaacgattcaggctttgaattactctgtccctctggaccgaatctctttaactgctggatagttttagaggaattctcctgctacttaggtactgggaaacaatgcttgctaaaccatgcccacgtgagcacctgtctcccactcaaacctctcccatctcccaacaactgcactttagaataccagcagtgaaatggtattactgtttccctctgagtgaaactgctagagtatatgtcacgtagtgacatttttttctcactcaggctattgccatctgggattctctccctactacagctggcaaagttggtttgcagcaagaagatagtgggagggggccaggctgcaggagaaggagaaaagtttagaagaaacaaaccattttgcttctaattttgacagtatcactttcctgttaaaacatacaataattttaaaaggtgaatgcctaaagttccaattttagcaaatatgggaacctcagcaatgctaattttctagaaaaacccagggctctttggagctagagttttgggagaacagttcttcacaataaggcaatggttttgagaggccaggcaaataatctttctcaccgtagaacaaaaagttacaaaaggcataatcggaaatagagactacatacttgagtttatggggtttgtgttgtttgaaggttcaatgcttgcatgtgtttatttattttcaagagggaaagtggtctgtactgctttcatccttgccactgtcttgcttttattttttactctcccactgagcaagcgtctgtggtcctatggtatcaaccagtatctttatagcaataatttctttaattcccttttctctctctttccaattatttaaccagttacttccacctggacatacgataggaaattcaaactcaaaatatgaaaattgatcttaataactctcccttcatatcttttcacctatttccagtccttatcatagttgataaaaacctcagactcatccagaaagctatatgatgcactagtaaaaaaaacaaagatattcaaactgcttgggttcaaatggtatacaatttgccagctgttactgaaccttctatgcataactttttttttcctctgtgcaattggaataataaaaatactactcccata

SEQ ID NO: 5518 - DNA, 8167 bp, Homo sapiens
agctgggccatggccgcgaggcaggggtgagaccggcggccacccgtgagccctccgcacccgcaccatgcagaagagcgtgcgctacaacgaggggcacgccctgtacctggcctttctggcgcgcaaggagggcaccaagcgcggcttcctgagtaagaagacggccgaggcgagccgctggcacgagaagtggttcgccctctaccagaatgtgctcttctacttcgagggcgagcagagctgccgcccggcgggcatgtacctcctggagggctgcagctgcgaacgaacgcccgcgccacccagggccggcgccgggcagggaggcgtccgagacgcgctggacaagcagtattactttactgttctttttggccatgaaggtcagaagccactggagctgcgctgtgaggaggagcaggatggtaaagagtggatggaggccattcaccaagccagttatgcagacattttgattgagagggaagtattaatgcagaagtacattcatctagttcagatcgtagagacagaaaaaattgcagctaaccaactccgacatcaacttgaagatcaagacacagaaatcgaaaggcttaaatcagagattattgctcttaataaaaccaaagaacgaatgcgaccttaccaaagcaaccaagaagacgaagatccagacatcaagaagattaaaaaggttcagagcttcatgcgaggatggttgtgcagaaggaaatggaagaccatcgtgcaggattacatttgttctcctcatgctgaaagtatgaggaagagaaaccagattgtgttcaccatggtggaggcagagtcagagtacgttcaccagctctacatcctggtcaatggctttctccggcccctgcgtatggccgccagctccaagaagccccccatcagccacgacgacgtcagcagtatttttcttaacagtgaaacaatcatgtttcttcatgaaatatttcatcaaggactaaaggcaaggatagcaaactggcccactttaattttagctgatctgtttgatattttgctccccatgctgaacatttatcaagaatttgtgcgtaatcaccagtacagcctgcaagttctcgccaattgtaagcaaaacagagattttgacaaactcttaaaacagtatgaagccaatccagcctgtgaggggaggatgctggagacattcttgacctatcccatgtttcagatccccagatatatcatcacactccatgagctccttgctcacacaccccatgagcatgtggaaaggaaaagcctggagtttgccaaatcaaagctagaggaactatccagagtaatgcacgatgaagtcagcgacactgaaaacataaggaaaaaccttgccatcgaaagaatgatcgtggagggctgtgacatcttgctggacaccagccaaacgttcatccgccaaggttctcttattcaagtaccttccgttgagagggggaaacttagtaaagttcgcctgggttcgttgtctttgaaaaaggaaggagagagacaatgcttcttatttacaaaacactttttaatatgtacaagaagttcaggagggaagcttcatctgctcaagacaggtggggttctgtctctaatagactgcacattgattgaggagccagatgcaagcgatgatgactctaaaggttctgggcaagtgtttgggcacctggattttaaaatagtggtggagcctcctgacgctgccgccttcactgttgtcttgttagcaccctcacgccaggagaaagctgcctggatgagtgacatcagtcagtgtgtggacaatatacgatgtaatggtttaatgactatagtgtttgaagagaattccaaagtcactgtgccacatatgattaagtctgatgcccgtcttcataaagacgacactgacatttgcttcagtaaaacactcaactcctgcaaagtgccccagatccgttatgccagcgtggagcgcctcttggaacgactgacagacttgcggtttcttagtattgatttcctcaacacctttctgcacacctatcgtattttcactactgccgctgtggtgctggggaaactctccgacatatacaagaggcctttcacctccatccctgtcaggtcattggaattgttttttgctaccagccagaacaacagaggtgaacatttggtggatggcaaatccccacgtctgtgtcgcaaattctcttccccgccaccactggctgtgtccagaacatcttccccagtgagggccagaaagctgtctttgacttctcccttgaactcaaagataggagcattggacctgacaacttccagcagtcccaccaccaccacccagagtcccgctgcgtctccaccaccacacactggtcagataccactggatctcagcagaggcctctcttctccagagcaaagcccgggaacggtagaagagaatgtcgataacccacgcgtggatctgtgtaacaagctaaaacgaagtattcaaaaagcagtcctagagtctgcaccagcggaccgagcaggagtggaaagctcccctgcagcggacaccacagaactttcaccttgcagatccccctcaactcctcggcacctccgctatcgacagcctggaggacagacggcggacaatgcccactgctctgtttcaccggcttctgcttttgcaatagccacagctgcagcaggacatgggagtccaccaggctttaacaacaccgagagaacatgtgataaagagtttattatacggagaacggctaccaatcgagttctgaacgtcctccgtcactgggtctcaaagcacgcacaggatttcgaactcaacaatgaactaaagatgaatgtcctaaatttgctagaagaagttttgcgagacccagaccttcttccccaagaaaggaaagccgccgcgaatatcctcagggccctttcacaagatgaccaagatgacatccacctaaaattagaggatataattcaaatgactgactgcatgaaggccgaatgctttgagtccttgtcggccatggagctggcagaacagatcaccctcctggaccatgtcattttcagaagcattccctacgaggagtttcttgggcaggggtggatgaagctggataaaaacgaaagaactccttacattatgaaaaccagccaacacttcaatgacatgagtaacctggtggcctcccagataatgaactatgctgatgtcagctcccgtgccaacgccatcgagaaatgggtggcagtggcggacatctgccgatgcctgcacaactacaacggcgtgctggagatcacctcggccttaaacagaagtgccatctacaggctgaagaaaacctgggccaaggtctctaagcagacaaaagctctaatggacaaacttcaaaagactgtttcctctgaaggaagatttaaaaatcttagagaaacccttaaaaattgtaaccctcctgcagttccttatcttgggatgtacttgacagacctggcatttattgaagaaggaacaccaaactttactgaggaaggccttgtcaatttctccaaaatgagaatgatatcacacatcatcagagagatacgccagttccagcagacttcctacagaatagatcatcagccaaaggtcgcacagtacttgcttgacaaagaccttatcatagatgaagatacgctatatgagctgtcactaaaaattgaacctcgactccctgcttgaagatctggccttgcccctgagtccacgggatgttcatggaaagcaggacagacagaattgtgtatgccttgcctatcacggtacagcacgaagccaggctcctttctccaccaaagaagatggaaccagactggaattctgtctccagagagaaacccagctgtttgggtcaaagacagatgcttcagacttgggtgggaaggtgaaagatggctatttagaaagctggtggcacgttttacataagggaatgtcagatgggagatgctagttgccattttaacaaagcaggtaaatcggtaaattttaaactctgtccatgttctgttagaactcagggacaaggatccatgaaaaagacctgtgatgtttctctggcgctttactggcctgggcacacctaccaatcttctaggatttgactggttccattacatttccttttggtataagcttcacagaaaagctgacacttcctctacagagatggaccaaaacataagcaatttcagtctacagcatgtgcatggttgtcagtgcattctaaatatttctatgtgaggaatggtaccttctgaaactgcctttccagtctttaggcaatgggataggaaagaaagaatgaaacacaaatggatttgtatgtaacatttccttaattaaatgcagtaggctgtgccccagaggattccagacagtggctggctgaggtgggtggggagcttttccttgagactgttggtcctaagaagccagcccttttggagaggcagctgcaaaaaggtgcacgcccatctcaccgacaaaactgtggaacagaaggccaccaagtgctgtggggaatcatgggtttcagtgctgagtgaaaatctatacctaaaaatcatctctgcaccttgctttgtttgttttctttccccactcatagtactgcaggaatctattctcatttacacagacctttttttaggcttactatgaacattggctgtattttttttaaacagtttagtgaaattttcttttcaaaacccacacttccatatgctgttcgtagatctctttctttaaaaactgatgttgagagatctctgagaatattataagtgcatgggaaatgggcccaaccaccgaacagctcttacattacaaaaccaaatgcaagggttagtcctgctacctgaggctggggaagtgaccttccttttcccaagattgtcagttgttgaagaaatagggctatctcattgtttacctccctcttctcttctcagggagactgctgctttaaaagaaggaagagaaaaaatatagttctatttccctgaacctgttgcacctgacattttctcttagcagcatgaaacttattgatgctgacaatgaaaaatggatctgtctggctgctttccctctttccttgcactttaattatgttgctagagctaacagactaataaattccacctgctggctcttaagactcagtgaaagagctagcattggtaatgcaccatagaggtagagaatgtacactttctgcacggtaagtgccatctctgtatgtaactatatagtgaaatatcaactaagtaaaagaaaatataatatttgaagaccattcccaaaatattttcaatagttcatattagccaacagtgtagcactcaacccaaggagggttccttatggatgctttctttttcttttttaaagttgcttgtttgttctctttagtttcaaataagaggttgacgcatcttgatgcatgatgagaagcatgggctgtttggatcctaacaacgcataacttgtgatttatttctcagtgctccagaaactgagggtttgaaataatatgtatcagttgcaccaaacacctcaaggtcttgcagaagaaaagtaaaggttagctttcatggctcaaaagcatagtcctgaagggtgaactaaaaccgggacaaatctgtgagaggaccacacacatactagtttcgggccaaacaacacgtggaaaggtgcatgcattctactctgccttggagttgccagagtccttcagagggaaagggatggttctgtgtgcactttttctggaagttcggactcatttctttgacccaaatgttccagagacactgcagccattcttattaacaaaaaataagacaggagtttccaaatgctccttcccttttggatcgcagcttttcttcaactagtgacaaagcttttgcgcctatttcctgcaggatgttggaactgccccgcactggtcatattaggcactgtcaattgctatgctgacttttagggggtttttgtttgtttgaaaaacagggtctcaccatgttgcccaggctggtctcgaactcctggactcaagcaatcttcctgcctcagcctctcaagcagctgggactgcaggggtgtgccactcactagcctttcgcatttttgtttgagaattacaccactttctggagtctgcagccttcctggagctgcaagagggcaagagagagagctccacctctgagggagtgtctgttgatgacctgcactattcgtgtgccagctgggagaggaatgcacattttaaaatcccttcaatttggtcaaattaaaaatccccaagagcaatttgcagtgttttttctggtcgttaaagtacccatcctcttctgcctacacacaaagcatgcattcccagctgcatctgcctctagtccattatggagacccatttctaagaggagatgggaggtcaacctctaacagccaagtagcgaacatgtatactgtaaaattaacctagaaaatcagaagaaaaatccaatttcatgctttcgaatgaatgcccacattttgtactgtcaacgaaattatcttggagcttttaggggatgccttttcgttattaactgagacatctagttttgctacagggacaaatctcttacctaatccaatatattatttgacagattcaggcatgaagtaaaacgtcgtcacttttccttagtgcttttctgaaggaatttaaagacggaattttaaacggccattgcaatattttcaagtggctctcataccaagtcccattactgtttgttaaatttcagtacgtcttaaagtactacttataaacaaatgaaactcagagaaactgaatcacctggaagagaaaaatccattatggtcccatgtggagtgaataatgatggatcagcaccctttctctcatgttattgtataagacgagacttttgggccagcagcgattgggcagcttttaaattcttaactgaaaagagtaatgcaatacagggattattcccaataaaattaacttttatttaaaagcaagagattttacttagcttttttttttcaaagtttgattttatccccttgaaaaaaaatctcttcactttaaagtataaaggtttttaaaaatccaattgcaaaatgtattatttttacaactatcgaaaaggcataaaagagaacatactatttatggctgaagggtatagccaggctaatgtgcacagagggaatcaataaataaaactctttttcatttcagtaagaaatcagattgtaagtttaatggctccattatagataccaccgtgtaatagaagacttaagtcaatgaaatctaatcagtgtgtcatttctcagcggccattggtgacttaaaattaagatgaggcagagccaaaatggaaaacagtcattttgttgtaggtataaacacatgaacgattcagaaaattattcatctcagctgccatgcagcatgacattaacattaggattgatagcactagtctgatctgctcaaggaaaataatagttctattatacttaatgatgttggtttttacacagctcatttcatttttcactagaaagccagttatgaaagagagctggcctaggcatcccggccctgagtcctaggcccagtctccaactggaaaaccttaggctggtgtttacacatccctgagcctcagtttcctcatctgcaaaacggtgtgaatagtaatccctgtgctgcttatctcacagggctattgtgaggaccaaatggattagactgtaaactgcaaagtgctgtccgcacatgaggtcatctgattactgtcctcagatctcttttgtagaggatttcaatgtatttctttatcatttgagtgtgtgtgtgatggacgaatatgtgtgtgagtttgagaagcatatcgttcgtgtccagttactttgcaaatttgtggacatttgtgattggacagaggggtttgtgctgtggcctaacacttgccaagtgaggtgtaggttatgcctatatgcaaattaaacttcacctttcttgaa

SEQ ID NO: 5519 - DNA, 3008 bp, Homo sapiens
gagcacattgcacttaattgttgccacagccacagatgtaaagaggcttgtaagaaaaatgttctcacagtgagcttccttatttgaagcaggactcaattcttggttaaaagctatggtatttgagctagttaaacacatatctctctcccattccatagggaatgagctgggctgtcctttctccccacgttcacctgcacttcgttagagagcagtgttcacatgccacaccacaagatccccacaatgacataactccattcagagactggcgtgactgggctgggtctccccaccccccttcagctcttgtatcactcagaatctggcagccagttccgtcctgacagagttcacagcatatattggtggattcttgtccatagtgcatctgctttaagaattaacgaaagcagtgtcaagacagtaaggattcaaaccatttgccaaaaatgagtctaagtgcatttactctcttcctggcattgattggtggtaccagtggccagtactatgattatgattttcccctatcaatttatgggcaatcatcaccaaactgtgcaccagaatgtaactgccctgaaagctacccaagtgccatgtactgtgatgagctgaaattgaaaagtgtaccaatggtgcctcctggaatcaagtatctttaccttaggaataaccagattgaccatattgatgaaaaggcctttgagaatgtaactgatctgcagtggctcattctagatcacaaccttctagaaaactccaagataaaagggagagttttctctaaattgaaacaactgaagaagctgcatataaaccacaacaacctgacagagtctgtgggcccacttcccaaatctctggaggatctgcagcttactcataacaagatcacaaagctgggctcttttgaaggattggtaaacctgaccttcatccatctccagcacaatcggctgaaagaggatgctgtttcagctgcttttaaaggtcttaaatcactcgaataccttgacttgagcttcaatcagatagccagactgccttctggtctccctgtctctcttctaactctctacttagacaacaataagatcagcaacatccctgatgagtatttcaagcgttttaatgcattgcagtatctgcgtttatctcacaacgaactggctgatagtggaatacctggaaattctttcaatgtgtcatccctggttgagctggatctgtcctataacaagcttaaaaacataccaactgtcaatgaaaaccttgaaaactattacctggaggtcaatcaacttgagaagtttgacataaagagcttctgcaagatcctggggccattatcctactccaagatcaagcatttgcgtttggatggcaatcgcatctcagaaaccagtcttccaccggatatgtatgaatgtctacgtgttgctaacgaagtcactcttaattaatatctgtatcctggaacaatattttatggttatgtttttctgtgtgtcagttttcatagtatccatattttattactgtttattacttccatgaattttaaaatctgagggaaatgttttgtaaacatttattttttttaaagaaaagatgaaaggcaggcctatttcatcacaagaacacacacatatacacgaatagacatcaaactcaatgctttatttgtaaatttagtgtttttttatttctactgtcaaatgatgtgcaaaaccttttactggttgcatggaaatcagccaagttttataatccttaaatcttaatgttcctcaaagcttggattaaatacatatggatgttactctcttgcaccaaattatcttgatacattcaaatttgtctggttaaaaaataggtggtagatattgaggccaagaatattgcaaaatacatgaagcttcatgcacttaaagaagtatttttagaataagaatttgcatacttacctagtgaaacttttctagaattatttttcactctaagtcatgtatgtttctctttgattatttgcatgttatgtttaataagctactagcaaaataaaacatagcaaatggcatcactgtgtttgacttcttgtgaaatttctgtactttgtatataaaatacataaaacaatagattagaaatcaaaagatatctctggcctgcaatattttactgatgtgaacataggattttccactaaataatttgtctacttctagcattcacttacaaagagttcttaaaaacacctataataggtacttagatttcacaacttacttagatatttgtcattattcccattcctggtgtttttactggttcatatacaatggtattctattagataagaagctgctatgtgatctcagcactcactccttggttgtcaagaaatggtggataactcacaggattaaaaatgaatgaatataaaattttctgaaatagatatttaaaaaatcattttagcttgaagccaatatgtctggatcataggttttgagttcataatccagtaataacagctttcagctttctatgagtatatacaattctatacaatgataaatactctgcatataatttataaaaataacttctgttttacctagttaacaataaaacctatgtgtggagccaaatgttatgcagacaaaggtctgctcatcccataccagtgtatatatagtcaaatatgtgtctagtacaaataaaatgtatctctaaggcataaaatgttttaacacaccacttttagtgaactctatcttatggtacagcggcctttcatcagaggatcatcattgagactgagttgactggcagatatgtgcgatggatattacattaggtacaatgtgtatttttgattttcatgagttttctacattaaggtaaattccttagagtgtgatagcagcctcagtttatttgttggtttaaacttgaaatctactttttctcgataaaactataatgtagatgaa

SEQ ID NO: 5520 - DNA, 7199 bp, Homo sapiens
ggaagtcggaccagccggccggcggaagaacctagagcgcgctgcctggcgagtcaggcgcgcggggcggcgttggtggtcttcgcggcgcaactcggcctttcctgggagggagtgatggggcgcaccggggccggggagcgggcgccagtgtagcccgcgcggcgcctggcccggagcgcggcggctgcggcggcggcggcggcgggcgctggaggcctgtgagagccgcagcccggagcgcccggcttcccacgccatggcccccatgggcatccgcctttccccactgggggtggcagtgttttgcctgctggggctcggcgtgctctaccacctctactcgggcttcttggccggccgcttcagcctcttcggcctgggcggcgagcctggcggcggcgcggcggggcccgcggccgcggccgatgggggcaccgtggacttgcgcgagatgctggctgtgtcagtgctggccgcagtccgcggcggcgacgaggtgaggcgcgtccgcgagagcaacgtcctccacgagaagtccaaggggaagacgcgcgagggagccgaggacaagatgaccagcggcgacgtgctgtccaaccgcaagatgttctacctgctcaagaccgccttccccagcgtccagattaatactgaggaacacgtggatgcagctgatcaggaggttatcttgtgggatcataagattcctgaggatatcctaaaggaagtaactactcctaaagaggtaccagcagaaagtgttactgtctggattgacccacttgatgctacacaggaatatacagaggatcttcgaaagtacgtcactactatggtgtgtgtggctgtaaatggtaaacccatgctaggagttatacataagccattttccgaatatacagcttgggcaatggtagatggtggttcaaatgtgaaagcccgctcttcctacaatgagaagaccccaaggatcgttgtgtctcgttcccattcagggatggtcaaacaggtcgctcttcagacttttggaaaccagactacaattatcccagctggtggtgctggttataaagttttagcacttttggatgtgcctgataagagtcaagaaaaagctgatttatacatccatgtgacatacatcaaaaagtgggatatatgtgctggtaatgccatcttaaaagccctaggggggcatatgactaccctgagtggtgaagaaatcagttacactggttcagacggcattgaagggggactccttgctagcatcagaatgaaccaccaggccctggtcagaaaactcccagatctagaaaagacaggacataaatgagcataactgattacagggtacagttcttcacagctgaaatggttagcctgagatgctggaagcttcaaaggattggtggagactatgcatggttaaggccatcccgaactttttaaagtatttatgaagcatcagagacttattttccctgtaatagaatgcaaaatcagggaaaatgggttgctttgtgtctcaagtattgtctttatttttgagactattttcatacagttgtcatacacaaggcgcatatatatatttgtgaattaaaatctgtagctgagtctacattgttatgagtcaccattttcacacaacatcatgaatcttcactgttagtactttcatatagaattcggttgaaggaaagattgatttttgtgtagatgtttaatataactttacaactatatctcattgaaaataaagtcattggggatttttacctctaatttggatggaaagcacaagaagccacacattcattaatatgcaacaaatgttgtatttatgttactgaatatttctatggattaaaatagaaaaagtttaattgattttttcttttaaattttaataacaggttcaccagctggtagaaaatagagacacatgatgatttgcattgtaataatttctgtgtgtatgtgtgtgtgttgttttgtttttataaagaaaagtgtgtttgtacccatgagttcagcatttctgccatcttgctattttcattttccctgtggaagatgcatggttgcatccttttccttctgaccaacacttagtctttaactttgtaaggttcggtttaaggtttcagggttagcactatagttttggttcattttctcattaacgataaaatatgctgtaaggcactataagaatataaatgattctattacaattgaaagttacttgacattacatgaattgaactgcctttcattatcttcagacactttgttttagtatttttttttaatttgctaggtttgtatatagaagatcctttcattatcaagaatgagtatggttgcttttgccatggttgcttttactattaataaatgtatctagcctacccaaactctgtagtaacttttgagattctcttaatttcccctcagattaaaatagagaaggttgaaggtactttttgatgaaatttttttctagtctggttagaaaaaaaaagttgtgacatattcattgtgttaccgtaactagaaccttgctttgtgaactgtctttcattgggatgtatggtttctctcaatgtgaaatctggaaacttcatgtaaactacccatgccgttatttcatgtgactccagtgcccttgtattccataacatgctgatgagagggatttctcacggtttctttctttgctaaattttttaaccataaagcagcttaccctttattttcccatcttggaagtaaaattgaccaaagaatgtacgttctagcctggtggaatgtgcatactttaggtttgtatgttacattgtccaaagccctttactttcttattagtaaactgaatctaatatgacacaaatgttttcacccaatctcttgcaactggtcaaattcgagaaggtgttgggccttagcagtaggccttttcagtgaaaattcattcaaagttttggtaggtggaacacttgatatttaaataggacttgaaaattttgaaaagagtatcagagacctcatttttttcctttgcaataagctgaagaaactttctttttcaggagagatggcaaaggtatatgctgttgccagagtcctgtggtataagcatctgtttttattatagtatgtcaaagttagggaaatgggactggcaagtaaaaaatggaatttaatttcaatgttttatgggaactctgatttaatgggaagcaaactagttcatattagcaggaattattttattttttcgagacagagtttcactctcgttggccaggctggagtgcaatggcgtgatctcggctcaccgcaacctctgcttcccgggttcaagcgattctcctgcctcagcctcccaagtagctgggattacaggcatacaccaccacacccagctaatttttttgtatttttgttagagacagggtttctccatgttggtcaggctggtctcgaactcccgacctcaggtgatccgcccacctcggcctcccaaagtgatgattttatttttatttttaattgtattaatctgcatctagataatgactttgtgaagggtgtgtgttgtgtgcaaaacttaaggtattggttgagagttaaatacattatttttataatatgttgggtatagtctagttactaatgattttttttaagtacttttataaaaagttcatttttaaaattgtttgtttttaaaagccaatatacgttgcagaattaggaacagtatttatatttatttacacaagacattgtgccatagcatcctagtaaaacaccttcatgaatgagtaatgttatctcccagaattacattaaaattatttctaaaaagtagcaaagtcattaccttttgcttttaatgacccacacctcaccagctcctggtcttttcttcactgttgcccttattttgaggcaatttttcttaaaatatgacttttatgcaccacatttagtagaggcagtgacatcagtgatctcagtacccatcagctgtccccctcctctgcccttcttcatctcttctaccttgtgaccatttcccttaccggttcatgttctcctttatctctgcttttctttcttagccaggatacttccctcacaactctcactcccaaattcttttagatatacatttttctggatattggctgctgaaatctgaagctctggtaaagttcctagtatcagagatcaatcctggaggaggcctagttcactattagattacaaagactcctcacaaagtaaaggaaaatcaccttcaaaaccacaaccctttatgttgtcaagtctaatatgagtgtttttacgaagtatttctttctacccattgttcaagaatgtaaatgtaaaaaaaaatacaagagagttgggtagatatgcatgcttgaggaaacttgcttttactgttttcctacttgtatccccagttcagttgaatttacaaggacctacaagatggtcatgtttgtcttggtatgtgctaccccaattttagtgtttctttctttattttaaatcagtaattattcagttgattgtttatactatataatgaagtaacaaaaacattttggtttgtatgttttaagtaacagttgtgcaaattcctcttgtttgttaggtgctccctttgaatattttgtgaactgtgtcagagggagaggggtggtggctaggaagagggtcagaaagaagctagagggaggtcaggagaagggtaacagggaggatgcaaagcagacatctaccctggtcaccccaggatcaggatatctgtccttgtttcatgttgaattcaaaaattggatctcacttaggctttgaaggtgacagccatctctgatagctgagcataagtaaagaaaggtggagtgccgatgcagaaaggaaaatattcagctttcctctcttagatcgcactttgaagatggccttttggagacaatctgacaggttaaaacaggaactgttggaattattctagctgtaactacctattggctatgtgttgattgatcctagaaagaaaaaataatttttcattttagatcttgattgaatttaagatgtatttatatgcctacaaaaggtctgtcttgtaactgttgtataaaataaacctaatctatggtttcatttttaatctaaaaaaagttgtgccttaacaatagggcattgtatgttaataagggaaaacaacctttttagtagatgggggaaaataggaactttttgccattaaaacttaagttcttttgatgtttttaatattatagttgggggagattcattaaaattaaattgaaataaaattatttttgcataacctagcatttacaactaaagtatgttttttataagaactggcatcttgatgtatataggtctgaaataatatttcatcttttgatttttaattttaataatattagaccaggatagatcacagttttacaaatcttagttttaaataaattatttcagtgtgctgttagtcctctacagtcattttggtttaaaaagtgactatttatttatggtagcatatcaataatttattaatgttaaaaaatactgtgtatgacattacaaaccagaacagttcctgggggagaggattctaattgattggcagttctgagagggcaagaagaatggaactttatacttcaaaaggaggttttggttttaccaggtactgcttatgtaaatcgtttatttttatttcatcaaagcctggcaagtatatgcattccaatttaccattggcaaagctttatttatttttaaggttggatgttgaattaattttgtgggaaaatgagatttgtaagtagttttctttctagataagataacataaaccaaactttcagaagttaaggatgatgaataatattgaaatgacttgttatatattgtaagggttcccttaagtatcataattaacaatttgtggaaattgaaaaagcataaactgtgttatttgattagtaatatgttcccttaaaattcattttgaggtgtatgttatacacacagtaaatttttgttcaggaatgacttgctcattctgtgtttttaaaaataggaaataaggcatagtgagtcatcattacatcaattaaccaaaaaatatttcatcccctccgtcactgaaattatctacttcagccacctttcttattctcgtgttaggagggcacgtttatggactttttaatttccatgtgccatattgtccactaccggcagtagccaaagctagctgtttcagtcccacagaagagacagtgctctgccatgatgacagggcactgctagggctggtttttcttgtttttcccttttggcagtgtggacttcaggaactagatgtatatgcacaagggattgagtttacactaaaactaggaaatggagttttcaatctatgttcttgcctcttcatacttttatttattttttgtcatcctgccttatactgggctaacaatgagataaaataaaaatacctttgaatactcttttccctttcatgcatttaaagccatggaggaactagaccattagctgttgccgtcacatgcttagacaccagtttacttagcgtgttatgaccttcctcacccatactaccaaatttaaatgggtcccgacttcaccctctggaaggaagtaaactcttctctccccatggtttcagagcagtttttacctgcaagcaccatctctgtatgtgctcttactagattatacagttcttgagagggattgcatcttagtgtttttgtatttccacctcacccccagcacatagcccagtctcttgcacaaattaagtacttaatgtgtgttgagctaaattgaataaaggattattagcattagcatattttgtgccttggttgtataagctggttgtttgttttgttacctttgcaaatatttatgattatcacccccccacatactaaattgtttttaaaagttttgcctttccttcagatactaccccaggcaatttgctgtagataatgtgattgcttccaatgacataattatcccaaactctctgccccggatatactttgccaaacgaaatttgaattctctgaataaattggtcatgtctaaaa

SEQ ID NO: 5521 - DNA, 2058 bp, Homo sapiens
gcgtcctgttcccgcctctccagttaaggccgctggtgtgagccggggctctgcgcgagcgagggacgacggaagggacgggcaggtgtgggcgcggggccacgcagcccgacggcgggagtcgcaggtgctgggtgcatgggccagtgaggacgcacagagatccctcgccgcgcggaggaggagcagcgcgggagccaggcgctgccccaagaccctgcctgcgtccgagcgagcggaacctcgcgcttcgcccggggacaatccgaagtccgcgctatggaagaggagaaatatttgcctgagctgatggcagagaaagatagcctggatccatcttttgtgcatgcgtcgcgccttttggcagaagaaattgaaaagtttcaaggttctgatggaaaaaaggaagacgaagaaaagaagtatcttgatgtcatcagcaacaaaaacataaagctctcagaaagagtactgattcctgtcaagcagtatccaaagttcaattttgtggggaaattgcttggaccaagaggaaactccttgaagaggctacaggaagaaacaggtgctaaaatgtctatcctgggcaaaggatcaatgagagataaagctaaggaagaagaactaaggaagagtggggaagccaaatatgcccacttgagtgatgagcttcatgtattaattgaagtgtttgctccacctggggaagcttattcacgtatgagtcatgcattggaagagattaaaaaattcctggttcctgactacaatgatgaaattcgtcaggaacaactacgtgaattatcttacttaaatggctcagaggactctggtcgtggcagaggtattagaggcagagggatcagaatagctcccacagctccttcaaggggccgtgggggtgccattcctcctcccccaccacctggacgaggtgttctcacccctcggggaagcactgtaacccgtggagcgcttccagtgccacctgtagcaagaggtgtccctacccctcgagcccggggggcaccaacagtgccaggatacagggcacctcctcctccagcccatgaagcttatgaagaatatggttatgatgatggctacgggggtgaatatgatgaccagacctatgagacttatgataacagctatgcgacccaaacacaaagtgtgcctgaatactatgactacggtcatggagtaagtgaggatgcctatgacagctacgcaccagaagaatgggccacaacccgctctagcttgaaggcaccaccgcaaaggtcagccagagggggatacagggaacacccctatggtagatattgaaggtccttcccacctgtgacctcacctcaaagacaattcatagcctgtggtctccacataaacagcaacaagacaagtaatagtcctttttttgtttgtttgtttctattctagggataactgctcatgattactcccatatatttctagtatttccctctgtactgttggcgtgacattgacactagtattattttacaaaacagactgaaaaagacattagcaagcatagtctataaacctttcagtaggatgatattctcttggttgtttttcattgttgtgtgtaatcttttttttttctttttcttttttttttttttgaggaaaagcatgaatttgttaacagattttgagtctcaaccaactagcagaaactttgtttagggttgctaaaagactgtaatatgatttttgaactagctgataataaagttgtagataagatgttttaacctgtcttttaatatctgttagttagacaaagatgtttgatattaagtttgtaaatttaattttaatgctgttttaatggggttgaaaacaagcagctactgtatgtatgtagctaactgaatttgttcagtgttttaacctgtatttgttaaaaaagaaaaaaaaacacacataaagttccatgtgtaagcttctctaaataggaaaccacaatttgtcaaatatgtttgccataatttgtcaataaagctgaaaacttttgtaaaaattaaa

SEQ ID NO: 5522 - DNA, 5132 bp, Homo sapiens
gcccaaggagctcctgctctgccagaggagggtggagagggcggtgggaggcgtgtgcctgagtgggctctactgccttgttccatattatttggtgcacattttccctggcactctgggttgctagccccgccgggcactgggcctcagacactgcgcggttccctcggagcagcaagctaaagaaagcccccagtgccggcgaggaaggaggcggcggggaaagatgcgcggcgttggctggcagatgctgtccctgtcgctggggttagtgctggcgatcctgaacaaggtggcaccgcaggcgtgcccggcgcagtgctcttgctcgggcagcacagtggactgtcacgggctggcgctgcgcagcgtgcccaggaatatcccccgcaacaccgagagactggatttaaatggaaataacatcacaagaattacgaagacagattttgctggtcttagacatctaagagttcttcagcttatggagaataagattagcaccattgaaagaggagcattccaggatcttaaagaactagagagactgcgtttaaacagaaatcaccttcagctgtttcctgagttgctgtttcttgggactgcgaagctatacaggcttgatctcagtgaaaaccaaattcaggcaatcccaaggaaagctttccgtggggcagttgacataaaaaatttgcaactggattacaaccagatcagctgtattgaagatggggcattcagggctctccgggacctggaagtgctcactctcaacaataacaacattactagactttctgtggcaagtttcaaccatatgcctaaacttaggacttttcgactgcattcaaacaacctgtattgtgactgccacctggcctggctctccgactggcttcgccaaaggcctcgggttggtctgtacactcagtgtatgggcccctcccacctgagaggccataatgtagccgaggttcaaaaacgagaatttgtctgcagtgatgaggaagaaggtcaccagtcatttatggctccttcttgtagtgttttgcactgccctgccgcctgtacctgtagcaacaatatcgtagactgtcgtgggaaaggtctcactgagatccccacaaatcttccagagaccatcacagaaatacgtttggaacagaacacaatcaaagtcatccctcctggagctttctcaccatataaaaagcttagacgaattgacctgagcaataatcagatctctgaacttgcaccagatgctttccaaggactacgctctctgaattcacttgtcctctatggaaataaaatcacagaactccccaaaagtttatttgaaggactgttttccttacagctcctattattgaatgccaacaagataaactgccttcgggtagatgcttttcaggatctccacaacttgaaccttctctccctatatgacaacaagcttcagaccatcgccaaggggaccttttcacctcttcgggccattcaaactatgcatttggcccagaacccctttatttgtgactgccatctcaagtggctagcggattatctccataccaacccgattgagaccagtggtgcccgttgcaccagcccccgccgcctggcaaacaaaagaattggacagatcaaaagcaagaaattccgttgttcagctaaagaacagtatttcattccaggtacagaagattatcgatcaaaattaagtggagactgctttgcggatctggcttgccctgaaaagtgtcgctgtgaaggaaccacagtagattgctctaatcaaaagctcaacaaaatcccggagcacattccccagtacactgcagagttgcgtctcaataataatgaatttaccgtgttggaagccacaggaatctttaagaaacttcctcaattacgtaaaataaactttagcaacaataagatcacagatattgaggagggagcatttgaaggagcatctggtgtaaatgaaatacttcttacgagtaatcgtttggaaaatgtgcagcataagatgttcaagggattggaaagcctcaaaactttgatgttgagaagcaatcgaataacctgtgtggggaatgacagtttcataggactcagttctgtgcgtttgctttctttgtatgataatcaaattactacagttgcaccaggggcatttgatactctccattctttatctactctaaacctcttggccaatccttttaactgtaactgctacctggcttggttgggagagtggctgagaaagaagagaattgtcacgggaaatcctagatgtcaaaaaccatacttcctgaaagaaatacccatccaggatgtggccattcaggacttcacttgtgatgacggaaatgatgacaatagttgctccccactttctcgctgtcctactgaatgtacttgcttggatacagtcgtccgatgtagcaacaagggtttgaaggtcttgccgaaaggtattccaagagatgtcacagagttgtatctggatggaaaccaatttacactggttcccaaggaactctccaactacaaacatttaacacttatagacttaagtaacaacagaataagcacgctttctaatcagagcttcagcaacatgacccagctcctcaccttaattcttagttacaaccgtctgagatgtattcctcctcgcacctttgatggattaaagtctcttcgattactttctctacatggaaatgacatttctgttgtgcctgaaggtgctttcaatgatctttctgcattatcacatctagcaattggagccaaccctctttactgtgattgtaacatgcagtggttatccgactgggtgaagtcggaatataaggagcctggaattgctcgttgtgctggtcctggagaaatggcagataaacttttactcacaactccctccaaaaaatttacctgtcaaggtcctgtggatgtcaatattctagctaagtgtaacccctgcctatcaaatccgtgtaaaaatgatggcacatgtaatagtgatccagttgacttttaccgatgcacctgtccatatggtttcaaggggcaggactgtgatgtcccaattcatgcctgcatcagtaacccatgtaaacatggaggaacttgccacttaaaggaaggagaagaagatggattctggtgtatttgtgctgatggatttgaaggagaaaattgtgaagtcaacgttgatgattgtgaagataatgactgtgaaaataattctacatgtgtcgatggcattaataactacacatgcctttgcccacctgagtatacagctgctaatctgaatgaggtggaaaaaggtgagttgtgtgaggagaagctggacttctgtgcccaggacctgaacccctgccagcacgattcaaagtgcatcctaactccaaagggattcaaatgtgactgcacaccagggtacgtaggtgaacactgcgacatcgattttgacgactgccaagacaacaagtgtaaaaacggagcccactgcacagatgcagtgaacggctatacgtgcatatgccccgaaggttacagtggcttgttctgtgagttttctccacccatggtcctccctcgtaccagcccctgtgataattttgattgtcagaatggagctcagtgtatcgtcagaataaatgagccaatatgtcagtgtttgcctggctatcagggagaaaagtgtgaaaaattggttagtgtgaattttataaacaaagagtcttatcttcagattccttcagccaaggttcggcctcagacgaacataacacttcagattgccacagatgaagacagcggaatcctcctgtataagggtgacaaagaccatatcgcggtagaactctatcgggggcgtgttcgtgccagctatgacaccggctctcatccagcttctgccatttacagtgtggagacaatcaatgatggaaacttccacattgtggaactacttgccttggatcagagtctctctttgtccgtggatggtgggaaccccaaaatcatcactaacttgtcaaagcagtccactctgaattttgactctccactctatgtaggaggcatgccagggaagagtaacgtggcatctctgcgccaggcccctgggcagaacggaaccagcttccacggctgcatccggaacctttacatcaacagtgagctgcaggacttccagaaggtgccgatgcaaacaggcattttgcctggctgtgagccatgccacaagaaggtgtgtgcccatggcacatgccagcccagcagccaggcaggcttcacctgcgagtgccaggaaggatggatggggcccctctgtgaccaacggaccaatgacccttgccttggaaataaatgcgtacatggcacctgcttgcccatcaatgcgttctcctacagctgtaagtgcttggagggccatggaggtgtcctctgtgatgaagaggaggatctgtttaacccatgccaggcgatcaagtgcaagcatgggaagtgcaggctttcaggtctggggcagccctactgtgaatgcagcagtggatacacgggggacagctgtgatcgagaaatctcttgtcgaggggaaaggataagagattattaccaaaagcagcagggctatgctgcttgccaaacaaccaagaaggtgtcccgattagagtgcagaggtgggtgtgcaggagggcagtgctgtggaccgctgaggagcaagcggcggaaatactctttcgaatgcactgacggctcctcctttgtggacgaggttgagaaagtggtgaagtgcggctgtacgaggtgtgtgtcctaaacacactcccggcagctctgtctttggaaaaggttgtatacttcttgaccgtgtgggactaatgaatgcttcatagtggaaatatttgaaatatattgtaaaatacagaacagacttatttttattatgagaataaagactttttttctgcatttggaaaaaaaaaaaaagaaatgcttgaactaaagcttcccctatgctggagaagtatgaagaaagatatacctggagacattagaacagcgatgggaaccattgcaactcgggtccatctttg

SEQ ID NO: 5523 - DNA, 3028 bp, Homo sapiens
ccatgggcagcggcacacggcggcgcgatgatggacgttaacagcagcggccgcccggacctctacgggcacctccgctctttccttctgccagaagtggggcgcgggctgcccgacttgagccccgacggtggcgccgacccggtcgcgggctcctgggcgccgcacctgctgagcgaggtgacagccagcccggcgcccacctgggacgcgcccccggacaatgcctccggctgtggggaacagatcaactacggcagagtcgagaaagttgtgatcggctccatcctgacgctcatcacgctgctgacgatcgcgggcaactgcctggtggtgatctccgtgtgcttcgtcaagaagctccgccagccctccaactacctgatcgtgtccctggcgctggccgacctctcggtggctgtggcggtcatgcccttcgtcagcgtcaccgacctcatcgggggcaagtggatctttggacactttttctgtaatgtcttcatcgccatggacgtcatgtgctgcacggcctcgatcatgaccctgtgcgtgatcagcattgacaggtaccttgggatcacaaggcccctcacataccctgtgaggcagaatgggaaatgcatggcgaagatgattctctccgtctggcttctctccgcctccatcaccttacctccactctttggatgggctcagaatgtaaatgatgataaggtgtgcttgatcagccaggactttggctatacgatttactctaccgcagtggcattttatatccccatgtccgtcatgcttttcatgtactaccagatttacaaggctgccaggaagagtgctgccaaacacaagtttcctggcttccctcgagtggagccagacagcgtcatcgccctgaatggcatagtgaagctccagaaggaggtggaagagtgtgcaaacctttcgagactcctcaagcatgaaaggaaaaacatctccatctttaagcgagaacagaaagcagccaccaccctggggatcatcgtcggggcctttaccgtgtgctggctgccatttttcctcctctcgacagccagacccttcatctgtggcacttcctgcagctgcatcccactgtgggtggagaggacatttctgtggctaggctatgcaaactctctcattaacccttttatatatgccttcttcaaccgggacctgaggaccacctatcgcagcctgctccagtgccagtaccggaatatcaaccggaagctctcagctgcaggcatgcatgaagccctgaagcttgctgagaggccagagagacctgagtttgtgctacaaaatgctgactactgtagaaaaaaaggtcatgattcatgattgaaagcagaacaatggagatgaaataaacaaggcaaaatagaggtggaaacagaaggaagtcatttgctgagtctgcagaatggaatgcagcttctgtcctttcttgggatgtctaaaacatgacaaacagggtgatctgttgtacacactatcttatgagggagatggtgacttctccttttttctgtggatcagtgctattgtgtgttctcagtttaagatagcagatcatctcagcagtaagcacaccaacagaactgagttccagaaaggaagcagtttctggtgctttgcatatgtccaaatccatgcaagtgggagaaagttccagtgcacacttcccatgcttctgagtctaggcgttgtggtgaatatgcaggaatcattcatgagacagaatgtattttgttgtatgacagaaggcttttccaagcaaactgcggtgagcgtagtgttgaatatgttgcatgtccatgttagaaaacagaatccagtcatcagctaatacaaatgatttcccagagcagtgtttgtttcaagcttctgtcaaatagtttggcttttctgcagggtctctgtgatttccccacctatgtacttttctgtgttaactcacttattatggtataactcaggaacaggtctcaggatggagagaagcatacaacatgagcaaagctttttctcgtgctctgaagggtcttgagaggggagtgggatgccttctgtgaggatttttatcgcagtgaagctcaagtggtacccaactgcgttgtaattaacatgattattggcatgtttttgactctcattttctacaaggctgcagtgggcccacccatgggctggcccataactgtatgttatgtggaagaagtgtgggaatgatgggttttccatgaaatgtgatgcttctggagatggggcataaacatgttcattcttgttgagctgcattgtgttaaaccaaattgtgtgaagcgaggtcacctggaccactcttgggaaatgcttcagaacaccagtctgttccttctagagaatttgtttttgtgttctatgtatcttaaatcaaatgtgtgcctaagcaattctgtcctctgattcccacccctacccaccaaaaaatggtagacatgaaaggcaggtgaggaaacagaaaaggtctctttgcagatatatattttttaaatggcactatgtagtaattaagagctaaggagacagaaagacagtagatgagaatagaagagtacctgtacctacaaggggaaaaatgaatgcaattctttatttgataagagtgaactgaaagagaatattattttcctacaataaagcaagctgtcctctcacaggataaagtggaattctgacatggattatggacttcttctaactcccattgacattgcttcttaccagacatggggaaaagctacctttcctgaaaggggaggagggcactgtcctttcagacaaagcttgtacaaattcctgaaccgcaaatttgctgaagtgaccgtatatattatattcataatttaaatgattatttatggtcagatacatattgttaaacttgaaaatgttttattacattacatcaaataaagtttatttgtagctgaaataaagcaacgtaagtaacaatttttaa

SEQ ID NO: 5524 - DNA, 7356 bp, Homo sapiens
atgggctcggggcgcgtacccgggctctgcctgcttgtcctgctggtccacgcccgcgccgcccagtacagcaaagccgcgcaagatgtggatgagtgtgtggaggggactgacaactgccacatcgatgctatctgccagaacaccccgaggtcatacaagtgcatctgcaagtctggctacacaggggacggcaaacactgcaaagacgtggatgagtgcgagcgagaggataatgcaggttgtgtgcatgactgtgtcaacatccctggcaattaccggtgtacctgctatgatggattccacctggcacatgacggacacaactgtctggatgtggacgagtgtgccgagggcaacggcggctgtcagcagagctgtgtcaacatgatgggcagctatgagtgccactgccgggaaggcttcttcctcagcgacaaccagcatacctgtatccagcggccagaagaaggaatgaattgcatgaacaagaaccacggctgtgcccacatttgccgggagacacccaaggggggtattgcctgtgaatgccgtcctggctttgagcttaccaagaaccaacgggactgtaaattgacatgcaactatggtaacggcggctgccagcacacgtgtgatgacacagagcagggtccccggtgcggctgccatatcaagtttgtgctccataccgacgggaagacatgcatcgagacctgtgctgtcaacaacgggggctgtgacagtaagtgccatgatgcagcgactggtgtccactgcacctgccctgtgggcttcatgctgcagccagacaggaagacgtgcaaagatatagatgagtgccgcttaaacaacgggggctgtgaccatatttgccgcaacacagtgggcagcttcgaatgcagttgcaagaaaggctataagcttctcatcaatgagaggaactgccaggatatagacgagtgttcctttgatcgaacctgtgaccacatatgtgtcaacacaccaggaagcttccagtgtctctgccatcgtggctacctgttgtatggtatcacccactgtggggatgtggatgaatgcagcatcaaccggggaggttgccgctttggctgcatcaacactcctggcagctaccagtgtacctgcccagcaggccagggtcggctgcactggaatggcaaagattgcacagagccactgaagtgtcagggcagtcctggggcctcgaaagccatgctcagctgcaaccggtctggcaagaaggacacctgtgccctgacctgtccctccagggcccgatttttgccagagtctgagaatggcttcacggtgagctgtgggacccccagccccagggctgctccagcccgagctggccacaatgggaacagcaccaactccaaccactgccatgaggctgcagtgctgtccattaaacaacgggcctccttcaagatcaaggatgccaaatgccgtttgcacctgcgaaacaaaggcaaaacagaggaggctggcagaatcacagggccaggtggtgccccctgctctgaatgccaggtcaccttcatccaccttaagtgtgactcctctcggaagggcaagggccgacgggcccggacccctccaggcaaagaggtcacaaggctcaccctggaactggaggcagaggtcagagccgaagaaaccacagccagctgtgggctgccctgcctccgacagcgaatggaacggcggctgaaaggatccctgaagatgctcagaaagtccatcaaccaggaccgcttcctgctgcgcctggcaggccttgattatgagctggcccacaagccgggcctggtagccggggagcgagcagagccgatggagtcctgtaggcccgggcagcaccgtgctgggaccaagtgtgtcagctgcccgcagggaacgtattaccacggccagacggagcagtgtgtgccatgcccagcgggcaccttccaggagagagaagggcagctctcctgcgacctttgccctgggagtgatgcccacgggcctcttggagccaccaacgtcaccacgtgtgcaggtcagtgcccacctggccaacactctgtagatgggttcaagccctgtcagccatgcccacgtggcacctaccaacctgaagcaggacggaccctatgcttcccttgtggtgggggcctcaccaccaagcatgaaggggccatttccttccaagactgtgacaccaaagtccagtgctccccagggcactactacaacaccagcatccaccgctgtattcgctgtgccatgggctcctatcagcccgacttccgtcagaacttctgcagccgctgtccaggaaacacaagcacagactttgatggctctaccagtgtggcccaatgcaagaatcgtcagtgtggtggggagctgggtgagttcactggctatattgagtcccccaactacccgggcaactacccagctggtgtggagtgcatctggaacatcaaccccccacccaagcgcaagatccttatcgtggtaccagagatcttcctgccatctgaggatgagtgtggggacgtcctcgtcatgagaaagaactcatccccatcctccattaccacttatgagacctgccagacctacgagcgtcccattgccttcactgcccgttccaggaagctctggatcaacttcaagacaagcgaggccaacagcgcccgtggcttccagattccctatgttacctatgatgaggactatgagcagctggtagaagacattgtgcgagatggccggctctatgcctctgaaaaccaccaggagattttaaaggacaagaagctcatcaaggccttctttgaggtgctagcccacccccagaactacttcaagtacacagagaaacacaaggagatgctgccaaaatccttcatcaagctgctccgctccaaagtttccagcttcctgaggccctacaaatagtaaccctaggctcagagacccaattttttaagcccccagactccttagccctcagagccggcagccccctaccctcagacaaggaactctctcctctctttttggagggaaaaaaaaaatatcactacacaaaccaggcactctccctttctgtctttctagtttcctttccttgtctctctctgcctgcctctctactgttcccccttttctaacacactacctagaaaagccattcagtactggctctagtccccgtgagatgtaaagaaacagtacagccccttccactgcccattttaccagctcacattcccgaccccatcagcttggaagggtgctagaggcccatcaaggaagtgggtctggtgggaaacggggaggggaaagaagggcttctgccattatagggttgtgccttgctagtcaggggccaaaatgtcccctggctctgctccctagggtgattctaacagcccagggtcctgccaaagaagcctttgatttacaggcttaatgccagcaccagtcctctggggcacatggtttgagctctggacttcccacatggccagctttcttgtctatacagatcctctctttctttccctacgtctgcctggggtctactccataagggtttacaaatggcccacaacactgagttagtggacaccggctaaatgaggaagagcagcaggcattgtcatggtgaatgccccgctgtagctccctgagagaaagactgtaactctgcaggacagaaacaaggttttaaagcattgccaaaaaaaagaaaacagaaagaaaaaatgtatcatctaaaggactagacacagaacaattggaagtcaacttcaaacactaatcccttttcttgtcttccctggcccagccacctcctcagccccatgtgatgctccctgggggagccctactccccttgctacatgttgtccttaaacatggttattgacctgaagccagcctaggccttgccctacagttgtttttcccttgtagccccagctggcttgtgggcttcaccaaagaggaccccactctgaagccagcctggagccacctacctctggcctcaggctgtgggcagcaaaaggaatgtgtgtgcacttggcgagcctcctgcccaccctgtccacacctaataagtgcaatcattttgagtctttctatgttgtctagacggaggggtttttgttttctgggtttgttttttgtttttgtttcttcttcctctattagcaaaaccctatttatagctgcccaagagaaaagagtgtatgtttggagtggaagaaaatcggttttgaatctcatgaaccttgagtgctggagcatctgatctgtctctatgccaccactggccacctagagcccttggctgtggtaatccagggtaattgcgcagaggcatctgatgtgtaggaaagtaattctggggatttgatggagcagaaaggagagagacctatgtttgctaaaccaatcttgctatccctatgcctctccatggagtcagtgtggacctcatgattatagaggccaatggaactggtcagtgattctctaccccaagtagggaaaacctccatcttttccctgtcttcatcctgttatcccctggtgtacacatggaagaggaccaggacataccacctggggatgggctgactcagggtcccgaggccagagacaaagctgtgggagccaagaataagacagaaggcatcagatatttgcctggctctggtcacttccctttgaagttgacttcaagcttagcttcctcaactactgtttttcagaaggaagaaagaatcaaatggaagaagaatcaagtccatgcccaagcccaaagcctgcacacattctgcccttaatccaagtgttgcctataaaattattttctgttttctcactctagttcccccaaagctgtagtcccaatcaatcaaaggctaccaactgagtcctcaggttcatttcttttttttttttttttctttttaactctcctggtaactcacagaacagctcaggttcatttctaggtgactgtcctaggctactgctcccccaggagactcaacactaaataaaggagtctgactccctgccctcccatcagtagcattcatcagccaaaacggccatagcagtaggtagccaatgacacagctagattccctgacaaccattagccaacatcatggtccttgtgggtagagtgtctggctacctttgtctttctgggtcaaggagggccactgtaaagatgcaaaatggctgcttccaaacaagggaaatggtcatttagtatgagtgtctctgtacttcccaggaagcaccatgaaaactgctttaatcaactctgactatcctaattctccaccagaagctaggataactttctttctttctttctttttttttttttttttttttgagatggagtctcgctctgtcacccaggctggagtgtaatggtgctatctcggcctactgcaacctccgcctcccaggctcaagcaattctgcctcggcctcccaagtagctgggattacaggcatgcgccaccgcgcccagctaatttttgtatttttagtagagatggggtttcaccatgttgcccgggctggtcttgaactcttgacctcaggtgatccacccgcctcagtctcccaaagtgctgggattacaggcatgagccaccgcgcccagcctaggataactttctgattcctctctgccagccgttttgcgtctcttggaaagccaaacggtgaccatgcttcttaatttatgccttcagggtctggcttctcctttctcccttcctttcctgtcacaccatgcatacatacatacaaatacacatccttcaaccatttattccatggcttatgagacctgcaaatgagttccacagtacggaaggcatagaccactaggcttcttaattgatgtcaaggcagatcttggtgagcaggtaaaaacctgctattgtccaccaagtttaatttaggtcctccaagttggagggttaagaacccaggcaaagctgctgctgaatctatggaggaggctggccctgggacatcaaactaggggttaactggattgaatgaggagtcaacgctcagggacattctaggtctttacaggtcagacagaagagaggtttttaccattggagggaaatggaaagatggtataaataggatcccttcatgaagcaacccagaggcctctctgcagcgtgtagggtgtggggcgacagtattgtggggcttccattcatcttagtacaaaacctcacctgctctgagcctggaaatgggagggcttcacgcaccaagtaatgcacaccagaaaggcacttatatcctcagcaacatggcagttcctctttacttctctgcctccctctttctatattatcaggccatgcctattcctacaacctgagacaactcttggagtcagaagaaaactgaccagatcctggatctgagctgcctgctccaggcctagaaatccccaaaggctggcactgagctgtgactgctttaacagcccccaagatttggtcagtttgaggtggtggagactcagatttgttgctgaaagttcagtaacacagtcctggtctttggccctagagaaactttttatatgagaagtgttctctatatacatgtttgaggtgactctggaatggattatgaggtcatatctcaaaatgtcagaaaacgttatagagcactcgaacttttgtatttgctgcttaacctcaatattacagccacaaacaaggggtaccaagacaaagtataactgagcataagcagaaaatgttaaccctccaggtttctttcttaagcacaataaaagtgggagcgaacaacacaaggatatttttacatttgacccgtctcaaaagtagcacaccctatccttgtgccattatttgtacaaggaaatatatgattagaaggaatagaacccccagttgtcatcagcttttttagacaccacaggttgtagcagtttgaacaaactgaaaactttatacttctgtgtgagctgaactcaagtttcagaataatcatcgccatgtgggaggctttttgttaaatgcagaagaaatttcaaaatattgtatttatatctgccttccactgctgccaatttagtaagcatctcctatacaatcgacaataaacagcaaatgatgcagttcatagagtattttgcacttggggaaaaatatgtatctgaattgtaaaaagaaatgtttggattttgtatgtcttttttattattattaaaatactaaatgaaactcctca

SEQ ID NO: 5525 - DNA, 5385 bp, Homo sapiens
agttttaattgcttccaatgaggtcagcaaaggtatttatcgaaaagccctgaataaaaggctcacacacacacacaagcacacacgcgctcacacacagagagaaaatccttctgcctgttgatttatggaaacaattatgattctgctggagaacttttcagctgagaaatagtttgtagctacagtagaaaggctcaagttgcaccaggcagacaacagacatggaattcttatatatccagctgttagcaacaaaacaaaagtcaaatagcaaacagcgtcacagcaactgaacttactacgaactgtttttatgaggatttatcaacagagttatttaaggaggaatcctgtgttgttatcaggaactaaaaggataaggctaacaatttggaaagagcaactactctttcttaaatcaatctacaattcacagataggaagaggtcaatgacctaggagtaacaatcaactcaagattcattttcattatgttattcatgaacacccggagcactacactataatgcacaaatggatactgacatggatcctgccaactttgctctacagatcatgctttcacattatctgtctagtgggtactatatctttagcttgcaatgacatgactccagagcaaatggctacaaatgtgaactgttccagccctgagcgacacacaagaagttatgattacatggaaggaggggatataagagtgagaagactcttctgtcgaacacagtggtacctgaggatcgataaaagaggcaaagtaaaagggacccaagagatgaagaataattacaatatcatggaaatcaggacagtggcagttggaattgtggcaatcaaaggggtggaaagtgaattctatcttgcaatgaacaaggaaggaaaactctatgcaaagaaagaatgcaatgaagattgtaacttcaaagaactaattctggaaaaccattacaacacatatgcatcagctaaatggacacacaacggaggggaaatgtttgttgccttaaatcaaaaggggattcctgtaagaggaaaaaaaacgaagaaagaacaaaaaacagcccactttcttcctatggcaataacttaattgcatatggtatataaagaaccagttccagcagggagatttctttaagtggactgttttctttcttctcaaaattttctttccttttattttttagtaatcaagaaaggctggaaaactactgaaaaactgatcaagctggacttgtgcatttatgtttgttttaagacactgcattaaagaaagatttgaaaagtatacacaaaaatcagatttagtaactaaaggttgtaaaaaattgtaaaactggttgtacaatcatgatgttagtaacagtaatttttttcttaaattaatttacccttaagagtatgttagatttgattatctgataatgattatttaaatattcctatctgcttataaaatggctgctataataataataatacagatgttgttatataaggtatatcagacctacaggcttctggcaggatttgtcagataatcaagccacactaactatggaaaatgagcagcattttaaatgctttctagtgaaaaattataatctacttaaactctaatcagaaaaaaaattctcaaaaaaactattatgaaagtcaataaaatagataatttaacaaaagtacaggattagaacatgcttatacctataaataagaacaaaatttctaatgctgctcaagtggaaagggtattgctaaaaggatgtttccaaaaatcttgtatataagatagcaacagtgattgatgataatactgtacttcatcttacttgccacaaaataacattttataaatcctcaaagtaaaattgagaaatctttaagtttttttcaagtaacataatctatctttgtataattcatatttgggaatatggcttttaataatgttcttcccacaaataatcatgcttttttcctatggttacagcattaaactctattttaagttgtttttgaactttattgttttgttatttaagtttatgttatttataaaaaaaaaaccttaataagctgtatctgtttcatatgcttttaattttaaaggaataacaaaactgtctggctcaacggcaagtttccctcccttttctgactgacactaagtctagcacacagcacttgggccagcaaatcctggaaggcagacaaaaataagagcctgaagcaatgcttacaatagatgtctcacacagaacaatacaaatatgtaaaaaatctttcaccacatattcttgccaattaattggatcatataagtaaaatcattacaaatataagtatttacaggattttaaagttagaatatatttgaatgcatgggtagaaaatatcatattttaaaactatgtatatttaaatttagtaattttctaatctctagaaatctctgctgttcaaaaggtggcagcactgaaagttgttttcctgttagatggcaagagcacaatgcccaaaatagaagatgcagttaagaataaggggccctgaatgtcatgaaggcttgaggtcagcctacagataacaggattattacaaggatgaatttccacttcaaaagtctttcattggcagatcttggtagcactttatatgttcaccaatgggaggtcaatatttatctaatttaaaaggtatgctaaccactgtggttttaatttcaaaatatttgtcattcaagtccctttacataaatagtatttggtaatacatttatagatgagagttatatgaaaaggctaggtcaacaaaaacaatagattcatttaattttcctgtggttgacctatacgaccaggatgtagaaaactagaaagaactgcccttcctcagatatactcttgggagagagcatgaatggtattctgaactatcacctgattcaaggactttgctagctaggttttgaggtcaggcttcagtaactgtagtcttgtgagcatattgagggcagaggaggacttagtttttcatatgtgtttccttagtgcctagcagactatctgttcataatcagttttcagtgtgaattcactgaatgtttatagacaaaagaaaatacacactaaaactaatcttcattttaaaagggtaaaacatgactatacagaaatttaaatagaaatagtgtatatacatataaaatacaagctatgttaggaccaaatgctctttgtctatggagttatacttccatcaaattacatagcaatgctgaattaggcaaaaccaacatttagtggtaaatccattcctggtagtataagtcacctaaaaaagacttctagaaatatgtactttaattatttgtttttctcctatttttaaatttattatgcaaattttagaaaataaaatttgctctagttacacacctttagaattctagaatattaaaactgtaaggggcctccatccctcttactcatttgtagtctaggaaattgagattttgatacacctaaggtcacgcagctgggtagatatacagctgtcacaagagtctagatcagttagcacatgctttctactcttcgattattagtattattagctaatggtctttggcatgtttttgttttttatttctgttgagatatagcctttacatttgtacacaaatgtgactatgtcttggcaatgcacttcatacacaatgactaatctatactgtgatgatttgactcaaaaggagaaaagaaattatgtagttttcaattctgattcctattcaccttttgtttatgaatggaaagctttgtgcaaaatatacatataagcagagtaagccttttaaaaatgttctttgaaagataaaattaaatacatgagtttctaacaattagaaaagaaaaaattaaaacatgaaatgataacaaaagtaaacaaaagatactttcaaagcagtgaacaaaacattttgacataagccataatataaattataatataaaaaataaaaaccatagtataaattgtcagcctttgagttggctacaaattcaatttaatgacagaagagaagggatgctggaggtaaattcttagggtttctatctcatagagtttgctcttctggttctctagactgccaaagaacataaagatgtgcgaggggacctagctgtagtaaaagcaatcctataacaagaaaaactctaaaacagtgccccttacgattttctactgaaatttctctaatagtagaggtgtaaaataagaagttagagaataatgcaaagggggcccaccacagacggaacatttcttttctcttaagactcatgtgatttttgcatcttactccataatatatttgtggttgcgttaatatgacaatgtctgcaattaaacaccagtaagcaaaattgatacatcagaatgacttgcagggcttatcatgcagtttggtttacatccctactccactgccatttacttgagcgtgaatgagacacaaaagattatttgcctcccataatccaactttacacataaataacacaaggctaaagaaaaccagaactcaaattcaccacgcataggagtgataacaaaaatatttaacagtcagtatgggtgattactggccaatcagaatacatcactgatacatcgaaatggatgcaggccactatgactaacttgtgggtatcatttctatgatcaccctaaaacagagttgggaaaatatctattaactggtctctctggtttgaattctcaatatgtatcttaatatgaaatagctcattaaaacttcatgtgtaactatttcagcattgttgtcagctactctttattccacttctgtacagtatttattcaaccaagctgctgctttcaatgaaggtcacttgttccttcagggacacatatactcccacctatcctttaattttgaatggtttgtcaggaaaatttactttctcttgagttgaaaaacttgacaggaagcaagaaataatacagtcctagcctctttccaataacatctgatttctccattctcaaactacacttctcaaggaaccagatatttactctcatctgggaagatgcctcttatgttttccttttacttcctggttatcatgtggttgcattttccaagttcttatcattgaatttatgagagcctatcaaaatttattttctttcatttatattctaataattgaaatgtgagatgaaaataacatttcacttatgaaaaacccttctcttgatgaatccttccatgtgttagttatctattgctgtgtaacaaattaaaacttaatggcttgaaacaaa

SEQ ID NO: 5526 - DNA, 3268 bp, Homo sapiens
agtacgaagacgaccgggctctcaagatggcggccccatgcggaaacagctccagggagcagccatgttgcttcctgaacaaagcctctgaagatgcggaacgggcaaaaccgcccagtacggaacggcgcagcctcgggagcccggtgtggtgctcgcggacaggaagcaggagagtttgccaatagggatgtgacagcggttcccattaagcggtgatggtggttttgggacctgataatcgagctgggagtcagaggcgggatgtgtgcggtgaaggatgttttgatacccccatataaaataatctgtctgtcatgggagcccccacgtcctctgaaatagttcagctctgtctgcatgacttgtcctgggactgaggaaaatttaccagtcatctggccttttggaagagcaaaaaatgatgaagtcccaggggttagtatcattcaaggatgtggctgtggatttcacccaggaggagtggcagcaacttgacccttctcagaggaccctgtacagggatgtgatgctggagaactacagccacctggtctcaatggggtatccagtttccaaaccagatgtcatctccaagttggaacaaggagaagagccatggatcataaagggagacatatcaaattggatctatccagatgaatatcaggcagatgggagacaagacaggaagagtaaccttcacaactcccagtcatgtattttggggacagtttccttccatcataagatactgaaaggagtcacaagggatggttcattgtgctccattttaaaagtctgtcaaggtgatggtcagctgcagagatttctagagaatcaagacaaactcttcaggcaggtcacatttgttaacagcaaaacagtgactgaggcatcagggcataaatataatccactggggaaaatatttcaagagtgcatagaaacagatatatcaatacagagattccataaatatgatgcttttaaaaagaacttaaaaccaaatattgacctaccgagttgttataagagcaattcaagaaaaaaacctgatcagagttttggaggtggaaaatcatctagccagagtgagcccaattctaatcttgagaagattcacaatggagtaataccttttgatgataatcagtgtggaaacgtttttagaaatacacaatcccttattcaatatcagaatgtggaaactaaagagaaaagctgtgtatgtgttacatgtggaaaagcctttgctaagaagtcacaactcattgtacatcaaagaattcatactggaaagaaaccatatgattgtggtgcatgcggaaaagccttcagtgagaagtttcatcttgttgtacatcagagaactcatactggggagaaaccttatgattgttctgaatgtggaaaagccttctctcagaaatcgtcccttattatacatcagagagttcacactggggaaaaaccctatgaatgtagtgaatgcgggaaagccttctcccagaaatcacccctcattatacatcagagaatacatactggggaaaaaccctatgaatgtagagagtgtgggaaggccttttcccagaagtcacagctgattatacaccacagagctcatactggagagaagccgtatgagtgtaccgaatgtgggaaagccttctgtgagaagtcccacctcattatacataaaagaattcacactggtgagaaaccctacaaatgtgctcaatgtgaggaagccttcagcaggaagacagaactcattacacatcagttagttcatactggggaaaaaccttatgaatgtactgaatgtggaaagacattctcccgcaagtcacagctcatcatacatcagagaacacatactggagaaaaaccctataaatgtagtgaatgtggcaaagccttctgccagaagtcacatctcattggacatcagagaattcacacaggagaaaaaccttatatatgtactgaatgtgggaaagccttctctcagaagtcccaccttccgggacaccagcgaattcatacaggagagaaaccttacatatgtgctgaatgtggaaaggccttttctcagaagtcagaccttgttttacatcagaggattcatactggggaaagaccctatcaatgtgctatatgtgggaaggccttcatccagaagtcacaactaactgtacaccagagaattcacacagtggtaaaatcataatgaactggccacagaaaagccttagtattagctcaagccttaataattactagaaacccaattaatttgataagcttggggacaacatcccaatagataaaaatttttaagggaatttgtttctagtttggtgatgcctaacttttccagcaaagatgatggaaaatagttatataaatgaagaacatttttaatatggcatgtaaagcttttaaagttatgaactcagtgatcagcacagcaagttaagcatacagaatattgtcaagttgcatattccttatactacaaaatgataatcagccattgtgaaactgctaatattagcttgtcataattatggccataaactaatttttctataaaagacgtggaagaaagcttaagtaaacaataaaataaaacctatacactattttaagaaggggcttgagcatgacccctaaagctacatgtaaagttcttgtacaaaaaatggaatgataggttgatcagattcagtaaagttgatctgtatgcattttcccatctcaagcatataagttgacctgcatctctggaaggaccttgagattgatgcattttgagcaggtctcccttttactcttcccaactgggaacttggagctgaaaaacattggcactgaggccagatggccttgggtttaatcctggctcagtgcctcacagattgtgtgactttaggcaaacatacttctcctagctgagtattttttatcagtaagtacaaatacaatgcagagctcattttcagttaatattagtactttttaaatctttactctctatcttgaagcattagatgttaagactaatgtgtaaaaaccacgtctgagcttgcttttccctctggacactctgcttttgattgcctatccctataagtggctcattttactgtcttctgatcctggtggccttatttttgctatgttaaggttgtgttttttaatacttggatttattttcatatacttacataaaccgtggtgattgcacataaagaccctg

SEQ ID NO: 5527 - DNA, 739 bp, Homo sapiens
gggaaatggctttaattctgacggcagggctgtgagggactagcgggaacccgagccttttgtcaaggaactgcggcgtcggtggccagtcatccccgccgccgcggagccgctgcactgctgggggatctcccagcagctctgacgagcgcgggctgcagcatgggcagaaaacgctgccctgcagattagctgggtggattttttaagcgcaccccaccccccaaacccataaaataacaaaaccaacccgcagtggccgaccggagatagctaagatgccgcgcaggagtttccacctggatgtttgaggttgtgtagatgtggccggcacccttgagagtggagctagggggtgcagactgagcagtgaacagaaggagccttggacagggctgggccagcctcccgagttccaggagcgaattgcaaacccaccgggaaaatgagcgaagagacggtccccgaggctgcctcgccgccgcccccgcaggggcagccttactttgaccgcttctcagaggacgaccccgagtacatgcgccttcgcaaccgggcggcggacctgcggcaggacttcaacctgatggagcagaagaagcgcgtcaccatgatcctgcagagtccctctttcagggaggagctggaaggcctcatccaggagcagatgaagaaggagtacaagaaagaggtggagaggaagaaactagaacttgatgctcctggctggttctcttca

SEQ ID NO: 5528 - DNA, 801 bp, Homo sapiens; identical to SEQ ID NO: 352

SEQ ID NO: 5529 - DNA, 5725 bp, Homo sapiens
cagccgccggcggcgctagcacctcggagtcgggcggccggagcagcggagcgcagcgcggcgcagggaacggcactgggggtggggagaccagcccggccgagccgagggccaccccctggtcctctgccctcgcgccccgctagggccaggtgcacaaaaagctttaaacaagttaaaatctaggcaacagactccctgaagtgttgactgcccaacttaatcatgactgtgattcaaaaatgttaataaataaaccaaggtgtagatcatggggaattcatatgctgggcaactgaaatctgctcgatttgaggaagctctccacaactccatagaagcctccctcagatgtagtagtgtggtaccacggccaattttttcccagctatacctggaccctgaccagcatcctttctcatctgcagatgtcaaacccaaggtggaggatctggacaaagatttggtaaaccgctacactcaaaatggaagtctggatttttctaacaatctaacagttaatgaaatggaagatgatgaagacgatgaagaaatgtctgattcaaacagcccaccaattccctattcacaaaaacctgccccagaaggatcttgcactacagatggtttttgtcaagcaggaaaggatttgcgtttggtatcactgtgtatggaacaaattgacatcccagcaggattcctcctggtgggggccaagtctcccaatctgcctgaacacatcctagtttgtgctgtggacaagcgatttctaccagatgatcatggaaaaaatgcacttttagggttttctggaaattgtatcggctgtggagaaagaggatttcgatatttcacggaattttccaaccacattaacttgaagctcaccactcagccaaagaagcagaagcacttaaagtactacctagtcagaagctcccagggtgtactgtctaaaggacctcttatctgctggaaagaatgtagaagccgacaatcctctgcttcttgccactctattaagccaagctcttcagtgtcgtcaactgtgaccccagaaaatgggacaactaatggatacaaatcaggattcactcagacagatgctgctaatggaaacagtagccatggagggaagggcagtgcatccagctccactccagcccacacagggaattactctttgtcaccacgacctagctatgcatcaggagatcaagctaccatgttcatttctgggccaccaaagaaacgacaccggggatggtatcctgggtcacctctcccccaacctggcttagttgtacctgtccctacagttcgccctctttcaagaacggagccccttttatctgccccagttccacagaccccactaactggaattttacaacccaggcccattcctgcaggggaaactgtaattgttcctgaaaacctgctgagtaactcaggagttagaccagtaattctgataggctatggcactttaccctatttctatggaaatgttggtgacattgttgtgagtcctctgctggtgaattgctacaagattccacagttggaaaacaaagatttggaaaaattagggttgaccggcagccaatttctgagcgtggaaaacatgattcttctgacgatacagtatcttgtgcggctgggtcagcaccagtcccgagctctggcagagagcatgctcaccacaagtgagtttttgaaagaaattagttatgagcttatcacaggaaaggtcagtttcctggcatcacatttcaaaaccacatcattaggcgatgacctagacaagctgctggaaaaaatgcaacaaagaagaggagacagtgtggttacccctttcgatggagaccttaatgaatgtgtgtcaccccaggaggctgctgctatgattcccacacaaaacctggatttagataatgaaaccttccacatttatcaaccgcagctaacagttgccagaaaactcttatcccaggtgtgtgctatagcggacagtggcagccagagcctggacctcggtcacttcagcaaagtagacttcatcatcattgttcccagatcggaggtgttggttcagcaaactcttcagcggattcgacaatcaggtgtccttgtagacttgggtctggaggaaaatgggacagcccatcagagagcagaaaaatatgttgttcgtctagacaatgagattcaaaccaagtttgaagtttttatgaggagagtgaaacagaacccgtacacactgtttgtgctagttcatgacaactcccatgtggaactaacgagtgtcatttcaggctctttgtcacatagcgaacccagtcatgggctagctgatagagtcattaattgcagagaagttctggaagctttcaacctcctggtgctccaggtcagctccttcccatacactctgcagacccaacagtcccgcattagctctagcaatgaggttcactggatacagctggatactggggaggacgtgggctgcgaggagaagctgtactttggcttgagtgagtacagcaagtctctgcagtgggggatcacgagcccacttctgagatgtgacgagacttttgaaaaaatggtgaacacactcttggagaggtaccccaggctgcacagcatggtcgtccgctgctatcttctcatccagcagtactctgaggccctgatggctctcaccaccatggcgtcactccgcgaccacagcacaccagaaacactcagcattatggatgacctcatcagctccccaggcaaaaacaaaagtgggaggggacacatgctcattatcagggtgccctcggtgcagctggcgatgttagccaaggagcggctacaggaggtgcgcgacaaactgggtctgcagtatcggtttgagatcatccttgggaacccggccaccgaactcagtgttgcaactcactttgtggcgcgattaaagagttggagaggaaatgaaccagaagagtggatccctcggacataccaagatttagacggtctaccttgtattgtgatattaactggcaaagatcctcttggagaaacctttcccaggtctttgaagtactgtgacctccggttaattgactcaagctatttaactcgcacggccttggagcaggaggtgggtctggcatgctgctatgtctcaaaagaggtcatccggggacccactgttgccctggacctcagcgggaaggagcaggagagagctgctgtcagtgagaatgactccgatgagctgctcatcgacctggagcggccccagagcaacagcagcgctgtcacagggacctcgggttccatcatggagaatggagtgagctcttccagcacagctgacaagtcccagaagcagtccctgacccccagctttcagagcccagccaccagcttggggctggatgaaggggtctccgccagctcagctggagccggagccggggagactctgaagcaggaatgtgactccctgggcccccagatggcgagcagcaccacctccaagccgtcatcatcatcctcaggacccaggaccctcccatggccgggacagcccatcagaggctgccggggcccacaggcagccctgccaccagtggtgatcctatccaaagcggcctacagtctcctgggctcccagaagagtggcaagctgccatcctcctcctccctgctgccccacgccgacgtggcctgggtgagctccctgcggccactcctgaacaaggacatgagcagtgaggagcagtccctctactacaggcagtggaccttggcccggcagcaccacgctgactatagcaaccagctggacccggcctctggcacccgaaacttccacccccgacggctcctgctgacagggcccccacaggtgggaaagacgggctcctatttacagttcctcaggatcctcttccgcatgctcatcaggctcctggaggtggacgtgtatgatgaggaggagatcaacaccgatcacaatgaaagcagtgaagtgagccagtcagagggagagccctggcctgacatcgagagcttcagtaaaatgccttttgatgtcagtgtgcatgaccccaagtacagtttgatgagcctggtgtatactgagaagctggcaggggtcaaacaagaagtgataaaggaatccaaagttgaagagcccaggaaacgggaaactgtatccataatgctgaccaaatatgcagcctataacacctttcaccactgtgaacagtgccgccagtacatggacttcacctctgcctcccagatgtctgactccacccttcatgccttcacattctcttcttctatgctgggagaagaggttcagctctatttcatcattcccaaatccaaagagagtcattttgtcttcagcaagcagggcaagcacctggagagcatgcggctgcccctggtttcagacaagaatttgaatgcagtcaagagccctattttcactccttccagtggtcgacatgagcacggactcctaaaccttttccacgccatggagggcatcagccaccttcacctcctggtggtcaaagagtatgagatgcctctgtaccgcaagtactggcccaaccacatcatgctggtgcttcccggcatgttcaataatgcaggcgtgggtgctgccaggttcctcatcaaggagctatcatatcacaacctagaattggagagaaaccgcctggaggagctaggcattaaacgccagtgtgtctggcctttcatcgtcatgatggatgactcatgtgtcctatggaacattcacagtgttcaggagccatccagccagcccatggaagtaggagtttccagtaagaatgtgtccttgaagactgtcttgcagcacattgaagccacaccaaaaattgtccactatgcaatcttgggcatacagaaatggagcagcaagctgacttctcagagcctaaaggccccattctctaggtgtcacgtgcatgatttcattctcctcaacacagacttgactcagaatgtgcagtatgacttcaacaggtatttctgtgaagatgctgactttaatctgagaacaaacagtagtggcctgctcatctgccgctttaataacttcagtctcatgaagaaacatgttcaggttggagggcaaagggactttatcattaaaccaaagatcatggtgtcagagagcttagcacccatcttgccccttcaatacatctgtgctcccgacagtgaacacacactactggcagcccctgcacagtttctcctggagaaattccttcagcacgcctcatataaactcttccccaaagccatccataacttcaggagtcctgtgctggccattgactgctaccttaacattggaccagaggtggccatatgctatatcagctccagaccccactccagcaatgtcaactgtgaaggggtgtttttcagtggactccttttgtacctctgtgactcttttgtaggtgctgatcttaagaaatttaaatttctaaaaggtgctacactgtgtgtcatctgccaagacagaagttccttgcgccaaacaattgtccgcttagagctagaagatgagtggcagttccgcctccgggacgagtttcaaactgctaacagcagtgatgacaagcctctctactttcttactggacgtcatgtatgagcttttgaa

SEQ ID NO: 5530 - DNA, 2422 bp, Homo sapiens
ttttcctgtcccctggtcctgccttatctttccagtcgtccagcatgctctgcccaccccacgccgaggtgcactgaccatgagcctcaactcctccctcagctgcaggaaggagctgagtaatctcactgaggaggagggtggcgaagggggcgtcatcatcacccagttcatcgccatcattgtcatcaccatttttgtctgcctgggaaacctggtcatcgtggtcaccttgtacaagaagtcctacctcctcaccctcagcaacaagttcgtcttcagcctgactctgtccaacttcctgctgtccgtgttggtgctgccttttgtggtgacgagctccatccgcagggaatggatctttggtgtagtgtggtgcaacttctctgccctcctctacctgctgatcagctctgccagcatgctaaccctcggggtcattgccatcgaccgctactatgctgtcctgtaccccatggtgtaccccatgaagatcacagggaaccgggctgtgatggcacttgtctacatctggcttcactcgctcatcggctgcctgccacccctgtttggttggtcatccgtggagtttgacgagttcaaatggatgtgtgtggctgcttggcaccgggagcctggctacacggccttctggcagatctggtgtgccctcttcccctttctggtcatgctggtgtgctatggcttcatcttccgcgtggccagggtcaaggcacgcaaggtgcactgtggcacagtcgtcatcgtggaggaggatgctcagaggaccgggaggaagaactccagcacctccacctcctcttcaggcagcaggaggaatgcctttcagggtgtggtctactcggccaaccagtgcaaagccctcatcaccatcctggtggtcctcggtgccttcatggtcacctggggcccctacatggttgtcatcgcctctgaggccctctgggggaaaagctccgtctccccgagcctggagacttgggccacatggctgtcctttgccagcgctgtctgccaccccctgatctatggactctggaacaagacagttcgcaaagaactactgggcatgtgctttggggaccggtattatcgggaaccatttgtgcaacgacagaggacttccaggctcttcagcatttccaacaggatcacagacctgggcctgtccccacacctcactgcgctcatggcaggtggacagcccctggggcacagcagcagcacgggggacactggcttcagctgctcccaggactcagggacagatatgatgctgcttgaggactacacgtctgatgacaaccctccctctcactgcacttgcccacccaagagaaggagctcggtgacatttgaggatgaagtggaacaaatcaaagaagctgccaagaactcgattcttcatgtgaaagctgaagtacacaagtccttggacagttacgcagcaagcttggccaaagccattgaggccgaagccaaaatcaacttatttggggaggaggctttgccaggggtcttggttacagcacggactgtcccggggggcggcttcgggggccgccgaggcagcagaactcttgtgagccagaggctgcagttgcagagcatcgaagaaggagatgttttagctgccgagcagagatgagggcctcagggtgccgtggggctgcagcctgagaggctggcccggggaggagttcccatcaccgcctgtgccgcggccttgggagcatgtcactgtgtacagctggccacacacagggaaggagcagcatctggtatgcagccaccaggacaaggactgaaaataatgtctacagtccacagcttcagcatttccagagaccacatgtgagcttcttttaggtcccagtgatgggaccagaagcatctaaagcaaaaaaaaaaccaaaaaaaaatctagagatgtggctgtggctttttgggaggtggggcatgggaggaccagagacgaagggcttggaaggagacccccacatgcatcatttcctcctcttcacagtgtgctgggagtccagccgtgcactgtgccagatgcctcaggaggagaaccctccccagtgtactgtgaaggatgacacagcacttcttcctaatgacacgcgaccgtcctggtgcctctacatggttgatgcgggcagtgtgggaccctcagttctaggactggtccgcagagaaagcacccaggagcagagcgcttcggagcggtcctcagtggcgccacctgctggtgctaatagggacagccacaggcctcttgcagactggcccaccctgcctacttccctactgacaagttctttggtatttcaaaagggagaaaccactataaaagacaagaggaagggcaggtactaggtgtttcatttccagaatt

SEQ ID NO: 5531 - DNA, 1477 bp, Homo sapiens
caagtcttcactccttcctgcgagccctgaggaagccttgtgagtgcattggctggggcttggagggaagttgggctggagctggacaggagcagtgggtgcatttcaggcaggctctcctgaggtcccaggcgccagctccagctccctggctagggaaacccaccctctcagtcagcatgggggcccaagctccaggcagggtgggctggatcactagcgtcctggatctctctcagactgggcagccccgggctcattgaaatgccccggatgacttggctagtgcagaggaattgatggaaaccaccggggtgagagggaggctccccatctcagccagccacatccacaaggtgtgtgtaagggtgcaggcgccggccggttaggccaaggctctactgtctgttgcccctccaggagaacttccaaggagctttccccagacatggccaacaagggtccttcctatggcatgagccgcgaagtgcagtccaaaatcgagaagaagtatgacgaggagctggaggagcggctggtggagtggatcatagtgcagtgtggccctgatgtgggccgcccagaccgtgggcgcttgggcttccaggtctggctgaagaatggcgtgattctgagcaagctggtgaacagcctgtaccctgatggctccaagccggtgaaggtgcccgagaacccaccctccatggtcttcaagcagatggagcaggtggctcagttcctgaaggcggctgaggactatggggtcatcaagactgacatgttccagactgttgacctctttgaaggcaaagacatggcagcagtgcagaggaccctgatggctttgggcagcttggcagtgaccaagaatgatgggcactaccgtggagatcccaactggtttatgaagaaagcgcaggagcataagagggaattcacagagagccagctgcaggagggaaagcatgtcattggccttcagatgggcagcaacagaggggcctcccaggccggcatgacaggctacggacgacctcggcagatcatcagttagagcggagagggctagccctgagcccggccctcccccagctccttggctgcagccatcccgcttagcctgcctcacccacacccgtgtggtaccttcagccctggccaagctttgaggctctgtcactgagcaatggtaactgcacctgggcagctcctccctgtgcccccagcctcagcccaacttcttacccgaaagcatcactgccttggcccctccctcccggctgcccccatcacctctactgtctcctccctgggctaagcaggggagaagcgggctgggggtagcctggatgtgggccaagtccactgtcctccttggcggcaaaagcccattgaagaagaaccagcccagcctgccccctatcttgtcctggaatatttttggggttggaactcaaaaaaaaaaaaaaaaaatcaa

SEQ ID NO: 5532 - DNA, 9796 bp, Homo sapiens
gcggcggcggctgcggcggtggggccgggcgaggtccgctgcggtcccggcggctccgtggctgctccgctctgagcgcctggcgcgccccgcgccctccctgccggggccgctgggccggggatgcacgcggggcccgggagccatggtccgcttcggggacgagctgggcggccgctatgggggccccggcggcggagagcgggcccggggcggcggggccggcggggcggggggcccgggtcccggggggctgcagcccggccagcgggtcctctacaagcaatcgatcgcgcagcgcgcgcggaccatggcgctgtacaaccccatcccggtcaagcagaactgcttcaccgtcaaccgctcgctcttcgtcttcagcgaggacaacgtcgtccgcaaatacgcgaagcgcatcaccgagtggcctccattcgagtatatgatcctggccaccatcatcgccaactgcatcgtgctggccctggagcagcacctccctgatggggacaaaacgcccatgtccgagcggctggacgacacggagccctatttcatcgggatcttttgcttcgaggcagggatcaaaatcatcgctctgggctttgtcttccacaagggctcttacctgcggaacggctggaacgtcatggacttcgtggtcgtcctcacagggatccttgccacggctggaactgacttcgacctgcgaacactgagggctgtgcgtgtgctgaggcccctgaagctggtgtctgggattccaagtttgcaggtggtgctcaagtccatcatgaaggccatggttccactcctgcagattgggctgcttctcttctttgccatcctcatgtttgccatcattggcctggagttctacatgggcaagttccacaaggcctgtttccccaacagcacagatgcggagcccgtgggtgacttcccctgtggcaaggaggccccagcccggctgtgcgagggcgacactgagtgccgggagtactggccaggacccaactttggcatcaccaactttgacaatatcctgtttgccatcttgacggtgttccagtgcatcaccatggagggctggactgacatcctctataatacaaacgatgcggccggcaacacctggaactggctctacttcatccctctcatcatcatcggctccttcttcatgctcaacctggtgctgggcgtgctctcgggggagtttgccaaggagcgagagagggtggagaaccgccgcgccttcctgaagctgcgccggcagcagcagatcgagcgagagctcaacgggtacctggagtggatcttcaaggcggaggaagtcatgctggccgaggaggacaggaatgcagaggagaagtcccctttggacgtgctgaagagagcggccaccaagaagagcagaaatgacctgatccacgcagaggagggagaggaccggtttgcagatctctgtgctgttggatcccccttcgcccgcgccagcctcaagagcgggaagacagagagctcgtcatacttccggaggaaggagaagatgttccggttttttatccggcgcatggtgaaggctcagagcttctactgggtggtgctgtgcgtggtggccctgaacacactgtgtgtggccatggtgcattacaaccagccgcggcggcttaccacgaccctgtattttgcagagtttgttttcctgggtctcttcctcacagagatgtccctgaagatgtatggcctggggcccagaagctacttccggtcctccttcaactgcttcgactttggggtcatcgtggggagcgtctttgaagtggtctgggcggccatcaagccgggaagctcctttgggatcagtgtgctgcgggccctccgcctgctgaggatcttcaaagtcacgaagtactggagctccctgcggaacctggtggtgtccctgctgaactccatgaagtccatcatcagcctgctcttcttgctcttcctgttcattgtggtcttcgccctgctggggatgcagctgtttgggggacagttcaacttccaggatgagactcccacaaccaacttcgacaccttccctgccgccatcctcactgtcttccagatcctgacgggagaggactggaatgcagtgatgtatcacgggatcgaatcgcaaggcggcgtcagcaaaggcatgttctcgtccttttacttcattgtcctgacactgttcggaaactacactctgctgaatgtctttctggccatcgctgtggacaacctggccaacgcccaagagctgaccaaggatgaagaggagatggaagaagcagccaatcagaagcttgctctgcaaaaggccaaagaagtggctgaagtcagccccatgtctgccgcgaacatctccatcgccgccaggcagcagaactcggccaaggcgcgctcggtgtgggagcagcgggccagccagctacggctgcagaacctgcgggccagctgcgaggcgctgtacagcgagatggaccccgaggagcggctgcgcttcgccactacgcgccacctgcggcccgacatgaagacgcacctggaccggccgctggtggtggagctgggccgcgacggcgcgcgggggcccgtgggaggcaaagcccgacctgaggctgcggaggcccccgagggcgtcgaccctccgcgcaggcaccaccggcaccgcgacaaggacaagacccccgcggcgggggaccaggaccgagcagaggccccgaaggcggagagcggggagcccggtgcccgggaggagcggccgcggccgcaccgcagccacagcaaggaggccgcggggcccccggaggcgcggagcgagcgcggccgaggcccaggccccgagggcggccggcggcaccaccggcgcggctccccggaggaggcggccgagcgggagccccgacgccaccgcgcgcaccggcaccaggatccgagcaaggagtgcgccggcgccaagggcgagcggcgcgcgcggcaccgcggcggcccccgagcggggccccgggaggcggagagcggggaggagccggcgcggcggcaccgggcccggcacaaggcgcagcctgctcacgaggctgtggagaaggagaccacggagaaggaggccacggagaaggaggctgagatagtggaagccgacaaggaaaaggagctccggaaccaccagccccgggagccacactgtgacctggagaccagtgggactgtgactgtgggtcccatgcacacactgcccagcacctgtctccagaaggtggaggaacagccagaggatgcagacaatcagcggaacgtcactcgcatgggcagtcagcccccagacccgaacactattgtacatatcccagtgatgctgacgggccctcttggggaagccacggtcgttcccagtggtaacgtggacctggaaagccaagcagaggggaagaaggaggtggaagcggatgacgtgatgaggagcggcccccggcctatcgtcccatacagctccatgttctgtttaagccccaccaacctgctccgccgcttctgccactacatcgtgaccatgaggtacttcgaggtggtcattctcgtggtcatcgccttgagcagcatcgccctggctgctgaggacccagtgcgcacagactcgcccaggaacaacgctctgaaatacctggattacattttcactggtgtctttacctttgagatggtgataaagatgatcgacttgggactgctgcttcaccctggagcctatttccgggacttgtggaacattctggacttcattgtggtcagtggcgccctggtggcgtttgctttctcgagcttcgtgggaggatccaaagggaaagacatcaataccatcaagtctctgagagtccttcgtgtcctgcggcccctcaagaccatcaaacggctgcccaagctcaaggctgtgtttgactgtgtggtgaactccctgaagaatgtcctcaacatcttgattgtctacatgctcttcatgttcatatttgccgtcattgcggtgcagctcttcaaagggaagtttttctactgcacagatgaatccaaggagctggagagggactgcaggggtcagtatttggattatgagaaggaggaagtggaagctcagcccaggcagtggaagaaatacgactttcactacgacaatgtgctctgggctctgctgacgctgttcacagtgtccacgggagaaggctggcccatggtgctgaaacactccgtggatgccacctatgaggagcagggtccaagccctgggtaccgcatggagctgtccatcttctacgtggtctactttgtggtctttcccttcttcttcgtcaacatctttgtggctttgatcatcatcaccttccaggagcagggggacaaggtgatgtctgaatgcagcctggagaagaacgagagggcttgcattgacttcgccatcagcgccaaacccctgacacggtacatgccccaaaaccggcagtcgttccagtataagacgtggacatttgtggtctccccgccctttgaatacttcatcatggccatgatagccctcaacactgtggtgctgatgatgaagttctatgatgcaccctatgagtacgagctgatgctgaaatgcctgaacatcgtgttcacatccatgttctccatggaatgcgtgctgaagatcatcgcctttggggtgctgaactatttcagagatgcctggaatgtctttgactttgtcactgtgttgggaagtattactgatattttagtaacagagattgcgaacaatttcatcaacctcagcttcctccgcctctttcgagctgcgcggctgatcaagctgctccgccagggctacaccatccgcatcctgctgtggacctttgtccagtccttcaaggccctgccctacgtgtgtctgctcattgccatgctgttcttcatctacgccatcatcggcatgcaggtgtttgggaatattgccctggatgatgacaccagcatcaaccgccacaacaacttccggacgtttttgcaagccctgatgctgctgttcaggagcgccacgggggaggcctggcacgagatcatgctgtcctgcctgagcaaccaggcctgtgatgagcaggccaatgccaccgagtgtggaagtgactttgcctacttctacttcgtctccttcatcttcctgtgctcctttctgatgttgaacctctttgtggctgtgatcatggacaattttgagtacctcacgcgggactcttccatcctaggtcctcaccacttggatgagttcatccgggtctgggctgaatacgacccggctgcgtgtgggcgcatcagttacaatgacatgtttgagatgctgaaacacatgtccccgcctctggggctggggaagaaatgccctgctcgagttgcttacaagcgcctggttcgcatgaacatgcccatctccaacgaggacatgactgttcacttcacgtccacgctgatggccctcatccggacggcactggagatcaagctggccccagctgggacaaagcagcatcagtgtgacgcggagttgaggaaggagatttccgttgtgtgggccaatctgccccagaagactttggacttgctggtaccaccccataagcctgatgagatgacagtggggaaggtttatgcagctctgatgatattcgacttctacaagcagaacaaaaccaccagagaccagatgcagcaggctcctggaggcctctcccagatgggtcctgtgtccctgttccaccctctgaaggccaccctggagcagacacagccggctgtgctccgaggagcccgggttttccttcgacagaagagttccacctccctcagcaatggcggggccatacaaaaccaagagagtggcatcaaagagtctgtctcctggggcactcaaaggacccaggatgcaccccatgaggccaggccacccctggagcgtggccactccacagagatccctgtggggcggtcaggagcactggctgtggacgttcagatgcagagcataacccggaggggccctgatggggagccccagcctgggctggagagccagggtcgagcggcctccatgccccgccttgcggccgagactcagcccgtcacagatgccagccccatgaagcgctccatctccacgctggcccagcggccccgtgggactcatctttgcagcaccaccccggaccgcccaccccctagccaggcgtcgtcgcaccaccaccaccaccgctgccaccgccgcagggacaggaagcagaggtccctggagaaggggcccagcctgtctgccgatatggatggcgcaccaagcagtgctgtggggccggggctgcccccgggagaggggcctacaggctgccggcgggaacgagagcgccggcaggagcggggccggtcccaggagcggaggcagccctcatcctcctcctcggagaagcagcgcttctactcctgcgaccgctttgggggccgtgagcccccgaagcccaagccctccctcagcagccacccaacgtcgccaacagctggccaggagccgggaccccacccacagggcagtggttccgtgaatgggagccccttgctgtcaacatctggtgctagcacccccggccgcggtgggcggaggcagctcccccagacgcccctgactccccgccccagcatcacctacaagacggccaactcctcacccatccacttcgccggggctcagaccagcctccctgccttctccccaggccggctcagccgtgggctttccgaacacaacgccctgctgcagagagaccccctcagccagcccctggcccctggctctcgaattggctctgacccttacctggggcagcgtctggacagtgaggcctctgtccacgccctgcctgaggacactctcactttcgaggaggctgtggccaccaactcgggccgctcctccaggacttcctacgtgtcctccctgacctcccagtctcaccctctccgccgcgtgcccaacggttaccactgcaccctgggactcagctcgggtggccgagcacggcacagctaccaccaccctgaccaagaccactggtgctagctgcaccgtgaccgctcagacgcctgcatgcagcaggcgtgtgttccagtggatgagttttatcatccacacggggcagccggccctcgggggaggccttgcccaccttggtgaggctcctgtggcccctccctccccctcctcccctcttttactctagacgacgaataaagccctgttagaggatgcggctctctctgtccccttcctgtcctgccttcctgggtctcgtaccacacaccagaccctaaaccgcaggctgctgtgtgtggctgagaaggacccaggagtccaaatcccgtgtcctgggactcagcatccagcatgggtgcttggagccgttgtgaggagctctgcgtcctgtggggagcacccttcacgtggccgtgcggcacagagaagcagggcccacctgaaagtgcgccgagacctcgggacggaggggatggggagggggacacagtcgtggcttgtgcagcccgccagtgtcagcgaatgctcactcaggcaagctctgtcctccctggacaccgtcagccccacaggaaccgagctgggaagtgttcttgctgtggttgtgatttttaattgcaacacctctcattcttgtcacttctatatacgtgatgtagaaaaaatggaaaaccagaaaaatggggaaggaaatgttcacataactttaaaaaatcaaacctgtgaaagaaagatgtcagctttttgccacgtgtctttgtggcttatgcgaggagactccctgtgcagccctgtccggtccaggtggacgtagacggcccctggctctgctgctcttgaccaagtgcctgaccgccaggccctcacacccaggctcctgggcactgtggtgtgaggcgaggcctcgggatccatcaccgcaggatgctgtgaaaagtactcgcgatggcagccaggtagcaagcccttgccagtggagagcactggatgtcatggtggcaaacaaggcagccatttgctgtcctcctcccacgagtggaaggggtttccaaggaagccacagggcagctgaccacgtgcttgtgtgaggcattttcagtctgttctgcatatgattctcagggcacactctgtggtatgtgaaataggtttccttccacatacagcagaagagaggcaaaggctggtaggaaggaggaagacattggctgggggcttggatgtggggccgtcagggcaggagggaggaagccccagctggaatgaaactcagagcaagtgaccgagggaggacacggctcctgccactgaggccgggcacctgatgcccagcactgtcctggcgccagacacagggagcaggcagtcaagtgaggtctgacccccatggccacgctcaggagagaaagaccatgctcaggacactgtccaaggtgcacaagatgctgggaggtcccttgtttggtgaagaaagggagcatttagagcagttgatggtggtgtgtcctccgtgttctgaaattccagatgatctgtgttggattcttggcttctaccccatgattctcctcaaagaaattgtgtgtgatgtgtgtgtgtgtgtgtgtgtgtgtgtgtctgtgtcacaggagatgcagtgcctgtacaggtgtgttcagtgtgtggatgtcattaacccatagggctatgcaacaaaagacacatttaatagaagtaaaacacacaagaccgctgcctggtctcggggttcagcatgattgtgaccaaacctttttatagaatttccttacctgaaggcacaacactctgaaactttaaagataacagagtattttattccaatagaataaaccaggaatctcggactgtgcatgtgatcactgtgctcctgttgcaaagtagaaggatgtgtattttgacactgacgttttgtctcttgttccccagcccccagcccatgttatcttgggtgtcgaatgtgtccattccatgcagaaccacagccatttccccaggcagtgttgggtcgagaatccacttttctaaacccacacagcctagctggcttgtctagactcttctaggcattggaattgatgaaaactacagggagcggggaaaggagacattatgtcttgttttcctgactttgggttttgtttctcactgtgtcttctccggctatcatatatgtcccctgaatctcatagtgagctgccaaatttgaagtgcatcacccagttgtctgcatctggaaccagtcaagcagtggctgtagtttgaacaagttatgtgtgcatgtaacatatatacatatatacatatatacaagtatgtgcatgataatgtatatcttcgtactttttgatacaatgtattcatttgttaatttttaattatatttgatataaatcaaaggtttgttgcaaaactttatatttaagaagtgttaaaaaaaaaaaaaagtcccaaccatgcaacacaactgggacctacttaaaaagaaattctgtgattgactagtttgctgcctgagtcatatttatcagccaaactttggattctgctgttgtttctacaatgacattttgtatgaagcaaagtccttgaattaaaataaaaacttagcaaaaaatcaaaaacaaaacccca

SEQ ID NO: 5533 - DNA, 1966 bp, Homo sapiens
actcagttgcctctggccagtgcagggctcagccagggatggcttctagctgacagtgggaggaattaattcatctgaccggaatattcttttctcttctgggctgttggtttttcaagtgcaacaaagattccatacagctccaaggaaggagccaagaaaaacattctgtgccaaagtgagatcctggaagtgaaaccccggaataaagctgaaaaacgggctccagttgggtgccaggaaatgcaggactggaatgtgacttgacttccggcagcgcgcaggtgctcccgggtcacctgctttgaggtccagcctcctgccctgcctcaggtgaccacatgaccactgtggactttgccctgaaaccttctgggaggagaagaggcctgaccttggcgctggggtccagtgggcattgctctggtccgaggctgctgctcttgacctctgctctgcggctgttttccattggagtagaggctcctcctgtcctgtcctgcctgtggagggaagcaaaccttcccctggaccagagagaggagaaagcggagacaggtagcaacgctgtggactggtgatgacaggctcttcagctccctgcaagtgaccgggcctggggaacagggcatggcacaggcacacaggaccccccagcccagggctgcccccagccagccccgtgtgttcaagctggttctcctgggaagtggctccgtgggtaagtccagcttggctcttcggtacgtgaagaacgacttcaagagtatcctgcctacggtgggctgtgcgttcttcacaaaggtggtggatgtgggtgccacctctctgaagcttgagatctgggacacagctggccaggagaagtaccacagcgtctgccacctctacttcaggggtgccaacgctgcgcttctggtgtacgacatcaccaggaaggattccttcctcaaggctcagcagtggctgaaggacctggaggaggagctgcacccaggagaagtcctggtgatgctggtgggcaacaagacggacctcagccaggagcgggaggtgaccttccaggaagggaaggagtttgccgacagccagaagttgctgttcatggaaacttcggccaaactgaaccaccaggtgtcggaggtgttcaatacagtggcccaagagctactgcagagaagcgacgaggagggccaggctctacggggggatgcagctgtggctctgaacaaggggcccgcgaggcaggccaaatgctgcgcccactaggtgcagccactcctgggggctgtggggaagacaccccctgcctgggccatggccagctctaggtggattctgattcactgtcaatgctgggttgctcccgagccctagatgttcctggaagttggccccctttatgaaaaccacttcccacagccagtgggaactgccagaggaagatctggcgtcacatggctcccaggaaagtgctgtgccctatccccactgataccatctgattccccgatgcctgtgcctgttccacctggacggtggccccctcagcctggcagcctctggacagagaggaaggaaggattggaaaagtccccgcagcacagcgacggtgggaagatgccttacgtctgatcttgatgggggcactggcctggagcctgggcccacctgcttctggggggttggggagcaggccagatggaggtggtggtgccaggaagaaatggagcgatgactgactgtggggtgggcccaggatttccacatcttggtgaagttgcccctgggaagggcagctgggggcagtggcgccagttcccttccatggtctcccggctggcaatgtggtgaagctgagtttctgtccaatgagcaggaagattctgagacatttcgcctgagatataagttgtactgcgtatgcagtttttcctccaaaaattaaattgcttttgacaatctg

SEQ ID NO: 5534 - DNA, 2344 bp, Homo sapiens
aattccctaccctcgacctgtcgatgccccgcggccccgcccgccctcttaagcctggctcagccctcagggcccgcccgaagtctaccgagcccgagtggcctaccgagcccgagtggccccgcagcgtccaggaggcgcccgctccgcggtggcgctcttggaggtggtgtcggagagccgccgagcgtgcggtcccgggatggctctaccccggccaagtgaggccgtgcctcaggacaaggtgtgctacccgccggagagcagcccgcagaacctggccgcgtactacacgcctttcccgtcctatggacactacagaaacagcctggccaccgtggaggaagacttccaacctttccggcagctggaggccgcagcgtctgctgcccccgccatgccccccttccccttccggatggcgcctcccttgctgagcccgggtctgggcctacagagggagcctctctacgatctgccctggtacagcaagctgccaccgtggtacccaattccccacgtccccagggaagtgccgcccttcctgagcagcagccacgagtacgcgggtgccagcagtgaagatctgggccaccaaatcattggtggcgacaacgagagtggcccgtgttgtggacctgacactttaattccaccgccccctgcggatgcttctctgttacctgaggggctgaggacctcccagttattaccttgctcacccagcaagcagtcagaggatggtcccaaaccctccaaccaagaagggaagtcccctgctcggttccagttcacggaggaggacctgcacttcgttctgtacggggtcactcccagcctggagcacccagccagcctgcaccatgcgatttcaggcctcctggtccccccagacagctctggatctgattctcttcctcaaactctggataaagactcccttcaacttccagaaggtctatgcctcatgcagacggtgtttggtgaagtcccacattttggtgtgttctgcagtagttttatcgccaaaggagtcaggtttgggccctttcaaggtaaagtggtcaatgccagtgaagtgaagacctacggagacaattctgtgatgtgggagatctttgaagatggtcatttgagccactttatagatggaaaaggaggtacggggaactggatgtcctatgtcaactgtgcccgcttccccaaggagcagaacctagttgctgtgcagtgtcaagggcatatattttatgagagctgcaaagagatccatcagaaccaagagctccttgtgtggtatggagactgctatgagaaatttctggatattcctgtgagccttcaggtcacagagccggggaagcagccatctgggccctctgaagagtctgcagaaggctacagatgtgaaagatgtgggaaggtatttacctacaaatattacagagataagcacctcaagtacaccccctgtgtggacaagggcgataggaaatttccctgttctctctgcaaacgatcctttgagaagcgggaccggcttcggatccacattcttcatgttcatgagaagcaccggcctcacaagtgttctacatgtgggaaatgtttctctcaatcttccagcctaaacaaacacatgcgagtccactctggagacagaccataccagtgtgtgtattgtactaagaggttcacagcctccagcatactccgcacacacatcaggcagcactccggggagaagcccttcaaatgcaagtactgtggtaaatcttttgcatcccatgctgcccatgacagccatgtccggcgttcacacaaggaggatgatggctgctcatgcagcatctgtgggaaaatcttctcagatcaagaaacattctactcccacatgaagtttcatgaagactactagccctgccaggcacaatgactcacgcctgtaatcccagcactttgggaggcagaggtgggtggatcactcaagtccaggagttcgagaccagcctgggcaacatggtgaaatcctgtctctaccaaaaaaatacaaaaatcagctgggggtggtggcacatgcctgtggttccagccactcaggaggtcgaggtggcaggatggtttgagcacaggagacggaggttgctgtgagctgagatcgccccactgcttttcaacctgggtgacagaaccagaccctgtctcaaaacaaaacaaaacaaaaaaaatgagtagccctcaagagtgtggagacaatgtaaaaacaagagattcggattctctctatttccttttatgggttatagaagtccctgcagttggctgtgtgtggtggctcacgcct

SEQ ID NO: 5535 - DNA, 3348 bp, Homo sapiens
gcggggggcaggaggagcggctgcggccggcacagcgccagggcgagtgaggcgggtggcgcgggggaggcggcggagtaaagagaggccgccggctgggtccgcgggtcactccgaggcgcgggctgcgggcggcgggcggcgggcgcaccatgccctccttcgacgaggcgctgcagcgggtgggcgagttcgggcgcttccagaggcgcgtgtttttgctgctgtgcctgacgggcgtcaccttcgccttcctcttcgtcggcgtggtcttcctgggcacgcagcccgaccactactggtgccgcgggccaagtgccgcggcgctggccgagcgctgcggctggagcccggaggaggagtggaaccgcacggcgcccgcctcccgcggcccagagccccccgagcgccgcggccgctgccagcgctacctcctggaggcggccaacgacagcgcctccgccactagcgctctcagctgcgcggacccactcgccgccttccccaaccgctcggctccccttgtgccgtgccgcggcggctggcgctacgcccaggcccactccaccatcgtcagcgagtttgaccttgtctgtgtcaatgcgtggatgctggacctcacccaagccatcctgaacctcggcttcctgactggagcattcaccttaggctatgcagcagacaggtatggcaggatcgtcatttacttgctatcctgccttggtgttggcgtcactggggttgtggtggcctttgcaccaaacttccctgtgtttgtgatcttccgcttcctgcaaggtgtatttggaaaggggacgtggatgacttgctacgtgattgtgacagaaatagtaggttcgaaacaaaggaggattgtgggaatcgtgattcaaatgttctttacccttggaatcataattctccctggaattgcctacttcatccccaactggcaaggaatccagttagccatcacgctgcccagctttctcttcctcctttattactgggtggtccctgagtctccccgttggctgattactcggaagaaaggagataaagcattacagatcctgagacgcattgctaagtgcaatgggaaatacctctcatcaaattactcagagatcactgttacagatgaggaagttagtaatccatcctttttagatctggtgagaactccccaaatgaggaaatgcacacttattcttatgtttgcttggttcacaagcgcagtggtgtatcaaggacttgtcatgcgcctgggaattatagggggcaacctctatatagactttttcatctcgggcgtggtggaactgccaggagctctcttgatcttactaaccattgagcgccttggacgacgcctcccctttgcggcaagcaatatagtggcaggggtggcatgccttgtcactgcgttcttaccagaaggaatagcatggttgaggaccacagtggctacattgggaagactagggataaccatggcctttgaaattgtttatttggtaaattcagaattgtacccaacaacattacgaaatttcggagtttcgctctgttcaggtctgtgtgattttgggggaatcatagccccatttctgctctttcggctagcagccgtgtggctagaactacctctgatcatctttggtatcctggcatccatctgtggtggccttgtgatgcttttgcctgaaaccaagggtattgccttgccagagacagtggatgatgtagaaaaacttggcagtccacattcctgtaaatgtggcaggaataagaaaaccccagtttcccgctctcacctttgaggcccccgacaaagacagaaagaaggagctatccaggagctgatcctccttgcaaagctgtgccttgcagagatgcacgtgtgcatttcagctacatcatgccgcgctgttgtaatactgtataaagacctcaatctatccagagtatttttatataatgttggatgagttaggatttgtaatgctgttgaagtttctgggaacacataatatgtagccagtttaacaaagaagctgtcaggtgcacagcccttcctgggtttttttcttgtgttccctgtggtctctgacccattaggctaaagagagacaagagaagcccccaacctgattctcatgacagctccatcaagaatgtgggatgtgccgaccaaggatttgagaaagttgtacagaaatgtgttcatcaaatctggtcaagggactaagctcctagctgaccattcattctgaagattgcatggaggatgaacatctgggaatcctgttaatgagaaggctgaatcacaggcacctgggccaaagggtgtgagcattcatgttctctgctcaccttggtttccgcacaccttcgcaatgtgaacaggtcaggagtccctcccgtccacctcctctgtaacagctggggttccaggcatggtttaggccctgttccagcaataagaaccaatctgctgtacaatctgaggacttggctctgttatttacaaaatgatgctgtggttctgagattatttgggacatttttggctctcctttagtggacacctagagccacagattcccttctttactaaacaaatcccatggattctgatttctgggtcttaggattttaaaagtgaagggatatttttcttatatttgtgagttcagttccgatggtgcccgtggtcaaaagcgaaaaacatggacaattcctattcattcttagcactttgacatgtcttggggaaaagcttacattttaatttaaaagaaagatcaattatatccatgcttaacaggatcagcaggagctttataaatgactttacagagactaataagggatttgatctttctttttttgttatcgaggcttttgaaatgtggaacttgtgtgttctgctttatatgttatattcaatatcttttcagatgcagtctatattttatgctgagttttaaaaatgaaatactttatgcaaacaggcaaaattggtaccaaagggaaacattaaccatgaggaagagcatttttctaaggagaacaggtgacaatatacacatgtgcgctaatcgtaaaatgagcatcttagtctttaaaacacatcagaattgaatacgaataatctatttgtcgatgaaataaacacaactctttgaggatttgagactacattcaccctttattcacagtcacttgcagttttgcttttctctgcatttctctgctgtaagatgactgttgcattgttgaattgtattttgagtggatatttttgtttggtaacaattaaaattttaaatcgtaaaaaatgta

SEQ ID NO: 5536 - DNA, 4044 bp, Homo sapiens
gtaacacgggcgggccgagcacgtgggcgcctccgtcacaccctcacacatacacacacgcgcgcgcgcacacacacatacgcatgtacacgcgcacccgcacccgcgcgcctgtatcccgtgctgtttccctggcagacacacaggcgctcacgagtctctccttgccagcctgcagggcggcgacccccaaaacccagctccgggtcccaacctaggcaagaagctgcttctctgccaacagctcctcttcggcctccgtcacagccacctggaccctaccctttcgcgactgctgctgctgctgcccggacgtggaagcagcaagaggcgcttggtcaagacacactgacggtacctacagaatactggacatacggattcagaatccataaggctttatcaccttgaatcaaggatttatttgatatcatcctcggtctttacttcctatcaagtaacattgttttgaaaaatagagttaacacatttgccataagggagtttttttttttttttttaaatacttcgcatactctccaatgcccaaaaatagcaaggtggtaaaaagagaattagatgatgatgttactgagtctgtcaaagaccttctttccaatgaagacgcagctgatgatgcttttaagacaagtgaactaattgttgatggccaggaagagaaagatacagatgttgaagaaggatctgaagtcgaagatgaaagaccagcttggaacagtaaactacaatacatcctggcccaagttggattttctgtaggtttaggaaatgtgtggcgatttccatacctatgtcagaagaatgggggcggtgcatatcttttaccatatttaatactacttatggtaataggtattcccctttttttcttggaactctctgtgggtcaaagaattcggcgaggcagcattggtgtatggaattacataagccctaaactgggcgggattggatttgcaagttgtgtagtgtgctattttgtagctctctactacaacgtcatcattggctggagtttgttttatttttctcagtcttttcagcaacccctgccttgggatcagtgtcctttggtgaaaaatgcttcacacacttttgtagaaccagaatgtgaacaaagttctgccaccacctattactggtacagggaagcactgaatatttcaagttccatttctgaaagtgggggcttaaactggaagatgaccatctgcttgttggctgcctgggtcatggtttgcttggctatgatcaaaggcattcagtcttctggaaaaatcatatattttagttctctgtttccatatgtggtacttatttgcttcctcatcagagcattccttttaaatggttcaattgatggcattcgccacatgtttacccctaagcttgaaataatgctggagcccaaggtctggagagaagctgctactcaagtgttctttgccttaggtctgggatttggtggtgtcattgccttttcaagctacaacaagagagacaacaactgccactttgatgctgtcctggtgtccttcatcaattttttcacttctgtcctggcaacattggtggtgtttgcagttctgggcttcaaagcaaatgtcataaatgagaaatgcattacacaaaattcagagacgatcatgaaatttttgaaaatggggaacattagtcaggatattattccccatcatatcaacctttcaactgttactgcagaagattatcatttagtttatgacatcattcaaaaagtgaaagaagaagagtttcctgctcttcatctcaattcctgtaaaattgaagaagagctaaataaagctgttcaggggaccggcttagcttttattgcctttacagaagcgatgacacattttcctgcatctcccttctggtcagtgatgtttttcctcatgctggtcaatctaggccttggcagtatgtttggaaccattgaagggattgtcacgcctattgtggacactttcaaagtgaggaaagaaattcttactgttatctgttgtcttctggcattttgtattggcctgatatttgtgcaacgctctggaaattactttgttacaatgtttgatgattattctgctacactgcctctgctaattgtagtcattttggagaatattgctgtatgctttgtttatggcatagataagtttatggaagacctaaaagatatgctgggctttgctcccagcagatattactactatatgtggaaatatatttctcctctaatgctattatcattgctaatagctagtgttgtgaatatgggattaagtcctcctggctataacgcatggattgaagataaggcatctgaagaatttctgagctatccaacatggggactggttgtttgtgtctctctggttgtctttgcaatactcccagtccctgtagttttcattgttcgtcgcttcaaccttatagatgatagttctggtaatttagcatctgtgacctataagagaggaagggtcctgaaagagcctgtgaacttagagggcgatgatacaagcctcattcacggaaaaataccgagcgagatgccatctccaaattttggtaaaaatatttatcgaaaacagagtggatccccaactctggatactgctcccaatggacggtatggaatagggtacttgatggcagatattatgccagatatgccagaatctgatttgtagctgggggaaaagtcagtgggttttatttggttcatttttaccaatgaacattggccctagtaggagaagcattaggcttcacttatcagagggcaatctcaggtgttccgtggctgtgatctttaatcctaacagtatatgtcagttcaacttgagcattcttttggattctttggtttacatttgtgcagaaaggattgcagacaaatcttaggagggctgaggtacatgtttgccaggatttttttttaagtacctttggtgtattttcaaatatttctatctcttaaaaaaatggtattacctcagtttctaataatttctgggtttagtagtgttgacaattaaaaatggtatacattaaaatttataagtttgccttcagggtaacttccagtgtcacaatgagcagttctgtaagtgggtgcctctcagcacatttctatgaatatattatgtagataggctgtattgattttggtagcattgacaccttcttaggcaattagttgaagaaaactgcaaaatattttcttatgtaatagctgtatagagcaatagcaatcaaagcatgagaaggcactaacgctgggatgaaagatgagattcagaggtgactgagaatcatgtgagtgatggctgtatattttgtgtaaaatatatgtgtgaaaatgaactaagagtgagttactcagcactctcaagaattatgcagattctgcatttttcttatgccgtgtgcctaaaaacctacttgatatttattgtggtttcaagattattcatagtatatttatacaatatacttgcaatgcatttaagtacttaaagtactaatttgaaaacttgaagcaagatggcattttaattaatatatttctgttttgcttctgttttatgcaaatataaatcatttttaagtgattgttaaaattgtaatgcattacattttaatctacaaataaacaaagtttaaaaatgatgtttgtttttcacattgattttctttgtatcacctgaactggattgtctttcatttcagtcagcacttagacatttcataataactaaacatcacattccaagtgggatgaattacattaattgaatagagttaccaccgcttcagagtctaaggaaaaatagagtattatggttcaatggtgttcttatgtagtcttatgattcttgaaaaagtacttacagcctcccaagaaaccatgtgtacaattgactgcttgctgattcaatattgtctgcaaagtataaaagactatgatttttaaataaaactgttgtatatatgaaa

SEQ ID NO: 5537 - DNA, 2786 bp, Homo sapiens
cctccccagtagacgctcgggcaccagccgcggcaaggatggagctgggttgctggacgcagttggggctcacttttcttcagctccttctcatctcgtccttgccaagagagtacacagtcattaatgaagcctgccctggagcagagtggaatatcatgtgtcgggagtgctgtgaatatgatcagattgagtgcgtctgccccggaaagagggaagtcgtgggttataccatcccttgctgcaggaatgaggagaatgagtgtgactcctgcctgatccacccaggttgtaccatctttgaaaactgcaagagctgccgaaatggctcatgggggggtaccttggatgacttctatgtgaaggggttctactgtgcagagtgccgagcaggctggtacggaggagactgcatgcgatgtggccaggttctgcgagccccaaagggtcagattttgttggaaagctatcccctaaatgctcactgtgaatggaccattcatgctaaacctgggtttgtcatccaactaagatttgtcatgttgagcctggagtttgactacatgtgccagtatgactatgttgaggttcgtgatggagacaaccgcgatggccagatcatcaagcgtgtctgtggcaacgagcggccagctcctatccagagcataggatcctcactccacgtcctcttccactccgatggctccaagaattttgacggtttccatgccatttatgaggagatcacagcatgctcctcatccccttgtttccatgacggcacgtgcgtccttgacaaggctggatcttacaagtgtgcctgcttggcaggctatactgggcagcgctgtgaaaatcttctggaggctgggaagtccaagatcaaggcgtcagaagattcattgtctgtccttgaagaaagaaactgctcagaccctgggggcccagtcaatgggtaccagaaaataacagggggccctgggcttatcaacggacgccatgctaaaattggcaccgtggtgtctttcttttgtaacaactcctatgttcttagtggcaatgagaaaagaacttgccagcagaatggagagtggtcagggaaacagcccatctgcataaaagcctgccgagaaccaaagatttcagacctggtgagaaggagagttcttccgatgcaggttcagtcaagggagacaccattacaccagctatactcagcggccttcagcaagcagaaactgcagagtgcccctaccaagaagccagcccttccctttggagatctgcccatgggataccaacatctgcatacccagctccagtatgagtgcatctcacccttctaccgccgcctgggcagcagcaggaggacatgtctgaggactgggaagtggagtgggcgggcaccatcctgcatccctatctgcgggaaaattgagaacatcactgctccaaagacccaagggttgcgctggccgtggcaggcagccatctacaggaggaccagcggggtgcatgacggcagcctacacaagggagcgtggttcctagtctgcagcggtgccctggtgaatgagcgcactgtggtggtggctgcccactgtgttactgacctggggaaggtcaccatgatcaagacagcagacctgaaagttgttttggggaaattctaccgggatgatgaccgggatgagaagaccatccagagcctacagatttctgctatcattctgcatcccaactatgaccccatcctgcttgatgctgacatcgccatcctgaagctcctagacaaggcccgtatcagcacccgagtccagcccatctgcctcgctgccagtcgggatctcagcacttccttccaggagtcccacatcactgtggctggctggaatgtcctggcagacgtgaggagccctggcttcaagaacgacacactgcgctctggggtggtcagtgtggtggactcgctgctgtgtgaggagcagcatgaggaccatggcatcccagtgagtgtcactgataacatgttctgtgccagctgggaacccactgccccttctgatatctgcactgcagagacaggaggcatcgcggctgtgtccttcccgggacgagcatctcctgagccacgctggcatctgatgggactggtcagctggagctatgataaaacatgcagccacaggctctccactgccttcaccaaggtgctgccttttaaagactggattgaaagaaatatgaaatgaaccatgctcatgcactccttgagaagtgtttctgtatatccgtctgtacgtgtgtcattgcgtgaagcagtgtgggcctgaagtgtgatttggcctgtgaacttgggctgtgccagggcttctgacttcagggacaaaactcagtgaagggtgagtagacctccattgctggtaggctgatgccgcgtccactactaggacagccaattggaagatgccagggcttgcaagaagtaagtttcttcaaagaagaccatatacaaaacctctccactccactgacctggtggtcttccccaactttcagttatacgaatgccatcagcttgaccagggaagatctgggcttcatgaggccccttttgaggctctcaagttctagagagctgcctgtgggacagcccagggcagcagagctgggatgtggtgcatgcctttgtgtacatggccacagtacagtctggtccttttccttccccatctcttgtacacattttaataaaataagggttggcttctgaactacaaaacaaa

SEQ ID NO: 5538 - DNA, 5583 bp, Homo sapiens
aaaaaaaaaaaaaaactacggcggccgagaaggggcgagtacagcccagtcctgaggtcgcgggaggctgcgaggactgcaaaagggtggagtcggcctcgcccccgcccaggccccgcccctgccgggaacccactttcccagtcctaggcggcggtcagatccttgcaagcatggtcgcgccggggcttgtactcgggctggtgctgccattaatcctgtgggccgacagaagtgcaggtattggttttcgctttgcttcatacatcaataatgatatggtgctgcagaaggagcctgctggggcagtgatatggggcttcggtacacctggagccacagtgaccgtgaccctgcgccaaggtcaggaaaccatcatgaagaaagtgaccagtgtgaaagctcactctgatacgtggatggtggtactggatcctatgaagcctggaggacctttcgaagtgatggcacaacagactttggagaaaataaacttcaccctgagagttcatgacgtcctgtttggagatgtctggctctgtagtgggcagagtaacatgcagatgactgtgttacagatatttaatgctacaagggagttgtctaacactgcggcatatcagtctgtccgcatcctctctgtctctcccattcaagcagagcaggagctggaggaccttgttgcggttgacttgcagtggtctaagcccacctcagaaaacttaggccatggatatttcaagtacatgtcagcagtgtgctggctctttggacgtcacctttatgacactctgcagtatcccatcgggctgatcgcctccagctggggcgggacacccattgaagcctggtcatctggacggtcactgaaagcctgtggggtccctaaacaagggtccattccatacgattctgtaactggtcccagtaagcactctgttctctggaatgccatgatccatccactgtgcaatatgactctgaaaggggtagtatggtaccagggggagtccaatataaattataacacggatctgtacaattgcacattccctgcactcatcgaagactggcgtgaaaccttccaccgtggttcccaggggcagacggagcgtttcttcccatttggacttgtccagttatcttcagatttgtctaagaagagctcagacgatggatttccccagatccgttggcatcaaacagcagacttcggctatgtccccaacccaaagatgcccaatactttcatggctgtagctatggatctctgtgatagagactcgccttttggcagcatccaccctcgagataaacagactgtggcttatcggctgcatttgggggcccgtgctctggcttatggtgagaagaatttgacctttgaaggaccactgcctgagaagatagaactcttggctcacaaggggctgctcaatctcacatattaccagcaaatccaggtgcagaaaaaggacaacaagatatttgagatctcctgttgcagtgaccatcgatgcaagtggcttccagcttctatgaacaccgtctccacccagtccctgaccctggcgatcgattcttgtcatggcactgtggttgctctccgctatgcttggaccacgtggccttgtgaatataagcagtgtcccctataccaccccagtagtgccctgccagcccctcccttcattgctttcattacagaccagggtcctggacatcagagcaatgttgctaaatgactgtttcagtatgatcagaacttagatataaggatgggtccttcagattttagcatttaggagtttcaataataaccattgcttttaaaggaaattaatagaaagcctcattgaatggctttcagctagcacatggctgtttctatattctgatgagcccaggcttataggtaacttgaaatgcttgctttttgttccctagttggtctaagggtctgtattggactaattctgaactacagacaaattggacctcaatgtcatttacttccctcatattaatgggagtgaaatgtctaatacttttgcccctttttatccagagttgtgggaatctcaggattggaagagattttaaaggccacataggccagctagtgttcatgtgttctttataaaatttctcccatccaagtactaaccaggcccgaccctgcttagcttccgagatcagatgagatcaggcgcgttcagggtgatatggccgtagacgtctttacaaaattcctgacaggtggttactgaatctctctatgaactttccattcaaaactttccaagtttttccttatgtggaaccgaaatctttctttctcccgtgaaactttactactatcagataattgaagacagatctctttgtattctcttcaagcccaaaccaattctgttccttcaatctaaatagtggtaatatgaatgtttaagaaatgaaataagaaacatgtgcaggcactttggaaggtgctaagtgactgccctaaggaatgaaaagcaagggccaggtgggagtagcccagcgaaggcacttgggctgccaggaacaggaggcgtgggaaactctggcttaggaaaacatgaacacaggggcaacagaggcaaactgttgttcgagttaaatataaatctcaggctctttaaaggtaaaaggtttaaggataatccatttggaagaagaaaagagtgaggctgaaagtaaagccacatgacaagcatataaaaaaaaatgcagatgatacaaatatgaaagaggccttcagtgtttgtttattaagaatcttaatgcagtttactgatggattaaaaacagctaacattgtctgaaaattatgttacctataagaagttggaaataaataaaagcataatcactagtgatgtgtatgtatttatatccacttgcaaactgtccttgaagcatgtgaaaaggagtaagaatactatctatgggtagctttcctccccttaatgtgaaaaatgagaactaaagcaaaaagcatcactcactgtacatatacaatgtattttacgtagtgtaaaaaatatggtttagatagtgaatatattaatgaaatcatatgtaaatttatttttagtggctgaataatttaaaacattatgtggaattcactatgtttcccccaatttaggaactttttactgtgtgaaaatgaaatttataatactctgtagggtgaatgatggtttttgctttagttctacccctctgtagagttccaaggggttctggtgtagctccaaacagcaggaataactttgtcagtgccaagattttatttagttaaaaaacaaaaaatctacacactttacaaggaacgttggctcccctgaggacttcctagcattcaactcgttcagttaacccctattgcccatgctttgacctctcatgcatctggccccatagaaaccatgaaccttgtaacagattgatgcctgagaaaaagtcaatctacccgtccactcctccactcccaatacacatacccccatgggctgttctaattcgggggcagccagaggtagccaagaactctaagtccagattcctttcacctccaggaacctagagtacatagtgtgaaaaatacggttcaggcaatgattatgttaatgacgccatgcacattcatttttagtggctgagtaatttaaaacatgatgtgggaattcactgcatttccccaaatgtaagaactttttagttttaaaatgaaatttatagtcactgtagaaaatttggacactaaagtataagcaagtaaaaatcacccccaaattcatcattcagagaaacactattttgctgaaccattcacttgacttgagttatataattttatacagtacatattattttgtaatctgtgtttttgacttacttactttaccaaaataattttcttatgtaaataatagaatatagatttagagtgtttcagtttgtggaagcctcattttatttaaccaatttcctattaatggacatatagatttttaacaattttctactattaaaataatactgtaatgaatatcacatgcaaacatcataccacactcgtccagttatttcttagggttcttaacatggaagaggataaatatatatttaaaatttagatatctacagcttaaccctcccaaaggattaaacaacttacattctcaccaaggtagtcctttttttgccctcaccctcattgacactggatgttgtcaaatttaaaaaaaatccttaacaatctgatagatgaaaagatagtttaagtatactaaggcagtgtttttcaaggtgtttttgtttttgtttttgagttggagttttgctctgttgcccaggctggagtgcagtggcgcggtctcggctcactgcaacctctgcctcccgggttcaagcgattcttcctgcctcagcctcccgagtagctgggactacaggcgcgtgccaccacgcctggctaattttttgtatttttattagagaccgacttagccaggatggtctcgatctcctgacctcttgatccacccgcctcagcctcccaaagtgctgggattacaggcgtgagccaccgtgcccagcttttcaagtttcttaaatccatgatccatagtaaaaacattttacacatatcttcatacaagtatatgtatatgtggtatacgtacacactatagttgtatatgcattatagctgaaaaaccagttcaacctttctacatgtggtatgttccaaaaattttaaatgtctttctaaaatgaggctcttttaatacgggtattactcaggctgtaatagtgggaaaatatttgttatatgataaaagcagcatatatcatttctgtgtaaatgccagtatgctcaagccatttatgcagagaaaaaaagaaaaacactgcattaacattttaagcagtccccttcccgatttgctattatacaaagtttgtttcttttacattgtaaagtgtatacaacttataaaaagactatactcaaaatcataaaataccagttaacttagcttctcagtttacagtggccagtgtggtgtgctctaaacactgctgcctgatccctccctctgctggtcagatttattactataaagtaccaatcccatttgtgttgtcctcaattggcaattatgaatggcagtgcattaaccattcaattctcaccactccatccccattcttctacttctgggtccttttgtccctccctttccagacagcccttggtaacctgctgctgggtaactaaggcatcccacaggtagtgttgaggtgttaggtgatagagtaaacctctaccttaatgctattaacagggtccaaaaatccagttgcatggaacatggagttatattattacatggctaatgaaaagacaggactaagtctgttatagagtatgggactaacccccaattatatgtgaatttgtgttatcatatggtttcagtgtactgagctaaaaagcacattatctgaggtgcaatacaaaggttaaagaggttaaagatcccc

SEQ ID NO: 5539 - DNA, 8527 bp, Homo sapiens
gcccgcgccggctgtgctgcacagggggaggagagggaaccccaggcgcgagcgggaagaggggacctgcagccacaacttctctggtcctctgcatcccttctgtccctccacccgtccccttccccaccctctggcccccaccttcttggaggcgacaacccccgggaggcattagaagggatttttcccgcaggttgcgaagggaagcaaacttggtggcaacttgcctcccggtgcgggcgtctctcccccaccgtctcaacatgcttaggggtccggggcccgggctgctgctgctggccgtccagtgcctggggacagcggtgccctccacgggagcctcgaagagcaagaggcaggctcagcaaatggttcagccccagtccccggtggctgtcagtcaaagcaagcccggttgttatgacaatggaaaacactatcagataaatcaacagtgggagcggacctacctaggcaatgcgttggtttgtacttgttatggaggaagccgaggttttaactgcgagagtaaacctgaagctgaagagacttgctttgacaagtacactgggaacacttaccgagtgggtgacacttatgagcgtcctaaagactccatgatctgggactgtacctgcatcggggctgggcgagggagaataagctgtaccatcgcaaaccgctgccatgaagggggtcagtcctacaagattggtgacacctggaggagaccacatgagactggtggttacatgttagagtgtgtgtgtcttggtaatggaaaaggagaatggacctgcaagcccatagctgagaagtgttttgatcatgctgctgggacttcctatgtggtcggagaaacgtgggagaagccctaccaaggctggatgatggtagattgtacttgcctgggagaaggcagcggacgcatcacttgcacttctagaaatagatgcaacgatcaggacacaaggacatcctatagaattggagacacctggagcaagaaggataatcgaggaaacctgctccagtgcatctgcacaggcaacggccgaggagagtggaagtgtgagaggcacacctctgtgcagaccacatcgagcggatctggccccttcaccgatgttcgtgcagctgtttaccaaccgcagcctcacccccagcctcctccctatggccactgtgtcacagacagtggtgtggtctactctgtggggatgcagtggctgaagacacaaggaaataagcaaatgctttgcacgtgcctgggcaacggagtcagctgccaagagacagctgtaacccagacttacggtggcaactcaaatggagagccatgtgtcttaccattcacctacaatggcaggacgttctactcctgcaccacagaagggcgacaggacggacatctttggtgcagcacaacttcgaattatgagcaggaccagaaatactctttctgcacagaccacactgttttggttcagactcgaggaggaaattccaatggtgccttgtgccacttccccttcctatacaacaaccacaattacactgattgcacttctgagggcagaagagacaacatgaagtggtgtgggaccacacagaactatgatgccgaccagaagtttgggttctgccccatggctgcccacgaggaaatctgcacaaccaatgaaggggtcatgtaccgcattggagatcagtgggataagcagcatgacatgggtcacatgatgaggtgcacgtgtgttgggaatggtcgtggggaatggacatgcattgcctactcgcagcttcgagatcagtgcattgttgatgacatcacttacaatgtgaacgacacattccacaagcgtcatgaagaggggcacatgctgaactgtacatgcttcggtcagggtcggggcaggtggaagtgtgatcccgtcgaccaatgccaggattcagagactgggacgttttatcaaattggagattcatgggagaagtatgtgcatggtgtcagataccagtgctactgctatggccgtggcattggggagtggcattgccaacctttacagacctatccaagctcaagtggtcctgtcgaagtatttatcactgagactccgagtcagcccaactcccaccccatccagtggaatgcaccacagccatctcacatttccaagtacattctcaggtggagacctaaaaattctgtaggccgttggaaggaagctaccataccaggccacttaaactcctacaccatcaaaggcctgaagcctggtgtggtatacgagggccagctcatcagcatccagcagtacggccaccaagaagtgactcgctttgacttcaccaccaccagcaccagcacacctgtgaccagcaacaccgtgacaggagagacgactcccttttctcctcttgtggccacttctgaatctgtgaccgaaatcacagccagtagctttgtggtctcctgggtctcagcttccgacaccgtgtcgggattccgggtggaatatgagctgagtgaggagggagatgagccacagtacctggatcttccaagcacagccacttctgtgaacatccctgacctgcttcctggccgaaaatacattgtaaatgtctatcagatatctgaggatggggagcagagtttgatcctgtctacttcacaaacaacagcgcctgatgcccctcctgacacgactgtggaccaagttgatgacacctcaattgttgttcgctggagcagaccccaggctcccatcacagggtacagaatagtctattcgccatcagtagaaggtagcagcacagaactcaaccttcctgaaactgcaaactccgtcaccctcagtgacttgcaacctggtgttcagtataacatcactatctatgctgtggaagaaaatcaagaaagtacacctgttgtcattcaacaagaaaccactggcaccccacgctcagatacagtgccctctcccagggacctgcagtttgtggaagtgacagacgtgaaggtcaccatcatgtggacaccgcctgagagtgcagtgaccggctaccgtgtggatgtgatccccgtcaacctgcctggcgagcacgggcagaggctgcccatcagcaggaacacctttgcagaagtcaccgggctgtcccctggggtcacctattacttcaaagtctttgcagtgagccatgggagggagagcaagcctctgactgctcaacagacaaccaaactggatgctcccactaacctccagtttgtcaatgaaactgattctactgtcctggtgagatggactccacctcgggcccagataacaggataccgactgaccgtgggccttacccgaagaggacagcccaggcagtacaatgtgggtccctctgtctccaagtacccactgaggaatctgcagcctgcatctgagtacaccgtatccctcgtggccataaagggcaaccaagagagccccaaagccactggagtctttaccacactgcagcctgggagctctattccaccttacaacaccgaggtgactgagaccaccattgtgatcacatggacgcctgctccaagaattggttttaagctgggtgtacgaccaagccagggaggagaggcaccacgagaagtgacttcagactcaggaagcatcgttgtgtccggcttgactccaggagtagaatacgtctacaccatccaagtcctgagagatggacaggaaagagatgcgccaattgtaaacaaagtggtgacaccattgtctccaccaacaaacttgcatctggaggcaaaccctgacactggagtgctcacagtctcctgggagaggagcaccaccccagacattactggttatagaattaccacaacccctacaaacggccagcagggaaattctttggaagaagtggtccatgctgatcagagctcctgcacttttgataacctgagtcccggcctggagtacaatgtcagtgtttacactgtcaaggatgacaaggaaagtgtccctatctctgataccatcatcccagaggtgccccaactcactgacctaagctttgttgatataaccgattcaagcatcggcctgaggtggaccccgctaaactcttccaccattattgggtaccgcatcacagtagttgcggcaggagaaggtatccctatttttgaagattttgtggactcctcagtaggatactacacagtcacagggctggagccgggcattgactatgatatcagcgttatcactctcattaatggcggcgagagtgcccctactacactgacacaacaaacggctgttcctcctcccactgacctgcgattcttttctgatattactgccaactcttttactgtgcactggattgctcctcgagccaccatcactggctacaggatccgccatcatcccgagcacttcagtgggagacctcgagaagatcgggtgccccactctcggaattccatcaccctcaccaacctcactccaggcacagagtatgtggtcagcatcgttgctcttaatggcagagaggaaagtcccttattgattggccaacaatcaacagtttctgatgttccgagggacctggaagttgttgctgcgacccccaccagcctactgatcagctgggatgctcctgctgtcacagtgagatattacaggatcacttacggagagacaggaggaaatagccctgtccaggagttcactgtgcctgggagcaagtctacagctaccatcagcggccttaaacctggagttgattataccatcactgtgtatgctgtcactggccgtggagacagccccgcaagcagcaagccaatttccattaattaccgaacagaaattgacaaaccatcccagatgcaagtgaccgatgttcaggacaacagcattagtgtcaagtggctgccttcaagttcccctgttactggttacagagtaaccaccactcccaaaaatggaccaggaccaacaaaaactaaaactgcaggtccagatcaaacagaaatgactattgaaggcttgcagcccacagtggagtatgtggttagtgtctatgctcagaatccaagcggagagagtcagcctctggttcagactgcagtaaccaacattgatcgccctaaaggactggcattcactgatgtggatgtcgattccatcaaaattgcttgggaaagcccacaggggcaagtttccaggtacagggtgacctactcgagccctgaggatggaatccatgagctattccctgcacctgatggtgaagaagacactgcagagctgcaaggcctcagaccgggttctgagtacacagtcagtgtggttgccttgcacgatgatatggagagccagcccctgattggaacccagtccacagctattcctgcaccaactgacctgaagttcactcaggtcacacccacaagcctgagcgcccagtggacaccacccaatgttcagctcactggatatcgagtgcgggtgacccccaaggagaagaccggaccaatgaaagaaatcaaccttgctcctgacagctcatccgtggttgtatcaggacttatggtggccaccaaatatgaagtgagtgtctatgctcttaaggacactttgacaagcagaccagctcagggagttgtcaccactctggagaatgtcagcccaccaagaagggctcgtgtgacagatgctactgagaccaccatcaccattagctggagaaccaagactgagacgatcactggcttccaagttgatgccgttccagccaatggccagactccaatccagagaaccatcaagccagatgtcagaagctacaccatcacaggtttacaaccaggcactgactacaagatctacctgtacaccttgaatgacaatgctcggagctcccctgtggtcatcgacgcctccactgccattgatgcaccatccaacctgcgtttcctggccaccacacccaattccttgctggtatcatggcagccgccacgtgccaggattaccggctacatcatcaagtatgagaagcctgggtctcctcccagagaagtggtccctcggccccgccctggtgtcacagaggctactattactggcctggaaccgggaaccgaatatacaatttatgtcattgccctgaagaataatcagaagagcgagcccctgattggaaggaaaaagacagacgagcttccccaactggtaacccttccacaccccaatcttcatggaccagagatcttggatgttccttccacagttcaaaagacccctttcgtcacccaccctgggtatgacactggaaatggtattcagcttcctggcacttctggtcagcaacccagtgttgggcaacaaatgatctttgaggaacatggttttaggcggaccacaccgcccacaacggccacccccataaggcataggccaagaccatacccgccgaatgtaggtgaggaaatccaaattggtcacatccccagggaagatgtagactatcacctgtacccacacggtccgggactcaatccaaatgcctctacaggacaagaagctctctctcagacaaccatctcatgggccccattccaggacacttctgagtacatcatttcatgtcatcctgttggcactgatgaagaacccttacagttcagggttcctggaacttctaccagtgccactctgacaggcctcaccagaggtgccacctacaacgtcatagtggaggcactgaaagaccagcagaggcataaggttcgggaagaggttgttaccgtgggcaactctgtcaacgaaggcttgaaccaacctacggatgactcgtgctttgacccctacacagtttcccattatgccgttggagatgagtgggaacgaatgtctgaatcaggctttaaactgttgtgccagtgcttaggctttggaagtggtcatttcagatgtgattcatctagatggtgccatgacaatggtgtgaactacaagattggagagaagtgggaccgtcagggagaaaatggccagatgatgagctgcacatgtcttgggaacggaaaaggagaattcaagtgtgaccctcatgaggcaacgtgttatgatgatgggaagacataccacgtaggagaacagtggcagaaggaatatctcggtgccatttgctcctgcacatgctttggaggccagcggggctggcgctgtgacaactgccgcagacctgggggtgaacccagtcccgaaggcactactggccagtcctacaaccagtattctcagagataccatcagagaacaaacactaatgttaattgcccaattgagtgcttcatgcctttagatgtacaggctgacagagaagattcccgagagtaaatcatctttccaatccagaggaacaagcatgtctctctgccaagatccatctaaactggagtgatgttagcagacccagcttagagttcttctttctttcttaagccctttgctctggaggaagttctccagcttcagctcaactcacagcttctccaagcatcaccctgggagtttcctgagggttttctcataaatgagggctgcacattgcctgttctgcttcgaagtattcaataccgctcagtattttaaatgaagtgattctaagatttggtttgggatcaataggaaagcatatgcagccaaccaagatgcaaatgttttgaaatgatatgaccaaaattttaagtaggaaagtcacccaaacacttctgctttcacttaagtgtctggcccgcaatactgtaggaacaagcatgatcttgttactgtgatattttaaatatccacagtactcactttttccaaatgatcctagtaattgcctagaaatatctttctcttacctgttatttatcaatttttcccagtatttttatacggaaaaaattgtattgaaaacacttagtatgcagttgataagaggaatttggtataattatggtgggtgattattttttatactgtatgtgccaaagctttactactgtggaaagacaactgttttaataaaagatttacattccacaacttgaagttcatctatttgatataagacaccttcgggggaaataattcctgtgaatattctttttcaattcagcaaacatttgaaaatctatgatgtgcaagtctaattgttgatttcagtacaagattttctaaatcagttgctacaaaaactgattggtttttgtcacttcatctcttcactaatggagatagctttacactttctgctttaatagatttaagtggaccccaatatttattaaaattgctagtttaccgttcagaagtataatagaaataatctttagttgctcttttctaaccattgtaattcttcccttcttccctccacctttccttcattgaataaacctctgttcaaagagattgcctgcaagggaaataaaaatgactaagatatt

SEQ ID NO: 5540 - DNA, 5476 bp, Homo sapiens
gcgcagcccgcagaggcgctgcggcccgtgcagccccggaggcccctcgcggagaaggcggcggcggaggagaggccgagttaccgcccgccgcccgcgcccccccaaccccgccgccgccgccgccgccgccactgccccccctccccgcggcgccgcatcttgaatggaaacatggcggtgccggctcggacctgcggcgcctctcggcccggcccagcgcggactgcgcgcccctggcccggctgcggcccccaccctggccccggcacccggcgcccgacgtccgggcccccgcgcccgctgtggctgctgctgccgcttctaccgctgctcgccgcccccggcgcctctgcctacagcttcccccagcagcacacgatgcagcactgggcccggcgtctggagcaggaggtcgacggcgtgatgcggatttttggaggcgtccagcagctccgtgagatttacaaggacaaccggaacctgttcgaggtacaggagaatgagcctcagaagttggtggagaaggtggcaggggacattgagagccttctggacaggaaggtgcaggccctgaagagactggctgatgctgcagagaacttccagaaagcacaccgctggcaggacaacatcaaggaggaagacatcgtgtactatgacgccaaggctgacgctgagctggacgaccctgagagtgaggatgtggaaagggggtctaaggccagcaccctaaggctggacttcatcgaggacccaaacttcaagaacaaggtcaactattcatacgcggctgtacagatccctacggacatctacaaaggctccactgtcatcctcaatgagctcaactggacagaggccctggagaatgtgttcatggaaaaccgcagacaagaccccacactgctgtggcaggtcttcggcagcgccacaggagtcactcgctactacccggccaccccgtggcgagcccccaagaagatcgacctgtacgatgtccgaaggagaccctggtatatccagggggcctcgtcacccaaagacatggtcatcatcgtggatgtgagtggcagtgtgagcggcctgaccctgaagctgatgaagacatctgtctgcgagatgctggacacgctgtctgatgatgactatgtgaatgtggcctcgttcaacgagaaggcacagcctgtgtcatgcttcacacacctggtgcaggccaatgtgcgcaacaagaaggtgttcaaggaagctgtgcagggcatggtggccaagggcaccacaggctacaaggccggctttgagtatgcctttgaccagctgcagaactccaacatcactcgggccaactgcaacaagatgatcatgatgttcacggatggtggtgaggaccgcgtgcaggacgtctttgagaagtacaattggccaaaccggacggtgcgcgtgtttactttctccgtggggcagcataactatgacgtcacaccgctgcagtggatggcctgtgccaacaaaggctactattttgagatcccttccatcggagccatccgcatcaacacacaggaatatctagatgtgttgggcaggcccatggtgctggcaggcaaggaggccaagcaggtgcagtggaccaacgtgtatgaggatgcactgggactggggttggtggtaacagggaccctccctgttttcaacctgacacaggatggccctggggaaaagaagaaccagctgatcctgggcgtgatgggcattgacgtggctctgaatgacatcaagaggctgacccccaactacacgcttggagccaacggctatgtgtttgccattgacctgaacggctacgtgttgctgcaccccaatctcaagccccagaccaccaacttccgggagcctgtgactctggacttcctggatgcggagctagaggatgagaacaaggaagagatccgtcggagcatgattgatggcaacaagggccacaagcagatcagaacgttggtcaagtccctggatgagaggtacatagatgaggtgacacggaactacacctgggtgcctataaggagcactaactacagcctggggctggtgctcccaccctacagcaccttctacctccaagccaatctcagtgaccagatcctgcaggtcaagtattttgagttcctgctccccagcagctttgagtctgaaggacacgttttcattgctcccagagagtactgcaaggacctgaatgcctcagacaacaacaccgagttcctgaaaaactttattgagctcatggagaaagtgactccagactccaagcagtgcaacaacttccttctgcacaacctgatcttggacacgggcatcacgcagcagctggtagagcgtgtgtggagggaccaggatctcaacacgtacagcctactggccgtgttcgctgccacagacggtggcatcacccgagtcttccccaacaaggcagctgaggactggacagagaaccctgagcccttcaatgccagcttctaccgccgcagcctggataaccacggttatgtcttcaagcccccacaccaggatgccctgttaaggccgctggagctggagaatgacactgtgggcatcctcgtcagcacagctgtggagctcagcctaggcaggcgcacactgaggccagcagtggtgggcgtcaagctggacctagaggcttgggctgagaagttcaaggtgctagccagcaaccgtacccaccaagaccagcctcagaagtgcggccccaacagccactgtgagatggactgcgaggttaacaatgaggacttactctgtgtcctcattgatgatggaggattcctggtgctgtcaaaccagaaccatcagtgggaccaggtgggcaggttcttcagtgaggtggatgccaacctgatgctggcactctacaataactccttctacacccgcaaggagtcctatgactatcaggcagcctgtgcccctcagccccctggcaacctgggtgctgcaccccggggtgtctttgtgcccaccgttgcagatttccttaacctggcctggtggacctctgctgccgcctggtccctgttccagcagcttctctacggcctcatctaccacagctggttccaagcagaccccgcggaggccgaggggagccccgagacgcgcgagagcagctgcgtcatgaaacagacccagtactacttcggctcggtaaacgcctcctacaacgccatcatcgactgcggaaactgctccaggctgttccacgcgcagagactgaccaacaccaatcttctctttgtggtggccgagaagccgctgtgcagccagtgcgaggctggccggctgctgcagaaggagacgcactgcccagcggacggcccggagcagtgtgagctagtgcagagaccgcgataccggagaggcccgcacatctgcttcgactacaacgcgacagaagatacctcagactgtggccgcggggcctccttcccgccgtcgctgggcgtcctggtctccctgcaactgctgctcctcctgggcctgccgccccggccgcagcctcaagtcctcgtccacgcctctcgccgcctctgagcaccctgccccaccccacctccactcccacctcacccggcctcttcgcctttcccaccctcctgccccacactccccgccttagagcctcgtccctccctcactgaaggacctgagctggccaggccctgagagtctggtctgcgccttgggatggggagtcccaaagcgggacgccgcaggtgtttggcacccaaatcacatctcacctccgaactgttcaagtgtccccagacccttcttgcctgctgggctccccccagtgggatgggacagggaggccacacgcactggtgccaaaaccaggcctctgctgccgcccttcctggaggctgcctatgttgggggggaccctgcctcagctgacccggcctctctgccccacccaagcccaaacttggtttctgtgagaatagtggaggaaggtgagatggccagtttgaagcctgtgcctcccagcttaaatcctagcaggagagaggctctggggcagcccccatgggctcctgcccctttcaggcctacagccacatccccaagcccaccaggtgtcaggatagtcacagtgataccagttcagacactaccccatatacacctggaacattgaggatggaaactggactcacattcgacataccccactgggcacacgcacaaacacacacactatggggtggggtgggtgtaggggcttacaaagccttacacagggcgaggggttggtgggagggttggcacctgcacactccatctcctgctcaccacctgcctctaatctgagctgcagcctggctggtcctcccatttctaaagctgaatgtcaaacagtgccaaatgctggggcagggggtgaagaaccctctgtcccacccctagccaccagtgtcctccaagtgccccctcacctctccaggtgctcattgtaaccatttctcactagtgtcaggcccccagtgggaccacatgccactgcctgcacctttcggcagaggaacccccaccagacatcaccctttgccttagcaggggtgactttgtctctcctggctgggccatccttccgccaatctggcccttacacactcaggcctgtgcccactccctatctccttcccacccctacacacacactccctgcttgcaggaggccaaactgtccctcccttgctgaacacacacacacacacacacacacaggtggggactgggcacagctcttcacaccattcattctggtcatttcccccaaaggcatcccagcctgggggccagtggggaactgagggcaaggggatatagtgatggggctcagatggactgggaggagggggagggtgatgcattaattaatggcttcgttaattaatgtcatgttgcttgtcgctttctcagtgtgtgtgtgtggtccatgcccactgctggtgccagggtgggtgtccatgtgcacccggcctggatgccagctgtgtccttcgggggcgtgcgtgtaactgtagtgtagtcaggtgctcaatggagaatataaacatatacagaaaaatatatattttaagtttaaaaaacagaaaaacagacaaaacaatccccatcaggtagctgtctaacccccagctgggtctaatccttctcattacccacccgacctggctgcccctcaccttgggctgggggactggggggccatttccttttctctgccctttttttgttgttctattttgtacagacaagttggaaaaacaacagcgacaaaaaagtcaagaaactttgtaaaatatcgtgtgtgtgattccttgtaaaatattttcaaatggtttattacagaagatcagttattaaataatgttcatattttcacttc

SEQ ID NO: 5541 - DNA, 4784 bp, Homo sapiens
attgcgcctgcgcagggagcccaaggcaagagccgctaggctgccctgcccgaagggctcaactgtcagtgagcctgcgcaggaggccaataggctgccaatactccttggactccccgccagggccctgctgtcagtgcgcctgcgcgcgggtccggcgccgaggttcttgactgctgtgccggacgccaggtgtagccatgcagcgagccgattccgagcagccctccaagcgtccccgttgcgatgacagcccgagaaccccctcaaacaccccttccgcagaggcagactggtccccgggcctggaactccatcccgactacaagacatggggtccggagcaggtgtgctccttcctcaggcgcggtggctttgaagagccggtgctgctgaagaacatccgagaaaatgaaatcacaggcgcattactgccttgtcttgatgagtctcgttttgaaaatcttggagtaagttccttgggggagaggaagaagctgcttagttatatccagcgattggttcaaatccacgttgatacaatgaaggtaattaatgatcctatccatggccacattgagctccaccctctcctcgtccgaatcattgatacacctcaatttcaacgtcttcgatacatcaaacagctgggaggtggttactatgtttttccaggagcttcacacaatcgatttgagcatagtctaggggtggggtatctagcaggatgtctagttcacgcactgggtgaaaaacaaccagagctgcagataagtgaacgagatgttctctgtgttcagattgctggactttgtcatgatctcggtcatgggccattttctcacatgtttgatggacgatttattccacttgctcgcccggaggtgaaatggacgcatgaacaaggctcagttatgatgtttgagcaccttattaattctaatggaattaagcctgtcatggaacaatatggtctcatccctgaagaagatatttgctttataaaggaacaaattgtaggaccacttgaatcacctgtcgaagattcattgtggccatataaagggcgtcctgaaaacaaaagcttcctttatgagatagtatctaataaaagaaatggcattgatgtggacaaatgggattattttgccagggactgccatcatcttggaatccaaaataattttgattacaagcgctttattaagtttgcccgtgtctgtgaagtagacaatgagttgcgtatttgtgctagagataaggaagttggaaatctgtatgacatgttccacactcgcaactctttacaccgtagagcttatcaacacaaagttggcaacattattgatacaatgattacagatgctttcctcaaagcagatgactacatagagattacaggtgctggaggaaaaaagtatcgcatttctacagcaattgacgacatggaagcctatactaagctgacagataacatttttctggagattttatactctactgatcccaaattgaaagacgcacgagagattttaaaacaaattgaataccgtaatctattcaagtatgtgggtgagacgcagccaacaggacaaataaagattaaaagggaggactatgaatctcttccaaaagaggttgccagtgctaaacccaaagtattgctagacgtgaaactgaaggctgaagattttatagtggatgttatcaacatggattatggaatgcaagaaaagaatccaattgatcatgttagcttctattgtaagactgcccccaacagagcaatcaggattactaaaaaccaggtttcacaacttctgccagagaaatttgcagagcagctgattcgagtatattgtaagaaggtggacagaaagagtttgtatgccgcaagacaatattttgttcagtggtgtgcagacagaaatttcaccaagccgcaggatggcgatgttatagccccactcataacacctcaaaaaaaggaatggaacgacagtacttcagtccaaaatccaactcgcctccgagaagcatccaaaagcagagtccagctttttaaagatgacccaatgtgaatgtctgtagtcagttgtttacaaactccctctcctgcacaattcatttagaggcttcaatcatagaattctgcaaattaatgacaactcatgctttaattttgtattttgaatgtacacgcatgctgaagctaagtaacttttaatcaaagaaataagatggtattaggcaaatcttactatactatgaaaagcattaccttgcctatttttaatattattaaagcctttctccttcagtagtctattttcttagaataacaactcttttatctattctgaactctattttttttcttttttaagagacaaggttttgctctgttgcccagcttggactcgaactttcctgggctcaagcgaccctcctgcctcagccccccaagtagctgggactaaagtcatgtgccaccacacccagcttactctgaacttttatgacagatgattgttttttgtttttaatgtagaaatgagacaagggtacaaattggaactagaaattgacattgtcattgacaaacatggctaaaaacaaaacatcaaatcctgcccccgtgaagagttccctgtcacctcaagtttgaggatagtcctctaagagtgacctaagcataagtgaaagacacctcccctcacccttctagccccctacaaggtgccaggttggggtaaagagttggagatgatggccaggagtggcctccaacacgctggtgagaggcctgattaggttttggggaagatctgagagctctggcctcttcgtgagtggaacataaagccgcctcttgttgggagatcctaccccagtgacagaggaatcccccaaactaggctgtgccctggctccgtggcggctccagacccgggtagtgcctttgtcccctgaatactcactcccccggtccagagggccttcccactgcccagcctggagaaggcctcccctgacctgctctctcagtatcctggagagctggccagaggccatcacaggcatcatcctcagagctcctcagacctgggactttgtttttgctggttcagtgcattttgtgtatttaagagcaaacactagccaggcgtggcggcgtgtgcctgtagtcccagctacttgggaggctgaggcaggaggattgctcgaacctgggaggcggaggttgcagtgagcctagatcacgccattgcactccagcctgggtgacagagtgagactccatctccaaaaaaaaaagcacaaacactgcactgcctgtgctgaaattagtgaccacccagtgggctccaggctccgctaggtaacttcgttttcccagcagtggagtgggcaccaccttggtggggcagtgcccctgtgcccagggcacacctcattcccagttctatagcaattcaccaagaacaaagtctgcagttagagccaaagctggtggtggccagagggtgctgaagatacaggccagtggggatgggagccatgagccccgaatgtcttctgctctgatgctccccggactaagcctccctggcacactgggagtgaggggcagcctgagcaagtaggggaactcagaccacaggccagcagatttcccagcagtccatcactggccaccgtgtagccagattctgttccgtccacactggggtgaagagtacttggaatgtctgccatcctgtatgatcaccccaccccctgtccatccatcagtagataataagggttggttacaattcataagagaatagttaaaacacttctcctctcatgcctaccatggtgctgtatcaaggggatttgttcacatatgggctcagcaacgcacaagtgaggtcagccatggcactaggtcattcccattttagccaaggtgcctctataggggtcagacatcatgtgcccagacctaaggtcaggaatgtcatatttttctgttaaaatcattttatttctgtgtatcttacctttaaatcattgtggtttactctgagattctgtagtcctaatattgtatcattgtgctgtctgcaaaacaacttgaatctattttgtttgcatcttttgttacatgtaacgcagctgtactttatgttctttgcaactgtttccattatgagaacgctgtgctatttacaaggttacatttttcttggccaggcgaggtggtcatgcctgtaatcccagcactttgggaggccaaggtgggcggatcacttgaggtaaagagttgagaccagcctggctagcatggcgaaacccagtctctactaaaaatacaaaaattagccgggtgaaattagccgggcgtggtggtgtgtgcttgtaatcccagctactcgggaggctgaggcaggagaatcgcttgaatccgggaggcagaggttgcagtgagccaagatcaggccactgcactccagcctcggggtcaagagcgaaactctgtctcaaacaaaaagaaagaaaggaaggaaggaaggagggaaggaaggaaggaaagagagaaagaaaagaaagaaagaaagaaagaaagagaaagaaatatctttgctatttgtataaaaatggaaattttaacagcttagcctctagagagttactgaacgtggttaccttgggaatgtaaatagaactgcaaattaaaatgactggccacttcaactgggtaagggaaacagctgcaataaagcttcgtgaatata

SEQ ID NO: 5542 - DNA, 5605 bp, Homo sapiens
cagtccagcgcccgccgcccgccaccccggaccccggtgtctggcttcccccgagccgggaccccgcgatggccaagcgcagctcgctgtacatccgcatcgtggaggggaagaaccttcccgccaaggacatcactggcagcagcgacccctactgcatcgtgaaggtggacaatgagcccatcatcaggacagccacagtgtggaagaccctgtgccccttctggggtgaggagtaccaagtgcacctgccgcccaccttccacgctgtggctttctatgtcatggatgaggatgccctcagccgggacgacgttatcggaaaggtctgccttacaagggacaccatagcctctcaccctaagggtttcagcgggtgggcccacctgacggaggtcgaccccgatgaggaggtgcagggcgagatccacctgcggctggaagtgtggccaggggcccgggcctgccggctacgctgctctgtgctggaggccagggatctggccccaaaggaccgcaatggcacatctgaccccttcgtccgagtgcgctacaagggccggacacgggagacctcgatcgtgaagaagtcatgctacccacgctggaatgagacgtttgaatttgagctgcaggagggggccatggaggcgctgtgcgtggaggcctgggactgggaccttgtcagccgaaacgacttcctgggcaaagtggtgattgatgtccagagactgcgggtggtgcagcaggaggagggctggttccggctgcagcccgaccagtccaagagccggcggcatgacgagggcaacctgggctccttgcagctggaggtgcggctgcgggacgagacggtgctgccctccagctactaccagccactggtgcacctgctgtgccacgaggtcaagctgggcatgcagggcccagggcagctgatcccactcatcgaggagacaaccagcaccgagtgtcgccaggacgtggccacgaacctgctcaagctcttcctggggcaggggctggccaaggacttcctggacctgctcttccagctggagctgagtcgcaccagtgagaccaacaccctgttccggagcaactctctggcctcaaagtccatggagtcttttctgaaggtggccgggatgcagtacctgcacggcgtcctgggccccatcatcaacaaggtgtttgaggagaagaagtacgtggagctggaccccagcaaagtggaagttaaggatgtagggtgctccgggctgcaccgcccgcagaccgaggccgaggtgctggagcagagcgcgcagacgctgcgcgcccacctgggggccctgctgagcgcgctcagccgctcggttcgcgcgtgccccgccgtggtgcgcgccaccttccgccagctcttccggcgcgtgcgcgagcgcttccccggcgcccagcacgagaatgtaccgttcatcgccgtcaccagcttcctgtgcctgcgcttcttctctcccgccatcatgtcgcccaagctcttccacctgcgggagcgccacgcggacgcccgcaccagccgcaccctgctcctgttggccaaggcagtccagaacgtgggcaacatggacacgccggcttccagggccaaggaggcttggatggagccgctgcagcccaccgtgcgccagggcgtggcgcagctgaaggacttcatcaccaagctcgtggacatcgaggagaaggacgagctggacctgcagcggacgctgagtttgcaggcgccacctgtgaaggaggggccactcttcatccacaggaccaagggcaagggccccctcatgtcctcctccttcaagaagctctacttctccctcactaccgaggccctcagcttcgcgaagacgcccagctccaagaaaagcgccctcatcaagttagccaacatccgggcagcggaaaaggttgaggaaaagagctttggcggctcgcacgtcatgcaggtcatctacacggacgacgccggcaggccccagactgcctacctgcagtgcaagtgtgtgaatgagcttaaccagtggctgtctgcgctgcggaaggtgagcatcaacaacaccggactgctgggctcctaccaccctggcgtcttccgtggggacaagtggagctgctgccaccaaaaagagaagacaggtcagggctgcgataagacccggtcacgggtgaccctgcaggagtggaatgaccctcttgaccatgaccttgaggcccagctcatctaccggcacctgctgggcgtggaggccatgctgtgggagaggcaccgggagctgagcgggggcgcagaggcaggcacggtgcccacgagccctggcaaagtccccgaggactcattggcccggctgctccgggtgctgcaggacctccgcgaggcccatagctccagcccggccggctccccaccctcagagcccaactgcctcctggagctgcagacgtgaggcccgccctacgctccccttgctgagtcccctgccaagcgctcggagcccccccaggacactctgcaccccctcaccccggtcctcctcattagggtgcagggcctaggtctcttccaggtgggggaggggggagagtcaggaataaggggatccccagaagtgcagagctgagcaggcttgggcctgtcatggctggccggaagtgtccccagctccctacagacgctgtagccatcactgcctctccagggaccctcctctcctgcccaggacagacccagccagaaccactgctaggatgggccgcacccaggggtctggcctccagggacctagagaatgggagggagaacggggccccaggagacccggccgccaccccacccgctacccttgggtgccacagggctgtgctgttgccaacagtaaacctgctcttactgtccaggctctggggtcttgtgatgagggtctggggagaaagtgggcccggggggaccccggaggctgtcggtggatgtgccgatgatggggctgacagtatgggctctgggcatccctgttcccccctctttcttccccccactcttctggggtcgggggttcctttcccttcccagttgctgtccctgggtcccctctttcatgtcccacaggccacagagcccagtgtgtccaaccagctgttctctcctcaaagcagcccccaagcaagtcccttctctagggtgtccctgaggacagcacagaggcgggactcagagaccccattcctcttcacgcagcccttaccccaagccctctagctgtgtggctggcagtgttggccacgtaggggctcccatccccccaccattgtgtcacatgggctgccaggctcagctcccagctgcgtccacagtgacctggatcagggtggggacaaggactggaccctccttctccagaaggccttcagctcttgccttgccatgcagtcacctccttccccctctgaccccagatcccaaaggtgcaccgttgccccagcccctttctggccccatggggtttctctgatgccttcatcatagaggcccggggctggtccgatggttggcaaaacttgactccggcccagtccccactcttggggacttagaacccctgctgtcctgggatctggcctgcctttctttggtcagtccctgtggtcccccaccagctccccctcccatagggctgcccaccaagccctgcccccagcccaagaggagcccccactgcctgcggggcagtgatgtctggccaccggctcacaccaatgacttggtcctggggtggcagaagcagcaggtgacaggagcagggcccctgtccctctcttctggccctgtggtacccaggccacacgttgtgcccgctcttggggctgaccggctgtagggaccaccagccgctgctactgtgggccgccccggggcagggtgggcagggcttttgtgggttatgaggacacagaagtccctgaggcccccagacctggctcagccaacctccttcctcccccggttgccccccactctaaagcctcctccctcccagcgtccactggctccaggctcctcacaacagcagctcatagacacggggcgtctccaggtggtcccagccctccagatgtttctagctctccaggtgggcgctgttttcacgtctgcctgcatccattcattccttcattcctcacctttatcctgttatctctatttttttaagctaccaggaaggaaagggaagaagagatcacgaaactgggacccccagaaaggaggagtgggctttgaacttagacatctacctcagagctcaaataggttgtttaaaatcacattcaattttcagatgaaggggaactttatagttttttttttttttttttttttgagacagagtctcactgtgttgcccaggctggagtgcaaatggcttgatcttggttcactgcaacctctgcctcccaggttcaagcaattctcttgcctcagcctcccgagtagctgggactaaaggcgtgtgccaccatgcccagctaattcttgtatttttagtagagacggagtttctccatgttggccagactggtctcgaactcctgacctcaggtgatctgaccgccttggcctccgaaagtgctgagattacagttgcgagccactgtgcgtggccagaactttataataagagacttgaagctgggtgtgacggtgcacacctctagtcccagctactcgggaggccaagacagaaggatcaccttgaggccaggagtttaaggccagcctgggcaacatagcaaaacctagtccctaaaattaaaaaaaaaaaaaaaaaaaaaaggaaaataaaggagacttgaaatttttgaactaaatagtggtgatggctacacattgtgaatgtaattaacaccactgagttaaacacttaaaatggttaaaatggcaaattgtatgttatacctattttactacaataaaaagtataaaaaagagaagatatttaggtgacttacagcaaccaattgcaacaaaacaaaatgttaagaaatgatctttttatgaggcaattggaaatttgaacactgatcaactataggatgattggaattattaatttttaaaggtgtgataagatactgcacttggctgggcacagtggcacatgcctgtaatcccagctacttggcaggctgaggtgggagaatcgcttgagctcaggagttcgagaccagcctgggcaacgtggcgaaatccccgtctttacaaaaacaaacaaacaaacaaaaaagatattgcagttgtgttgtaagcgtccttatctttcagagctacatagtggaatgtttatggaatatttaggataaatgatataggcatttgggatttgctgcaaaatgacccagaggcaggggtcagggggagaggtagagatgagacaagaggtagaggggagaggtagaggtagccacgagctgataattacagacaagagatgcggagtatgtgggggctcattatcctgcatagtctatctttgtatatctttgaacttttcaagaataaaaaagcttaaaaagtata

SEQ ID NO: 5543 - DNA, 6346 bp, Homo sapiens
ctgggatagaagcggcaggagcagcgttggcaccggcgaaccatggctgggattttctatttcgccctattttcgtgtctcttcgggatttgcgacgctgtcacaggttccagggtataccccgcgaatgaagttaccttattggattccagatctgttcagggagaacttgggtggatagcaagccctctggaaggagggtgggaggaagtgagtatcatggatgaaaaaaatacaccaatccgaacctaccaagtgtgcaatgtgatggaacccagccagaataactggctacgaactgattggatcacccgagaaggggctcagagggtgtatattgagattaaattcaccttgagggactgcaatagtcttccgggcgtcatggggacttgcaaggagacgtttaacctgtactactatgaatcagacaacgacaaagagcgtttcatcagagagaaccagtttgtcaaaattgacaccattgctgctgatgagagcttcacccaagtggacattggtgacagaatcatgaagctgaacaccgagatccgggatgtagggccattaagcaaaaaggggttttacctggcttttcaggatgtgggggcctgcatcgccctggtatcagtccgtgtgttctataaaaagtgtccactcacagtccgcaatctggcccagtttcctgacaccatcacaggggctgatacgtcttccctggtggaagttcgaggctcctgtgtcaacaactcagaagagaaagatgtgccaaaaatgtactgtggggcagatggtgaatggctggtacccattggcaactgcctatgcaacgctgggcatgaggagcggagcggagaatgccaagcttgcaaaattggatattacaaggctctctccacggatgccacctgtgccaagtgcccaccccacagctactctgtctgggaaggagccacctcgtgcacctgtgaccgaggctttttcagagctgacaacgatgctgcctctatgccctgcacccgtccaccatctgctcccctgaacttgatttcaaatgtcaacgagacatctgtgaacttggaatggagtagccctcagaatacaggtggccgccaggacatttcctataatgtggtatgcaagaaatgtggagctggtgaccccagcaagtgccgaccctgtggaagtggggtccactacaccccacagcagaatggcttgaagaccaccaaagtctccatcactgacctcctagctcataccaattacacctttgaaatctgggctgtgaatggagtgtccaaatataaccctaacccagaccaatcagtttctgtcactgtgaccaccaaccaagcagcaccatcatccattgctttggtccaggctaaagaagtcacaagatacagtgtggcactggcttggctggaaccagatcggcccaatggggtaatcctggaatatgaagtcaagtattatgagaaggatcagaatgagcgaagctatcgtatagttcggacagctgccaggaacacagatatcaaaggcctgaaccctctcacttcctatgttttccacgtgcgagccaggacagcagctggctatggagacttcagtgagcccttggaggttacaaccaacacagtgccttcccggatcattggagatggggctaactccacagtccttctggtctctgtctcgggcagtgtggtgctggtggtaattctcattgcagcttttgtcatcagccggagacggagtaaatacagtaaagccaaacaagaagcggatgaagagaaacatttgaatcaaggtgtaagaacatatgtggacccctttacgtacgaagatcccaaccaagcagtgcgagagtttgccaaagaaattgacgcatcctgcattaagattgaaaaagttataggagttggtgaatttggtgaggtatgcagtgggcgtctcaaagtgcctggcaagagagagatctgtgtggctatcaagactctgaaagctggttatacagacaaacagaggagagacttcctgagtgaggccagcatcatgggacagtttgaccatccgaacatcattcacttggaaggcgtggtcactaaatgtaaaccagtaatgatcataacagagtacatggagaatggctccttggatgcattcctcaggaaaaatgatggcagatttacagtcattcagctggtgggcatgcttcgtggcattgggtctgggatgaagtatttatctgatatgagctatgtgcatcgtgatctggccgcacggaacatcctggtgaacagcaacttggtctgcaaagtgtctgattttggcatgtcccgagtgcttgaggatgatccggaagcagcttacaccaccaggggtggcaagattcctatccggtggactgcgccagaagcaattgcctatcgtaaattcacatcagcaagtgatgtatggagctatggaatcgttatgtgggaagtgatgtcgtacggggagaggccctattgggatatgtccaatcaagatgtgattaaagccattgaggaaggctatcggttaccccctccaatggactgccccattgcgctccaccagctgatgctagactgctggcagaaggagaggagcgacaggcctaaatttgggcagattgtcaacatgttggacaaactcatccgcaaccccaacagcttgaagaggacagggacggagagctccagacctaacactgccttgttggatccaagctcccctgaattctctgctgtggtatcagtgggcgattggctccaggccattaaaatggaccggtataaggataacttcacagctgctggttataccacactagaggctgtggtgcacgtgaaccaggaggacctggcaagaattggtatcacagccatcacgcaccagaataagattttgagcagtgtccaggcaatgcgaacccaaatgcagcagatgcacggcagaatggttcccgtctgagccagtactgaataaactcaaaactcttgaaattagtttacctcatccatgcactttaattgaagaactgcactttttttacttcgtcttcgccctctgaaattaaagaaatgaaaaaaaaaaacaatatctgcagcgttgcttggtgcacagattgctgaaactgtggggcttacagaaatgactgccggtcatttgaatgagacctggaacaaatcgtttctcagaagtacttttctgttcatcaccagtctgtaaaatacatgtacctatagaaatagaacactgcctctgagttttgatgctgtatttgctgccagacactgagcttctgagacatccctgattctctctccatttggaattacaaccattgtattttgtttgtggcataaattacagtcatctgtctttcactggaatgaagaccatgcctaggaacattttttaaggactcagctgtggcttttagggcttggttcataccatgggggaaaaaaaagtcctaggagaaagcgacgtggctcattagtgttgcctcttcagtgctcaagccgcctggtggattcctatgacacagggggcctggaaagaaagggaaagtggatttaaaatatatatatacgtaacccaagccccataacccctaactggacaaatgaggtctgtttctttgggcctgaggctgtgccatataaagtcttattttgggactttacaaacttgtcctaactatcttgtggatagtgggctgtgacaatctggaatagagaacgttcacacttcgctcctttaaagaagcgaccccagatctgcaagggagtagattctgctatcttggcctcacagcccttcctgttgattacaaagcccgtggaagaaaacagaacacaccctcctcagttccgtctaaatgtgtttcttctgcttcaattacaccagttctggggcaaagacactgatgaaacaacacccatacctgaaaagaataaatgtgtgactttcaaatcccctttcgcagtgaaagaaacagcaaacacttaagattcagcatctgttctccagttgcactgaggaatgcactgtctcgcagcaccagctctgcagagcccttgccccagactctttgcggttttatttatatgtatttccatatttcattcctgtgtgtcactgctgcattggtgtggcagcaagtgaccaaatgctacaggtcttactatggacaccaggtcaggtgcaaccacacaaaacaaagccagttccatgagctgcctatgatatgcattgcggaagtaacattttacccagggtgtgccattgcagtgatataaatatatttttttcttagactaaatatgagctgactatctcttttgatgtgtgtacataggtgtgagtgtgtctgtatgcgtgcctgtctgtgtgcgggtgtgtgtatgtgcgtagcctcatgcttaggactacccatgaatgttgtggaatgctacacctggagagttctggttttccaccagtttcaagatgaagaactacatgatacagtggacctggagaccatccccttggaaagacaacccagagatgttcagcatcctgtatctacacgcatcctgtatctacacgtgtattttgtagctgtcacactaaccttaataagaattctacagctttggacagaggcattttcaccttaatggtgaagtaatttaaaatataaatccattcaggtgacaacccatcatcaaaattacaaattttctgattgaactcatctgaatcatcagttccttgatggagagagagaaggagatggaatgtgtctggtaaccccaaatggagtacaagtagcctttgttttcctgcataaatggacttgttgaatgcgaacgaatatatgcaattcatatacttttggagatgaacgtagatatgtgtgtcagctttgagatggtgtgtcctggattaatactttgtctcccaatatcacagaaaaatacatgccagtgactcttgaggttaaggtagttgggatgaaatggcctcaggcaatttcacattccctaattacctggaaagttctacagtaattaatatgcagctaactcctgttgccctcacaagagcatcagccttctagaatcggagctccggagtgtgaagattcagtattgatatgatatgtataccaaactccagccaacttactgccatttttcataatctgagtggctgccttgcttatcctaagctgtggttgcagaaaccgtggccatttatataagctataacatcaaatcagggaaaaatgaggaaaaaaaatagattctgaaccatttattgttgaataagtagagaaaatcatcaataaatatttattacattctgacagggtgtgtggcattgtgttctatgccagagtgacaaagttgattcacccctttttggggaccttaatatattttttaagggatgtgcctatgcattgatgcctgaaaaatatgtataaagaaatgaggttgactcttctgagcagttcatcttttccagaggtaagggtaggaggccaacttcagggtctgggtctgagcccgtgggcaagccctggccgagtgagctccaatgctaactcatgtgccgatctctagagcagtgggaaactaccccgctgcaccaaatcaagtagcttcaccttgtgtatgcaggccccaagttattttttagcaatcttacgagtgaaatgttctggtgggttgaaaaacgttcttattttaaagaaaggttgtgctcgctacactgctggtgtgtgcattctgagacctcttgtattcaatctgtgaaggatatgtgtattaatccgtacacccgtatagcctcaatatttgtctgaagacacttaaattctgacccataaaggaaagttctagaagcaatattttcacttatttaacattctccaaacaacatcaagcattgatacacactgaagagtgcgtttattttttgtatcactctaagtatgttggaatatgcaaggactgtggttcaaattagaatgtataaggcatattataatttagttcatactgaataagaaattaacagaacattgttcggttcacacgttccaaactttgagtgatttctggagttagacatagattttctattttgttttaatttgtcaaggtatttttcttcccttcatgaactttaggtacacataacttatgtcatttatttatggtcttttatacctagtttgtaaaattgtaaaatagcaaactaaatgcaaagagtttgcatttgaaaataataaagtagttgccgtatacaaccctgc

SEQ ID NO: 5544 - DNA, 1677 bp, Homo sapiens
agtacccaagcgagccatttaacatggcggaggatgtttcctcagcggccccgagcccgcggggctgtgcggatggtagggatgccgaccctactgaggagcagatggcagaaacagagagaaacgacgaggagcagttcgaatgccaggaactgctcgagtgccaggtgcaggtgggggcccccgaggaggaggaggaggaggaggaggacgcgggcctggtggccgaggccgaggccgtggctgccggctggatgctcgatttcctctgcctctctctttgccgagctttccgcgacggccgctccgaggacttccgcaggacccgcaacagcgcagaggctattattcatggactatccagtctaacagcttgccagttgagaacgatatacatatgtcagtttttgacaagaattgcagcaggaaaaacccttgatgcacagtttgaaaatgatgaacgaattacacccttggaatcagccctgatgatttggggttcaattgaaaaggaacatgacaaacttcatgaagaaatacagaatttaattaaaattcaggctatagctgtttgtatggaaaatggcaactttaaagaagcagaagaagtctttgaaagaatatttggtgatccaaattctcatatgcctttcaaaagcaaattgcttatgataatctctcagaaagatacatttcattccttttttcaacacttcagctacaaccacatgatggagaaaattaagagttatgtgaattatgtgctaagtgaaaaatcatcaacctttctaatgaaggcagcggcaaaagtagtagaaagcaaaaggacaagaacaataacttctcaagataaacctagtggtaatgatgttgaaatggaaactgaagctaatttggatacaagaaaaagtgttagtgacaaacagtctgcggtaactgaatcctcagagggtacagtatccttattgaggtctcacaagaatcttttcttatctaagttgcaacatggaacccagcaacaagaccttaataagaaagaaagaagagtaggaactcctcaaagtacaaaaaagaaaaaagaaagcagaagagccactgaaagcagaatacctgtttcaaagagtcagccggtaactcctgaaaaacatcgagctagaaaaagacaggcatggctttgggaagaagacaagaatttgagatctggcgtgaggaaatatggagagggaaactggtctaaaatactgttgcattataaattcaacaaccggacaagtgtcatgttaaaagacagatggaggaccatgaagaaactaaaactgatttcctcagacagcgaagactgattgtgtttgtaaaagcttgatgaaaggacagttaagtattttgatcactgcattttgtttgaaacttgtgtcattgatgtaatttaaaacttttgtttaaagcattacagtatttttctgtgaccatcaattaatgagggtttgtgctaccagagttaaagcatatgctatcattgtattctttaagaaccttattttgataaaatgtaaatttgttgaaccctgccacatttagtatccccacccccaaatcctgttccaatgaaaaaattaaaacctgatacgaaaaaaaaaaaattccagttaacctattttgtgtctgtaggctgacctc

SEQ ID NO: 5545 - DNA, 697 bp, Homo sapiens
cctgaagacatctaccccagcaaccctactgatgatgacgtgagcagcggctcctccagtgaaaggagcagcacttcaggaggttacatcttttacaccttttctactgtacaccccatcccagacgaagacagtccctggatcaccgacagcacagacagaatccctgctaccaatatggactccagtcatagtataacgcttcagcctactgcaaatccaaacacaggtttggtggaagatttggacaggacaggacctctttcaatgacaacgcagcagagtaattctcagagcttctctacatcacatgaaggcttggaagaagataaagaccatccaacaacttctactctgacatcaagcagagaccaagacacattccaccccagtggggggtcccataccactcatggatctgaatcagatggacactcacatgggagtcaagaaggtggagcaaacacaacctctggtcctataaggacaccccaaattccagaatggctgatcatcttggcatccctcttggccttggctttgattcttgcagtttgcattgcagtcaacagtcgaagaaggtgtgggcagaagaaaaagctagtgatcaacagtggcaatggagctgtggaggacagaaagccaagtggactcaacggagaggccagcaagtctcaggaaatggtgcatttggtga

SEQ ID NO: 5546 - DNA, 4332 bp, Homo sapiens
cctccaccggccaaggtccccgccgctgcatccctcgcggcttccgctgcgctccgggccggagccgagccgcctgcgctgccacagcagccgcctccacacactcgcagacgctcacacgctctccctccctgttcccccgccccctccccagctccttgatctctgggtctgttttattactcctggtgcgagtcccgcggactccgcggcccgctatttgtcatcagctcgctctccattggcggggagcggagagcagcgaagaagggggtggggaggggaggggaagggaagggggtggaaactgcctggagccgtttctccgcgccgctgttggtgctgccgctgcctcctcctcctccgccgccgccgccgccgccgccgcctcctccggctcttcgctcggcccctctccgcctccatgtgccggatagcgggagcgctgcggaccctgctgccgctgctggcggccctgcttcaggcgtctgtagaggcttctggtgaaatcgcattatgcaagactggatttcctgaagatgtttacagtgcagtcttatcgaaggatgtgcatgaaggacagcctcttctcaatgtgaagtttagcaactgcaatggaaaaagaaaagtacaatatgagagcagtgagcctgcagattttaaggtggatgaagatggcatggtgtatgccgtgagaagctttccactctcttctgagcatgccaagttcctgatatatgcccaagacaaagagacccaggaaaagtggcaagtggcagtaaaattgagcctgaagccaaccttaactgaggagtcagtgaaggagtcagcagaagttgaagaaatagtgttcccaagacaattcagtaagcacagtggccacctacaaaggcagaagagagactgggtcatccctccaatcaacttgccagaaaactccaggggaccttttcctcaagagcttgtcaggatcaggtctgatagagataaaaacctttcactgcggtacagtgtaactgggccaggagctgaccagcctccaactggtatcttcattatcaaccccatctcgggtcagctgtcggtgacaaagcccctggatcgcgagcagatagcccggtttcatttgagggcacatgcagtagatattaatggaaatcaagtggagaaccccattgacattgtcatcaatgttattgacatgaatgacaacagacctgagttcttacaccaggtttggaatgggacagttcctgagggatcaaagcctggaacatatgtgatgaccgtaacagcaattgatgctgacgatcccaatgccctcaatgggatgttgaggtacagaatcgtgtctcaggctccaagcaccccttcacccaacatgtttacaatcaacaatgagactggtgacatcatcacagtggcagctggacttgatcgagaaaaagtgcaacagtatacgttaataattcaagctacagacatggaaggcaatcccacatatggcctttcaaacacagccacggccgtcatcacagtgacagatgtcaatgacaatcctccagagtttactgccatgacgttttatggtgaagttcctgagaacagggtagacatcatagtagctaatctaactgtgaccgataaggatcaaccccatacaccagcctggaacgcagtgtacagaatcagtggcggagatcctactggacggttcgccatccagaccgacccaaacagcaacgacgggttagtcaccgtggtcaaaccaatcgactttgaaacaaataggatgtttgtccttactgttgctgcagaaaatcaagtgccattagccaagggaattcagcacccccctcagtcaactgcaaccgtgtctgttacagttattgacgtaaatgaaaacccttattttgcccccaatcctaagatcattcgccaagaagaagggcttcatgccggtaccatgttgacaacattcactgctcaggacccagatcgatatatgcagcaaaatattagatacactaaattatctgatcctgccaattggctaaaaatagatcctgtgaatggacaaataactacaattgctgttttggaccgagaatcaccaaatgtgaaaaacaatatatataatgctactttccttgcttctgacaatggaattcctcctatgagtggaacaggaacgctgcagatctatttacttgatattaatgacaatgcccctcaagtgttacctcaagaggcagagacttgcgaaactccagaccccaattcaattaatattacagcacttgattatgacattgatccaaatgctggaccatttgcttttgatcttcctttatctccagtgactattaagagaaattggaccatcactcggcttaatggtgattttgctcagcttaatttaaagataaaatttcttgaagctggtatctatgaagttcccatcataatcacagattcgggtaatcctcccaaatcaaatatttccatcctgcgtgtgaaggtttgccagtgtgactccaacggggactgcacagatgtggacaggattgtgggtgcggggcttggcaccggtgccatcattgccatcctgctctgcatcatcatcctgcttatccttgtgctgatgtttgtggtatggatgaaacgccgggataaagaacgccaggccaaacaacttttaattgatccagaagatgatgtaagagataatattttaaaatatgatgaagaaggtggaggagaagaagaccaggactatgacttgagccagctgcagcagcctgacactgtggagcctgatgccatcaagcctgtgggaatccgacgaatggatgaaagacccatccacgccgagccccagtatccggtccgatctgcagccccacaccctggagacattggggacttcattaatgagggccttaaagcggctgacaatgaccccacagctccaccatatgactccctgttagtgtttgactatgaaggcagtggctccactgctgggtccttgagctcccttaattcctcaagtagtggtggtgagcaggactatgattacctgaacgactgggggccacggttcaagaaacttgctgacatgtatggtggaggtgatgactgaacttcagggtgaacttggtttttggacaagtacaaacaatttcaactgatattcccaaaaagcattcagaagctaggctttaactttgtagtctactagcacagtgcttgctggaggctttggcataggctgcaaaccaatttgggctcagagggaatatcagtgatccatactgtttggaaaaacactgagctcagttacacttgaattttacagtacagaagcactgggattttatgtgcctttttgtacctttttcagattggaattagttttctgtttaaggctttaatggtactgatttctgaaacgataagtaaaagacaaaatattttgtggtgggagcagtaagttaaaccatgatatgcttcaacacgcttttgttacattgcatttgcttttattaaaatacaaaattaaacaaacaaaaaaactcatggagcgattttattatcttgggggatgagaccatgagattggaaaatgtacattacttctagttttagactttagtttgtttttttttttttcactaaaatcttaaaacttactcagctggttgcaaataaagggagttttcatatcaccaatttgtagcaaaattgaattttttcataaactagaatgttagacacattttggtcttaatccatgtacacttttttatttctgtatttttccacttcactgtaaaaatagtatgtgtacataatgttttattggcatagtctatggagaagtgcagaaacttcagaacatgtgtatgtattatttggactatggattcaggttttttgcatgtttatatctttcgttatggataaagtatttacaaaacagtgacatttgattcaattgttgagctgtagttagaatactcaatttttaatttttttaatttttttattttttattttctttttggtttggggagggagaaaagttcttagcacaaatgttttacataatttgtaccaaaaaaaaaaaaaaaggaaaggaaagaaaggggtggcctgacactggtggcactactaagtgtgtgtttttttaaaaaaaaaatggaaaaaaaaaagcttttaaactggagagacttctgacaacagctttgcctctgtattgtgtaccagaatataaatgatacacctctgaccccagcgttctgaataaaatgctaattttggatctgg

SEQ ID NO: 5547 - DNA, 2445 bp, Homo sapiens
caggatgctgcccatcacagaccgcctgctgcacctcctggggctggagaagacggcgttccgcatatacgcggtgtccacccttctcctcttcctgctcttcttcctgttccgcctgctgctgcggttcctgaggctctgcaggagcttctacatcacctgccgccggctgcgctgcttcccccagcctccccggcgcaactggctgctgggccacctgggcatgtaccttccaaatgaggcgggccttcaagatgagaagaaggtactggacaacatgcaccatgtactcttggtatggatgggacctgtcctgccgctgttggttctggtgcaccctgattacatcaaaccccttttgggagcctcagctgccatcgcccccaaggatgacctcttctatggcttcctaaaaccttggctaggggatgggctgctgctcagcaaaggtgacaagtggagccggcaccgtcgcctgctgacacccgccttccactttgacatcctgaagccttacatgaagatcttcaaccagagcgctgacattatgcatgctaaatggcggcatctggcagagggctcagcggtctcccttgatatgtttgagcatatcagcctcatgaccctggacagtcttcagaaatgtgtcttcagctacaacagcaactgccaagagaagatgagtgattatatctccgctatcattgaactgagcgctctgtctgtccggcgccagtatcgcttgcaccactacctcgacttcatttactaccgctcggcggatgggcggaggttccggcaggcctgtgacatggtgcaccacttcaccactgaagtcatccaggaacggcggcgggcactgcgtcagcagggggccgaggcctggcttaaggccaagcaggggaagaccttggactttattgatgtgctgctcctggccagggatgaagatggaaaggaactgtcagacgaggatatccgagccgaagcagacaccttcatgtttgagggtcacgacacaacatccagtgggatctcttggatgctgttcaatttggcaaagtatccggaataccaggagaaatgccgagaagagattcaggaagtcatgaaaggccgggagctggaggagctggagtgggacgatctgactcagctgccctttacaactatgtgcattaaggagagcctgcgccagtacccacctgtcactcttgtctctcgccaatgcacggaggacatcaagctcccagatgggcgcatcatccccaaaggaatcatctgcttggtcagcatctatggaacccaccacaaccccacagtgtggcctgactccaaggtgtacaacccctaccgctttgacccggacaacccacagcagcgctctccactggcctatgtgcccttctctgcaggacccaggaattgcatcggacagagcttcgccatggccgagttgcgcgtggttgtggcactaacactgctacgtttccgcctgagcgtggaccgaacgcgcaaggtgcggcggaagccggagctcatactgcgcacggagaacgggctctggctcaaggtggagccgctgcctccgcgggcctgagcgtgggcgcgcccctgcggctcccgagggtccaggccccgcccccaaaggaccaggactcgccccaaagatcccgagggcataggccacccccctcgaagttcaggttcagctcctggatgaccaggcaccgctgttgagcagcctggtggtactggccacgcccctcaaggcaaggctcctccccttagggggcctgatcccgccccttgaggcttaggtcccgccccctgacttctcgcacctgtcctgtttgagggaccagggtcgaccctgcccccttgggctcaggccccgcccccaggatcctacggattgaggtcctcaggccacgcccctgcagatccaggtctccaggccttgcccactgagccttcagaggacctaagacccacctatgactcagggcccaccacaccccacccccccccaactggctgaacccctggcaggcttccaaactgaggaaagctggagcctgacgtcagagcttttaactcggacatcaccctcctgaggccctcagctcatacgggcagactgctcaggcgtgaggctggatcgtagggttcgaggctgcttgcttttgttgttgttttgtaaactcagacccttgtaagccccttccttcctcccttgcccaaagatcctttgctgagtgttctgtttttgcagaataaaagcaaaggatgcagacttaccccaccctccacccctagctcagccagatccttacacgtggagcccccagcatgggaatgaggggctctgcaactgagcgaagctgcgggctaggaggctggaaagccatttatcctaggacataaactcagattttgggggtc

SEQ ID NO: 5548 - DNA, 4023 bp, Homo sapiens; identical to SEQ ID NO: 1166

SEQ ID NO: 5549 - DNA, 3470 bp, Homo sapiens
ggccctgggacctttgcctattttctgattgataggctttgttttgtctttacctccttctttctggggaaaacttcagttttatcgcacgttccccttttccatatcttcatcttccctctacccagattgtgaagatggaaagggtccaacccctggaagagaatgtgggaaatgcagccaggccaagattcgagaggaacaagctattgctggtggcctctgtaattcagggactggggctgctcctgtgcttcacctacatctgcctgcacttctctgctcttcaggtatcacatcggtatcctcgaattcaaagtatcaaagtacaatttaccgaatataagaaggagaaaggtttcatcctcacttcccaaaaggaggatgaaatcatgaaggtgcagaacaactcagtcatcatcaactgtgatgggttttatctcatctccctgaagggctacttctcccaggaagtcaacattagccttcattaccagaaggatgaggagcccctcttccaactgaagaaggtcaggtctgtcaactccttgatggtggcctctctgacttacaaagacaaagtctacttgaatgtgaccactgacaatacctccctggatgacttccatgtgaatggcggagaactgattcttatccatcaaaatcctggtgaattctgtgtcctttgaggggctgatggcaatatctaaaaccaggcaccagcatgaacaccaagctgggggtggacagggcatggattcttcattgcaagtgaaggagcctcccagctcagccacgtgggatgtgacaagaagcagatcctggccctcccgcccccacccctcagggatatttaaaacttattttatataccagttaatcttatttatccttatattttctaaattgcctagccgtcacaccccaagattgccttgagcctactaggcacctttgtgagaaagaaaaaatagatgcctcttcttcaagatgcattgtttctattggtcaggcaattgtcataataaacttatgtcattgaaaacggtacctgactaccatttgctggaaatttgacatgtgtgtggcattatcaaaatgaagaggagcaaggagtgaaggagtggggttatgaatctgccaaaggtggtatgaaccaacccctggaagccaaagcggcctctccaaggttaaattgattgcagtttgcatattgcctaaatttaaactttctcatttggtgggggttcaaaagaagaatcagcttgtgaaaaatcaggacttgaagagagccgtctaagaaataccacgtgctttttttctttaccattttgctttcccagcctccaaacatagttaatagaaatttcccttcaaagaactgtctggggatgtgatgctttgaaaaatctaatcagtgacttaagagagattttcttgtatacagggagagtgagataacttattgtgaagggttagctttactgtacaggatagcagggaactggacatctcagggtaaaagtcagtacggattttaatagcctggggaggaaaacacattctttgccacagacaggcaaagcaacacatgctcatcctcctgcctatgctgagatacgcactcagctccatgtcttgtacacacagaaacattgctggtttcaagaaatgaggtgatcctattatcaaattcaatctgatgtcaaatagcactaagaagttattgtgccttatgaaaaataatgatctctgtctagaaataccatagaccatatatagtctcacattgataattgaaactagaagggtctataatcagcctatgccagggcttcaatggaatagtatccccttatgtttagttgaaatgtccccttaacttgatataatgtgttatgcttatggcgctgtggacaatctgatttttcatgtcaactttccagatgatttgtaacttctctgtgccaaaccttttataaacataaatttttgagatatgtattttaaaattgtagcacatgtttccctgacattttcaatagaggatacaacatcacagaatctttctggatgattctgtgttatcaaggaattgtactgtgctacaattatctctagaatctccagaaaggtggagggctgttcgcccttacactaaatggtctcagttggatttttttttcctgttttctatttcctcttaagtacaccttcaactatattcccatccctctattttaatctgttatgaaggaaggtaaataaaaatgctaaatagaagaaattgtaggtaaggtaagaggaatcaagttctgagtggctgccaaggcactcacagaatcataatcatggctaaatatttatggagggcctactgtggaccaggcactgggctaaatacttacatttacaagaatcattctgagacagatattcaatgatatctggcttcactactcagaagattgtgtgtgtgtttgtgtgtgtgtgtgtgtgtgtatttcactttttgttattgaccatgttctgcaaaattgcagttactcagtgagtgatatccgaaaaagtaaacgtttatgactataggtaatatttaagaaaatgcatggttcatttttaagtttggaatttttatctatatttctcacagatgtgcagtgcacatgcaggcctaagtatatgttgtgtgtgttgtttgtctttgatgtcatggtcccctctcttaggtgctcactcgctttgggtgcacctggcctgctcttcccatgttggcctctgcaaccacacagggatatttctgctatgcaccagcctcactccaccttccttccatcaaaaatatgtgtgtgtgtctcagtccctgtaagtcatgtccttcacagggagaattaacccttcgatatacatggcagagttttgtgggaaaagaattgaatgaaaagtcaggagatcagaattttaaatttgacttagccactaactagccatgtaaccttgggaaagtcatttcccatttctgggtcttgcttttctttctgttaaatgagaggaatgttaaatatctaacagtttagaatcttatgcttacagtgttatctgtgaatgcacatattaaatgtctatgttcttgttgctatgagtcaaggagtgtaaccttctcctttactatgttgaatgtatttttttctggacaagcttacatcttcctcagccatctttgtgagtccttcaagagcagttatcaattgttagttagatattttctatttagagaatgcttaagggattccaatcccgatccaaatcataatttgttcttaagtatactgggcaggtcccctattttaagtcataattttgtatttagtgctttcctggctctcagagagtattaatattgatattaataatatagttaatagtaatattgctatttacatggaaacaaataaaagatctcagaattc

SEQ ID NO: 5550 - DNA, 2990 bp, Homo sapiens
cgtaaaccgggaagcggatcgcgtggagtgaaagtcaccgcagcggagatggacaaaccatgtgggtgccctccaggtgtgtgcgaccatgaaatgggagactagcaggacccacgttggccaaccgtggacctggtccctccagtaggagtcgtgagccagctgaatttgaatgcaaagatggagcaagggccgactggagtcacactgacatccacccccataacatggggacagatcaagaaaacaaagcaggaagctgagaaaatgctggagcatccatgtgcttggccatgttagcagtagtgtcctgtgaggattgatttccaaaaactcctgttacatgaggaagacaccaagaagagcaaagaaaaggagccagggtggctcttcctcagctatctcttccaaatgcatgacaaggaagttctcatcaagaaggcaaggcaatacagaagtgttccacacagggacattgcaaagacaagcaagtcatcacactggagatttttccttccaggaaattgagaaagattttcaggactttgagtttcagtggcaagaagatgaaagaaatggccatgaagcactcatgacagagataaaaaagttgacaggtaatacagactgatatgatcaaaggcatgctggaaacaaacctattaaagatcagcttggatcaagctttcattcacatctgcctgaactgcatatattgcagagcaaagggaaaattgatagtcaagatgagaagtctgtcaatgatgcttcctcagtttcagcatcccaaagaatttcttgtattcctaaaacccatatttctaataagtatgggaataatttcctccaggaagcacacatgagagaaaaatctttccaatgtaatgagagtggcaaagcctttaattgtagctcactgttaaaaaaatgtcagataatccatttaggagagaaaaaatataaatgtgatatatgtggcaaggtctttaatcagaagcgataccttgcataccatcatagatgtcacactggtgagaaaccttacaagtgtaatcagtgtggcaagaccttcagttacaagtcatcccttgtaattcacaaggcaattcatactggagagaaacctcacaagtgtaatgaatgtggcaaggtttttaatcaaaaagcatatcttgcaagtcatcatagacttcatactggagagaaaccttacaaatgtgaagaatgtgacaaagtttttagtcgctaatcacaccttgaaagacataggagaattcatactggagagaaaccgtacaaatgtaaggtttgtgacaaggctttcagacgtgattcacacctggcacaacatattgtaattcacactggagagaaaccttacaagtgtaatgagtgtggcaagacctttgttcaaaattcatctcttgtaatgcataaggtcattcatactggagagaaatgttacaagtgtaatgaatgtggcaaggtttttaatcacaaatcaaaccttgcatgtcatcatagacttcatactggagagaaaccttacaagtgtaatgaatgtggcaaggtttttaattgaaaatcaaaccttgaacatcatcatagagttcatatcggagaaaaaccttacaaatgtgaagaatgtgacaaagttttcaatttcaattcacgccttgaaatacataggagagttcatactggagagaaaccatagaaatgtaaggtttgtgacaaggcattcgggtgtgattcacacctggcacaacatactagaattcacactggagagaaaccgtgcaagtgtgatgagtgtgacagagccttcagtggtcagtcaacacttattcaccatcaagcaatccatgtcatagggaaactttactaatgtaatgattgtcacaaagtcctcagtaatgctacaaccattgcaaattattggagaatgcataatgaagtgagaacttacaagtgttataaatgtggcaaatttttcagacttcgttcataccttgcagtttatcagcgaactcatactggagagaaaccttacaaatgtgatgattgtggcaaggtcttcagtcaagcttcatcttatgcaaaacacaggtgaattcatacaagaaagaaacctcacaagggtgatgattgtgtcaaagcctttatttcaggttcatgcctcattacacatcagagaatccatactagacagagatcttacaaaagtcatatgtgtggcaagatctttagtctgaggtcactccttgcaggacatcaggaaattcatttttgaggtaataatttcaaatgcaatgagtatagcaaaccatcaagcacaattgatgttagattcaaatcagcattgagttcagtttgagttgacttaacattgagttcaagtatttgttgagattaaagtgtttatgttaagaggattaggccaggtgcggtggctcacacctgtaatcccagcactttgggaggccaagacaggtagatcacttgagatcaggagtttgagagcagcctggccaacagaggtgagcacctttcccagtctgttttttgtttcttcaacaaaaactgatagagatttttatgggtattgtgttgaatcaaaatcacattgggttatgtaatcatttaacagtattaatttttccaaaacatcaatatgggttatatctttatatatgtttttaatcattttgatcaatgtttgtagatttcaatgtatgaatttctcacttctttccatttattcctatttcttactttaagttctctagcaaatggaagtgtttttaaattttcatttaaaattgtttattgttaatgtatgaaaattcaacgaatttttggtgctgatattgtattgtgcaaatctactgatgtgtttattagtcacagtagtattttggttgactctttgtgattttctacacagaagatcatgtcatctacaaaaaatataattttactttttctga

SEQ ID NO: 5551 - DNA, 4324 bp, Homo sapiens
atctctcgtcctcttcctgggctaggccgccccaggcgcggcccctgcgactcctggcacggccccgtgctcggctgccgccctggcgcgcgccacactgtcgtccccggacgggcgcggaccggctcggccggggcgccggcggctggggaggggtcgctggccccggggccgcgcatgcgccgccaccaacttggggctgtcagtggagggcgagtgctggttctcaggggaggcgacgcccttcggggccaacgggcctcgagccgaggcagcagtgggaacgactcatcctttttccagccctggggcgtggctggggtcggggtcggggtcggggccggtgggggccccgcccccgtctcctggcctgcccccttcatgggccgcgatgatggcggccctgtacccgagcacggacctctcgggcgcctcctcctcctccctgccttcctctccatcctcttcctcgccgaacgaggtgatggcgctgaaggatgtgcgggaggtgaaggaggagaatacgctgaatgagaagcttttcttgctggcgtgcgacaagggtgactattatatggttaaaaagattttggaggaaaacagttcaggtgacttgaacataaattgcgtagatgtgcttgggagaaatgctgttaccataactattgaaaacgaaaacttggatatactgcagcttcttttggactacggttgtcagaaactaatggaacgaattcagaatcctgagtattcaacaactatggatgttgcacctgtcattttagctgctcatcgtaacaactatgaaattcttacaatgctcttaaaacaggatgtatctctacccaagccccatgcagttggctgtgaatgcacattgtgttctgcaaaaaacaaaaaggatagcctccggcattccaggtttcgtcttgatatatatcgatgtttggccagtccagctctaataatgttaacagaggaggatccaattctgagagcatttgaacttagtgctgatttaaaagaactaagtcttgtggaggtggaattcaggaatgattatgaggaactagcccggcaatgtaaaatgtttgctaaggatttacttgcacaagcccggaattctcgtgaattggaagttattctaaaccatacgtctagtgacgagcctcttgacaaacggggattattagaagaaagaatgaatttaagtcgtctaaaacttgctatcaaatataaccagaaagagtttgtctcccagtctaactgccagcagttcctgaacactgtttggtttggacagatgtcgggttaccgacgcaagcccacctgtaagaagataatgactgttttgacagtaggcatcttttggccagttttgtcactttgttatttgatagctcccaaatctcagtttggcagaatcattcacacaccttttatgaaatttatcattcatggagcatcatatttcacatttctgctgttgcttaatctatactctcttgtctacaatgaggataagaaaaacacaatggggccagcccttgaaagaatagactatcttcttattctgtggattattgggatgatttggtcagacattaaaagactctggtatgaagggttggaagactttttagaagaatctcgtaatcaactcagttttgtcatgaattctctttatttggcaacctttgccctcaaagtggttgctcacaacaagtttcatgattttgctgatcggaaggattgggatgcattccatcctacactggtggcagaagggctttttgcatttgcaaatgttctaagttatcttcgtctcttttttatgtatacaaccagctctatcttgggtccattacagatttcaatgggacagatgttacaagattttggaaaatttcttgggatgtttcttcttgttttgttttctttcacaattggactgacacaactgtatgataaaggatatacttcaaaggagcagaaggactgtgtaggcatcttctgtgaacagcaaagcaatgataccttccattcgttcattggcacctgctttgctttgttctggtatattttctccttagcgcatgtggcaatctttgtcacaagatttagctatggagaagaactgcagtcctttgtgggagctgtcattgttggtacatacaatgtcgtggttgtgattgtgcttaccaaactgctggtggcaatgcttcataaaagctttcagttgatagcaaatcatgaagacaaagaatggaagtttgctcgagcaaaattatggcttagctactttgatgacaaatgtacgttacctccacctttcaacatcattccctcaccaaagactatctgctatatgattagtagcctcagtaagtggatttgctctcatacatcaaaaggcaaggtcaaacggcaaaacagtttaaaggaatggaggaatttgaaacagaagagagatgaaaactatcaaaaagtgatgtgctgcctagtgcatcgttacttgacttccatgagacagaagatgcaaagtacagatcaggcaactgtggaaaatctaaacgaactgcgccaagatctgtcaaaattccgaaatgaaataagggatttacttggctttcggacttctaaatatgctatgttttatccaagaaattaaccattttctaaatcatggagcgaataattttcaataacagatccaaaagactatattgcataacttgcaatgaaattaatgagatatatattgaaataaagaattatgtaaaagccattctttaaaatatttatagcataaatatatgttatgtaaagtgtgtatatagaattagttttttaaaccttctgttagtggctttttgcagaagcaaaacagattaagtagatagattttgttagcatgctgcttggttttcttacttagtgctttaaaatgtttttttttatgtttaagaggggcagttataaatggacacattgcccagaatgttttgtaaaatgaagaccagcaaatgtaggctgatctccttcacaggatacacttgaaatatagaagttatgttttaaatatctctgttttaggagttcacatatagttcagcatttattgtttaggagtataattttattttatctaaaataatagtctattttttcttttgtattttgttataatcttaagcaacaaagaaaaaaccctaatatttgaatctatttatgtctttcaatttaaattcacttcagtttttgttattgtaatatatttacttttacatggttataatcactttatatttttaatgtttttttcacttaatattttatatatacatttccatgtattgatgtagttagtccacatttaaatttttatagaattatatagtttttgaaaaatacagtcagtagatgttttattttttagctattcagttatgtttataagtttgcatagctacttctcgacatttggtttgttttaatttttttgtatcataatagtcctatttttttttcaagttggagtgaatgtttttagttttaagatagataggagacacttttttatcacatgtagtcacaacctgttttgtttttgtaaaacataggaagtctctttaatgcaatgatttgttttatatttggactaaggttcttgagcttatctcccaaggtactttccataatttaacacagcttctataaaagtgacttcatgcttacttgtggatcattcttgctgcttaagatgaaaagcattggttttttaaaattagagaataaaatatgtatttaaatttttggtgtgttcacataaagggatgtagctaaaatgttttcataggctattatatattctcgcagcatttccagttaagaggatattaggtatataattctcttcttaaccgaatgtcagatggtcttacgccacagggtgcaggtaacccttggtctgtaagcaccaccgatccagggatcattgtctaaataggttactattgtttgtttcatcttgcttttgcatttttattttttaatttccaaattttaagtgttccctctttggggcaaattcttataaaaatgtttattgtaaagttatatattttgtctacgatgggattatgcacttcccaattgggattttacatctggatttttagtcattctaaaaaacacctaattattaaaacatttatagagtgcctactgtatgcatgagttgagttgcttctgaggtacattttgaatgacagcatattgtaagaaaaaaaaaggtgaataaaatttgacattagattataaa

SEQ ID NO: 5552 - DNA, 11612 bp, Homo sapiens
aacctctccgcgcgaagacggcttcagccctgcagggaaagaaaagtgcaatgattctggactgagacgcgcttgggcagaggctatgtaatcgtgtctgtgttgaggacttcgcttcgaggagggaagaggagggatcggctcgctcctccggcggcggcggcggcggcgactctgcaggcggagtttcgcggcggcggcaccagggttacgccagccccgcggggaggtctctccatccagcttctgcagcggcgaaagccccagcgcccgagcgcctgagccggcggggagcaagtaaagctagaccgatctccggggagccccggagtaggcgagcggcggccgccagctagttgagcgcaccccccgcccgccccagcggcgccgcggcgggcggcgtccaggcggcatggagaaggacggcctgtgccgcgctgaccagcagtacgaatgcgtggcggagatcggggagggcgcctatgggaaggtgttcaaggcccgcgacttgaagaacggaggccgtttcgtggcgttgaagcgcgtgcgggtgcagaccggcgaggagggcatgccgctctccaccatccgcgaggtggcggtgctgaggcacctggagaccttcgagcaccccaacgtggtcaggttgtttgatgtgtgcacagtgtcacgaacagacagagaaaccaaactaactttagtgtttgaacatgtcgatcaagacttgaccacttacttggataaagttccagagcctggagtgcccactgaaaccataaaggatatgatgtttcagcttctccgaggtctggactttcttcattcacaccgagtagtgcatcgcgatctaaaaccacagaacattctggtgaccagcagcggacaaataaaactcgctgacttcggccttgcccgcatctatagtttccagatggctctaacctcagtggtcgtcacgctgtggtacagagcacccgaagtcttgctccagtccagctacgccacccccgtggatctctggagtgttggctgcatatttgcagaaatgtttcgtagaaagcctctttttcgtggaagttcagatgttgatcaactaggaaaaatcttggacgtgattggactcccaggagaagaagactggcctagagatgttgcccttcccaggcaggcttttcattcaaaatctgcccaaccaattgagaagtttgtaacagatatcgatgaactaggcaaagacctacttctgaagtgtttgacatttaacccagccaaaagaatatctgcctacagtgccctgtctcacccatacttccaggacctggaaaggtgcaaagaaaacctggattcccacctgccgcccagccagaacacctcggagctgaatacagcctgaggcctcagcagccgccttaagctgatcctgcggagaacacccttggtggcttatgggtccccctcagcaagccctacagagctgtggaggattgctatctggaggccttccagctgctgtcttctggacaggctctgcttctccaaggaaaccgcctagtttactgttttgaaatcaatgcaagagtgattgcagctttatgttcatttgtttgtttgtttgtctgtttgtttcaagaacctggaaaaattccagaagaagagaagctgctgaccaattgtgctgccatttgatttttctaaccttgaatgctgccagtgtggagtgggtaatccaggcacagctgagttatgatgtaatctctctgcagctgccgggcctgatttggtacttttgagtgtgtgtgtgcatgtgtgtgtgtgtgtgtgtgtgtgtgtgtgtgtatgtgagagattctgtgatcttttaaagtgttactttttgtaaacgacaagaataattcaattttaaagactcaaggtggtcagtaaataacaggcatttgttcactgaaggtgattcaccaaaatagtcttctcaaattagaaagttaaccccatgtcctcagcatttcttttctggccaaaagcagtaaatttgctagcagtaaaagatgaagttttatacacacagcaaaaaggagaaaaaattctagtatattttaagagatgtgcatgcattctatttagtcttcagaatgctgaatttacttgttgtaagtctattttaaccttctgtatgacatcatgctttatcatttcttttggaaaatagcctgtaagctttttattacttgctataggtttagggagtgtacctcagatagattttaaaaaaaagaatagaaagcctttatttcctggtttgaaattcctttcttccctttttttgttgttgttattgttgtttgttgttgttattttgtttttgtttttaggaatttgtcagaaactctttcctgttttggtttggagagtagttctctctaactagagacaggagtggccttgaaattttcctcatctattacactgtactttctgccacacactgccttgttggcaaagtatccatcttgtctatctcccggcacttctgaaatatattgctaccattgtataactaataacagattgcttaagctgttcccatgcaccacctgtttgcttgctttcaatgaacctttcataaattcgcagtctcagcttatggtttatggcctcgattctgcaaacctaacagggtcacatatgttctctaatgcagtccttctacctggtgtttacttttgttacctaaataatgagtaggatcttgttttgttttatcaccagcacacagattgctataaactgttactttgtgaattacatttttatagaagatattttcagtgtctttacctgagggtatgtctttagctatgttttagggccatacatttactctatcaaatgatcttttctccatcccccaggctgtgcttatttctagtgccttgtgctcactcctgctctctacagagccagcctggcctgggcattgtaaacagcttttcctttttctcttactgttttctctacagtcctttatatttcataccatctctgccttataagtggtttagtgctcagttggctctagtaaccagaggacacagaaagtatcttttggaaagtttagccacctgtgctttctgactcagagtgcatgcaacagttagatcatgcaacagttagattatgtttagggttaggattttcaaagaatggaggttgctgcactcagaaaataattcagatcatgtttatgcattattaagttgtactgaattctttgcagcttaatgtgatatatgactatcttgaacaagagaaaaaactaggagatgtttctcctgaagagcttttggggttgggaactattcttttttaattgctgtactacttaacattgttctaattcagtagcttgaggaacaggaacattgttttctagagcaagataataaaggagatgggccatacaaatgttttctactttcgttgtgacaacattgattaggtgttgtcagtactataaatgcttgagatataatgaatccacagcattcaaggtcaggtctactcaaagtctcacatggaaaagtgagttctgcctttcctttgatcgagggtcaaaatacaaagacatttttgctagggcctacaaattgaatttaaaaactcactgcactgattcatctgagctttttggttagtattcatggctagagtgaacatagctttagtttttgctgttgtaaaagtgttttcataagttcactcaagaaaaatgcagctgttctgaactggaatttttcagcattctttagaattttaaatgagtagagagctcaacttttattcctagcatctgcttttgactcatttctaggcagtgcttatgaagaaaaattaaagcacaaacattctggcattcaatcgttggcagattatcttctgatgacacagaatgaaagggcatctcagcctctctgaactttgtaaaaatctgtccccagttcttccatcggtgtagttgttgcatttgagtgaatactctcttgatttatgtattttatgtccagattcgccatttctgaaatccagatccaacacaagcagtcttgccgttagggcattttgaagcagatagtagagtaagaacttagtgactacagcttattcttctgtaacatatggtttcaaacatctttgccaaaagctaagcagtggtgaactgaaaagggcatattgccccaaggttacactgaagcagctcatagcaagttaaaatattgtgacagatttgaaatcatgtttgaatttcatagtaggaccagtacaagaatgtccctgctagtttctgtttgatgtttggttctggcggctcaggcattttgggaactgttgcacagggtggagtcaaaacaacctacatataaaaagagaaaaagagaaacttgtccatttagctttcataagaaatcccatggcaaagggtaataaaaaggacctaatcttaaaaatacaatttctaagcacttgtaagaacccagtgggttggagcctcccactttgtccctcctttgaagtggatgggaactcaaggtgcaaagaacctgttttggaagaaagcttggggccatttcagccccctgtattctcatgattttctctcaggaagcacacactgtgaatggcagacttttcatttagccccaggtgacttactaaaaatagttgaaaattattcacctaagaatagaatctcagcattgtgttaaataaaaatgaaagctttagaaggcatgagatgttcctatcttaaataaagcatgtttcttttctatagagaaatgtatagtttgactctccagaatgtactatccatcttgatgagaaaactcttaaatagtaccaaacattttgaactttaaattatgtatttaaagtgagtgtttaagaaactgtagctgcttcttttacaagtggtgcctattaaagtcagtaatggccattattgttccattgtggaaattaaattatgtaagcttcctaatatcataaacatattaaaattcttctaaaatattgcttttcttttaagtgacaatttgactattcttatgataagcacatgagagtgtcttacattttccaaaagcaggctttaattgcatagttgagtctaggaaaaaataatgttaaaagtgaatatgccaccataattacttaattatgttagtatagaaactacagaatatttaccctggaaagaaaatattggaatgttattataaactcttagatatttatataattcaaaagaatgcatgtttcacattgtgacagataaagatgtatgatttctaaggctttaaaaattattcataaaacagtgggcaatagataaaggaaattctggagaaaatgaaggtatttaaagggtagtttcaaagctatatatattttgaaggatatattctttatgaacaaatatattgtaaaaatttatactaaggtcatctggtaactgtgggattaatatggtcgaaaacaaatgttatggagaagctgtcccaagcaaactaaattacctgtacttttttcccatttcaagggaagaggcaaccacatgaagcaatacttcttacacatgcctaagaacgttcattgaaaaaataaatttttaaaaggcatgtgtttcctatgccaccaatacttttgaaaaattgtgaaccttacccaaaaccatttatcatgtccattaagtatatttgggtatataattaggaagatatttacatgttccatctccacagtggaaaaacttattgaggctaccaaagtgtgccaagaaatgtaagtccttagagtaattagaaatgctgttttcctcaaaagcatgagaaactagcattttcatttcttatttactccctttctatatcaatgcaattcacaacccaattttaatacatccctatatctcaagcatttctatcttgtactttttcagaaaataaaccaaaaataatcctttggtctctctatcttctgacctttgtaagcaacagaaatgtaaaaacagaaggggtccaatttttacacgtttttttctcaagtagcctttctggggatttttattttcttaatgaagtgccaatcagcttttcaaaatgttttctatttctcagcatttccaggaagtgataacgtttagctaaatgagtagaagtggacttccttcaacatattgttaccttgtctagccttaggaagaaaacaagagccacctgaaaataaatacaggctcttttcgagcatctgctgaaatactgttacagcaatttgaagttgatgtggtaggaaaggaaggtgacttttcttgcaaaagtctttctaaacattcacactgtcctaagagatgagctttcttgttttattccggtatattccacaaggtggcacttttagagaaaaacaaatctgatgaagactaaagaggtacttctaaaagagatttcattctaactttatttttctgcgcatatttaactctttcctagcacttgttttttgggatgattaatagtctctataatgttctgtaacttcaatattttacttgttacctaggttctgaacaattgtctgcaaataaattgttcttaaggatggataatacacccattttgatcatttaagtaaagaaagcctagtcattcattcagtcaagaaaaaatttttgaagtacccagttaccttacttttctagattaaaacaggcttagttactaaaaaggcagtcctcatctgtgaacaggatagtttcgttagaagtataaaactcctttagtggccccagttaaaacacacataccctctctgctgctttcaaattccctagcatggtggcctttcaacattgattaaattttaaaatcctaatttaaagatcaggtgagcaaaatgagtagcacatcagtaattcagtagacaaaacttttgtctgaaaaattgctgtattgaaacagagccctaaaataccaaaagaccaggtaattttaacatttgtggaatcacaaatgtaaattcataagaagctctaattaaaaaaaaaaagtctgaagtatatgagcataacaacttaggagtgtgtctacatacttaacttttgaagttttttggcaactttatatactttttttaaatttacaagtctacttaaagacttcttataccccaaatgattaagttaattttagaggtcacctttctcacagcagtgtcacttgaaatttagtagggaaggatattgcagtatttttcagtttccttagcacagcaccacagaaagcagcttattccttttgagtggcagacactcgacggtgcctgcccaactttcctcctgagtggcaagcagatgagtctcagtaattcatactgaaccaaaatgccacatacactaggggcagtcagaaactggctgagaaatcccccgcctcattcgcccctctgctcccaggaactagagtccagttaaagcccctatgcgaaaggccgaattccaccccagggtttgttataacagtggccagtctgaaccccatttgctcgtgctcaaaacttgattcccacttgaaagccttccgggcgcgctgcctcgttgccccgcccctttggcaggagagaggcagtgggcgaggccgggctggggccccgcctcccactcacctgccggtgcctgaaattatgtgcggccccgcgggctgctttccgaggtcagagtgccctgctgctgtctcagaggcatctgttctgcaaatcttaggaagaaaaatgtccctagtagcaaacgggtgtcttctgtgcataaataagtacaacacaattctccgaaagttcgggtaaaaagagatgcggtagcagctgccctgtgtgaagctgtctaccccgcatctctcaggcgctaagctcagtttttgtttttgtttttgtttttttaaagaaaagatgtataattgcaggaatttttttttatttttttattttccatcattctatatatgtgatggtgaaagatatgcctggaaaagttttgttttgaaaagtttattttctgcttcgtcttcagttggcaaaagctctcaattctttagcttccagtttcttttctctctttttctttgttaggtaattaaaggtatgtaaacaaattatctcatgtagcaggggattttcatgttgagaggaatcttccgtgtgagttgtttggtcacacaaataaccctttctcaattttaggagtttggattgtcaaatgtaggtttttctcaaagggggcatataactacatattgactgccaagaactatgactgtagcactaatcagcacacatagagccacacaattatttaatttctaactctctgtggtccctagaaaaattccgttgatgtgcttaggttaaagttctgaagatacccgttgtacccttacttgaaagtttctaatcttaagttttatgaaatgcaataatatgtatcagctagcaatatttctgtgatcaccaacaactctcagtttgatcttaaagtctgaataataaaacaaatcccagcagtaatacatttcttaaacctcacagtgcatgatatatcttttcattctgatcctgtgtttgcaaaaatatacacatgtatatcatagttcctcactttttattcatttgttttcctattacctgtagtaaatatattagttagtacatggaatttatagcatcagctacccccaggaacagcacctgacaggcgggggattttttttcaagttgttctacatttgcataaattatttctattattattcatgtatgttatttatttctgaatcacactagtcctgtgaaagtacaactgaaggcagaaagtgttaggattttgcatctaatgttcattatcatggtattgatggacctaagaaaataaaaattagactaagcccccaaataagctgcatgcatttgtaacatgattagtagatttgaatatatagatgtagtattttgggtatctaggtgttttatcattatgtaaaggaattaaagtaaaggactttgtagttgtttttattaaatatgcatatagtagagtgcaaaaatatagcaaaaataaaaactaaaggtagaaaagcattttagatatgccttaatttagaaactgtgccaggtggccctcggaatagatgccaggcagagaccagtgcctgggtggtgcctcctcttgtctgccctcatgaagaagcttccctcacgtgatgtagtgccctcgtaggtgtcatgtggagtagtgggaacaggcagtactgttgagaggagagcagtgtgagagtttttctgtagaagcagaactgtcagcttgtgccttgaggcttccagaacgtgtcagatggagaagtccaagtttccatgcttcaggcaacttagctgtgtacagaagcaatccagtgtggtaataaaaagcaaggattgcctgtataatttattataaaataaaagggattttaacaaccaacaattcccaacacctcaaaagcttgttgcattttttggtatttgaggtttttatctgaaggttaaagggcaagtgtttggtatagaagagcagtatgtgttaagaaaagaaaaatattggttcacgtagagtgcaaattagaactagaaagttttatacgattatcattttgagatgtgttaaagtaggttttcactgtaaaatgtattagtgtttctgcattgccatagggcctggttaaaactttctcttaggtttcaggaagactgtcacatacagtaagcttttttccttctgacttataatagaaaatgttttgaaagtaaaaaaaaaaaatctaatttggaaatttgacttgttagtttctgtgtttgaaatcatggttctagaaatgtagaaattgtgtatatcagatactcatctaggctgtgtgaaccagcccaagatgaccaacatccccacacctctacatctctgtcccctgtatctcttcctttctaccactaaagtgttccctgctaccatcctggcttgtccacatggtgctctccatcttcctccacatcatggaccacaggtgtgcctgtctaggcctggccaccactcccaacttgacctagccacattcatctagagatggttcctgatgctgggcacagactgtgctcatggcacccattagaaatgcctctagcatctttgtatgcatcttgatttttaaaccaagtcattgtacagagcattcagttttggctgtggtaccaagagaaaaactaatcaagaatataaaccacattccaggctgctgttttctctccatctacaggccacacttttactgtatttcttcatacttgaaattcattctgctattttcatatcagggtacagacttataagggtgcatgttccttaaaggtgcataattattcttattccgtttgcttatattgctacagaatgctctgttttggtgctttgagttctgcagacccaagaagcagtgtggaaattcactgcctgggacacagtcttataagaatgttggcaggtgactttgtatcagatgttgcttctcttttctctgtacacagattgagagttaccacagtggcctgtcgggtccaccctgtgggtgcagcacagctctctgaaagcaagaaccttcctacctattctaacgtttttgccctctaagaaaaatggcctcaggtatggtatagacatagcaagaggggaagggctgtctcactctagcaaccatccctccattacacacagaaagccctcttgaagcaaaagaagaagaaagaaagaaagcttatctctaaggctactgtcttcagaatgctctgagctgaatgctcttgctcctttcccaagaggcagatgaaaatatagccagtttatctatacccttcctatctgaggaggagaatagaaaagtagggtaaatatgtaacgtaaaatatgtcattcaaggaccaccaaaactttaagtaccctatcattaaaaatctggttttaaaagtagctcaagtaagggatgctttgtgacccagggtttctgaagtcagatagccattcttacctgccccttactctgacttattgggaaagggagaactgcagtggtgtttctgttgcagtggcaaaggtaacatgtcagaaaattcagagggttgcataccaataatcctttggaaactggatgtcttactgggtgctagaatgaaaatgtaggtatttattgtcagatgatgaagttcattgtttttttcaaaattggtgttgaaatatcactgtccaatgtgttcacttatgtgaaagctaaattgaatgaggcaaaaagagcaaatagtttgtatatttgtaataccttttgtatttcttacaataaaaatattggtagcaaataaaaataataaaaacaataactttaaactgctttctggagatgaattactctcctggctattttcttttttactttaatgtaaaatgagtataactgtagtgagtaaaattcattaaattccaagttttagcagaa

SEQ ID NO: 5553 - DNA, 6176 bp, Homo sapiens
gtttcagatttgggatattggtgtttctgttttggagaaattattctttttctttttaatttgaagaaaaatcatcagtcttggaatacagaagagaaactagaaatatacgtattttgtttcacatttgaacagtcattcttgaggaatactccatacctgagtagacagccatgtggccatcgcagctactaattttcatgatgctcttagctccaataattcatgctttcagccgtgccccaattccaatggctgtggtccgcagagagctatcctgtgagagctatcctatagagcttcgctgtccaggaacagacgtcatcatgatagaaagtgccaactatggcaggactgatgacaaaatttgtgactctgaccctgctcagatggagaatatccgatgttatctgccagatgcctataagattatgtctcaaagatgcaataacagaacccagtgtgcagtggtggcaggtcctgatgtttttccagacccgtgtccaggaacctataaataccttgaagtgcagtatgaatgtgtcccttacagagtagaccagaaagtttttctttgtcctggactactaaaaggagtataccagagtgaacatttgtttgagtccgaccaccaatctggggcgtggtgcaaagaccctctgcaggcatctgacaagatttattatatgccctggactccctacagaactgataccctgactgagtattcatccaaggatgacttcattgctggaagaccaactacaacctacaagctccctcacagggtggatggcacaggatttgtagtgtatgatggagctttgttcttcaacaaagagcgcaccaggaacatagtaaagtttgatttgcggactaggataaagagtggagaggctatcatagcaaatgccaattaccatgatacctccccttaccgatggggaggcaaatctgacatagacctggcagtagatgagaatgggctatgggtaatctatgcaacagaacaaaacaatggtaaaattgtcattagtcaattgaacccttacaccctacggatcgaaggaacatgggatactgcatatgataaaaggtcagcttccaatgcctttatgatttgtggaattctgtatgtggtcaaatctgtatatgaggatgatgacaatgaggctactggaaataagattgactacatttacaacactgaccaaagcaaggatagtttggtggatgtaccctttcctaattcataccagtacattgcagctgtggattacaaccccagggacaacctactttatgtatggaataactatcacgtcgtgaaatattctttggattttggacctctggatagtagatcagggcaggcacatcatggacaagtttcatacatttctccgccaattcaccttgactctgagctagaaagaccctctgttaaagatatctctaccacaggacctcttggcatgggaagcactaccaccagtaccacccttcggaccacaactttgagcccaggaaggagtaccaccccgtcagtgtcaggaagaagaaaccggagtactagtaccccatctccagctgtcgaggtacttgatgacatgaccacacaccttccatcagcatcgtcccaaatcccagctctcgaagagagctgtgaggctgtggaagcccgagaaatcatgtggtttaagactcgtcaaggacagatagcaaagcagccatgccctgcaggaactataggtgtatcaacttatctatgccttgctcctgatggaatttgggatccccaaggtccagatctcagcaactgttcttctccttgggtcaatcatataacacagaagttgaaatctggtgaaacagctgccaacattgctagagagctggctgaacagacaagaaatcacttgaatgctggggacatcacctactctgtccgggccatggaccagctggtaggcctcctagatgtacagcttcggaacttgaccccaggtggaaaagatagtgctgcccggagtttgaacaagcttcagaaaagagagcgctcttgcagagcctatgtccaggcaatggtcgagacagttaacaacctccttcagccacaagctttgaatgcatggagagacctgactacgagtgatcagctgcgtgcggccaccatgttgcttcatactgtggaggaaagtgcttttgtgctggctgataaccttttgaagactgacattgtcagggagaatacagacaatattaaattggaagttgcaagactgagcacagaaggaaacttagaagacctaaaatttccagaaaacatgggccatggaagcactatccagctgtctgcaaataccttaaagcaaaatggccgaaatggagagatcagagtggcctttgtcctgtataacaacttgggtccttatttatccacggagaatgccagtatgaagttgggaacggaagctttgtccacaaatcattctgttattgtcaattcccctgttattacggcagcaataaacaaagagttcagtaacaaggtttatttggctgatcctgtggtatttactgttaaacatatcaagcagtcagaggaaaatttcaaccctaactgttcattttggagctactccaagcgtacaatgacaggttattggtcaacacaaggctgtcggctcctgacaacaaataagacacatactacatgctcttgtaaccacctaacaaattttgcagtactgatggcacatgtggaagttaagcacagtgatgcggtccatgacctccttctggatgtgatcacgtgggttggaattttgctgtcccttgtttgtctcctgatttgcatcttcacattttgctttttccgggggctccagagtgaccgtaacaccatccacaagaacctctgcatcagtctctttgtagcagagctgctcttcctgattgggatcaaccgaactgaccaaccaattgcctgtgctgttttcgctgccctgttacatttcttcttcttggctgccttcacctggatgttcctggagggggtgcagctttatatcatgctggtggaggtttttgagagtgaacattcacgtaggaaatacttttatctggtcggctatgggatgcctgcactcattgtggctgtgtcagctgcagtagactacaggagttatggaacagataaagtatgttggctccgacttgacacctacttcatttggagttttataggaccagcaactttgataattatgcttaatgtaatcttccttgggattgctttatataaaatgtttcatcatactgctatactgaaacctgaatcaggctgtcttgataacatcaactatgaggataacagacccttcatcaagtcatgggttataggtgcaatagctcttctctgcctattaggattgacctgggcctttggactcatgtatattaatgaaagcacagtcatcatggcctatctcttcaccattttcaattctctacagggaatgtttatatttattttccattgtgtcctacagaagaaggtacgaaaagagtatgggaaatgcctgcgaacacattgctgtagtggcaaaagtacagagagttccattggttcagggaaaacatctggttctcgaactcctggacgctactccacaggctcacagagccgaatccgtagaatgtggaatgacacggttcgaaagcagtcagagtcttcctttattactggagacataaacagttcagcgtcactcaacagagagccctacagagagacaagtatgggagtaaagctaaacattgcatatcaaataggggcttctgaacaatgccagggatacaagtgtcatggatactctaccactgaatggtaaccatggcaatagttacagcattgccagcggcgaatacctgagcaactgtgtgcaaatcatagaccgtggctataaccataacgagaccgccctagagaaaaagattctgaaggaactcacttccaactatatcccttcttacctgaacaaccatgagcgctccagtgaacagaacaggaatctgatgaacaagctggtgaataaccttggcagtggaagggaagatgatgccattgtcctggatgatgccacctcgtttaaccacgaggagagtttgggcctggaactcattcatgaggaatctgatgctcctttgctgcccccaagagtatactccaccgagaaccaccagccacaccattataccagaaggcggatcccccaagaccacagtgagagctttttccctttgctaaccaacgagcacacagaagatctccagtcaccccatagagactctctctataccagcatgccgacactggctggtgtggccgccacagagagtgttaccaccagcacccagaccgaacccccaccggccaaatgtggtgatgccgaagatgtttactacaaaagcatgccaaacctaggctccagaaaccacgtccatcagctgcatacttactaccagctaggtcgcggcagcagtgatggatttatagttcctccaaacaaagatgggacccctcccgagggaagttcaaaaggaccggctcatttggtcactagtctatagaagatgacacagaaattggaaccaacaaaactgctaacaccttgttgactgttctgagttgatataagcagtggtaataatgtgtgtactcctaaatctttatgctgtcctctaaagacaaacacaaactctcagacttttttttttttaatgggatttttaggtcagcccaggggagaaagataactgctaaaattcccctgtaccccatcctttcttgtcctttccccttcagatggagacttcattatgttaatgaacaagatatgaagaaaatggcactcattgtggccttgttgaattatgttgtgtatgttttaacatctctgatgctgtgttactaaaattacaaggacctgctttttaaaaggccagaacaattgtctgaaattagtaacaatgctgcatctagattggagtgctgcacaaacaaacataagagcaaagcaaaactgtatcacatagggtttttggtcactcacaacctgaattcaccacagctggaatagctgtggaaaacaaaataaaacaacaaaattaataatgaaatggaggggaattctagaattatatgctaaatgcatattttatgatttgctgtattaactgatgataaaactaatggcagaaaaagaagttgagcaatttctatgtaatgtacagatactagcattgcacatatagtctgctttctgttcctccagaatttgagtcctgttaatgtagtagaaaaaaaaaaaagaaattttctttttcttttgtgctggtcttgcaagtttgtctaccagtaagagagcaaagtttccttcctttcttctctttcttcattttctttttttcttttttgccttttattcctttaaaatttcgcctggcaaaaaataaataaatggaactatcactttataagaatcattttctagtaatgcaaacaaattattttttacaaaaaaacaaaataaataaaattagacttccttccctcactatatatctttatgcagtcagaatatttccaacagtgttttttgcaaattagagcaggacaaacttttatgtttacagggcacgtctgttgtaatgcaaagcatatttggcaagcagttcatcaccaggacactagctatgattctagaagtcaaaaggtgtctatagaactagtggggcttctgcatgtgaaaaacggttttccataggcattaaagtgctgaatgctcagtctgatcaacaagtgggcacctgcactaccactttttagaggaaattcactccctcgtaagcattggaaggtcaaattattttgaagtgatttttttaaaaaaaagtcttctgtttattaacaggaaaatttatttatttgacaggattttgagtaatgtaggaatacaaaaggtaaattagcagcacatataatttttttttaatttatgatccattttgtatggtctcaaagttggatgacctcattactaatatttgttgtaaaagtgaaacttgtttgccaaccaataaacaactgattgagatttagaagatattgt

SEQ ID NO: 5554 - DNA, 5659 bp, Homo sapiens; identical to SEQ ID NO: 904

SEQ ID NO: 5555 - DNA, 9645 bp, Homo sapiens
ggtttgtaatgatagggcggcagcagcagcagcagcagcagtggtggaacgaggaggtggagaattgagagcacgatgcatacacaggtgtttctgagtagtaattagatcgctgtgaaggaaaaagcacacctttgagttttcacctgtgaacactatagcgctgagagagacagtctgaaagcagaggaagacatcgatcagtaacaccaagagacaccaaagttgaaagttttgttttctttccctctgttttatttttcccccgtgtgtccctactatggtcagaaagcctgttgtgtccaccatctccaaaggaggttacctgcagggaaatgttaacgggaggctgccttccctgggcaacaaggagccacctgggcaggagaaagtgcagctgaagaggaaagtcactttactgaggggagtctccattatcattggcaccatcattggagcaggaatcttcatctctcctaagggcgtgctccagaacacgggcagcgtgggcatgtctctgaccatctggacggtgtgtggggtcctgtcactatttggagctttgtcttatgctgaattgggaacaactataaagaaatctggaggtcattacacatatattttggaagtctttggtccattaccagcttttgtacgagtctgggtggaactcctcataatacgccctgcagctactgctgtgatatccctggcatttggacgctacattctggaaccattttttattcaatgtgaaatccctgaacttgcgatcaagctcattacagctgtgggcataactgtagtgatggtcctaaatagcatgagtgtcagctggagcgcccggatccagattttcttaaccttttgcaagctcacagcaattctgataattatagtccctggagttatgcagctaattaaaggtcaaacgcagaactttaaagacgccttttcaggaagagattcaagtattacgcggttgccactggctttttattatggaatgtatgcatatgctggctggttttacctcaactttgttactgaagaagtagaaaaccctgaaaaaaccattccccttgcaatatgtatatccatggccattgtcaccattggctatgtgctgacaaatgtggcctactttacgaccattaatgctgaggagctgctgctttcaaatgcagtggcagtgaccttttctgagcggctactgggaaatttctcattagcagttccgatctttgttgccctctcctgctttggctccatgaacggtggtgtgtttgctgtctccaggttattctatgttgcgtctcgagagggtcaccttccagaaatcctctccatgattcatgtccgcaagcacactcctctaccagctgttattgttttgcaccctttgacaatgataatgctcttctctggagacctcgacagtcttttgaatttcctcagttttgccaggtggctttttattgggctggcagttgctgggctgatttatcttcgatacaaatgcccagatatgcatcgtcctttcaaggtgccactgttcatcccagctttgttttccttcacatgcctcttcatggttgccctttccctctattcggacccatttagtacagggattggcttcgtcatcactctgactggagtccctgcgtattatctctttattatatgggacaagaaacccaggtggtttagaataatgtcggagaaaataaccagaacattacaaataatactggaagttgtaccagaagaagataagttatgaactaatggacttgagatcttggcaatctgcccaaggggagacacaaaatagggatttttacttcattttctgaaagtctagagaattacaactttggtgataaacaaaaggagtcagttatttttattcatatattttagcatattcgaactaatttctaagaaatttagttataactctatgtagttatagaaagtgaatatgcagttattctatgagtcgcacaattcttgagtctctgatacctacctattggggttaggagaaaagactagacaattactatgtggtcattctctacaacatatgttagcacggcaaagaaccttcaaattgaagactgagatttttctgtatatatgggttttgtaaagatggttttacacactatagatgtctatactgtgaaaagtgttttcaattctgaaaaaaagcatacatcatgattatggcaaagaggagagaaagaaatttattttacattgacattgcattgcttccccttagataccaatttagataacaaacactcatgctttaatggattatacccagagcactttgaacaaaggtcagtggggattgttgaatacattaaagaagagtttctaggggctactgtttatgagacacatccaggagttatgtttaagtaaaaatccttgagaatttattatgtcagatgttttttcattcattatcaggaagttttagttatctgtcatttttttttttcacatcagtttgatcaggaaagtgtataacacatcttagagcaagagttagtttggtattaaatcctcattagaacaaccacctgtttcactaataacttacccctgatgagtctatctaaacatatgcattttaagccttcaaattacattatcaacatgagagaaatcaccaacaaagaagatgttcaaaataatagtcccatatctgtaatcatatctacatgcaatgttagtaattctgaagttttttaaatttatggctatttttacacgatgatgaattttgacagtttgtgcattttctttatacattttatattcttctgttaaaatatctcttcagatgaaactgtccagattaattaggaaaaggcatatattaacataaaaattgcaaaagaaatgtcgctgtaaataagatttacaactgatgtttctagaaaatttccacttctatatctaggctttgtcagtaatttccacaccttaattatcattcaacttgcaaaagagacaactgataagaagaaaattgaaatgagaatctgtggataagtgtttgtgttcagaagatgttgttttgccagtattagaaaatactgtgagccgggcatggtggcttacatctgtaatcccagcactttgggaggctgagggggtggatcacctgaggtcgggagttctagaccagcctgaccaacatggagaaaccccatctctactaaaaatacaaaattagctgggcatggtggcacatgctggtaatctcagctattgaggaggctgaggcaggagaattgcttgaacccgggaggcggaggttgcagtgagccaagattgcaccactgtactccagcctgggtgacaaagtcagactccatctccaaaaaaaaaagattatatatatatatatatgtgtgtgtatgtgtgtgtgtgtgtgtgtgtgtatatatatatatatatatatacacacacacacacacactttttatatatatatatatatatatatagtggaacttacaaatgagagtaatataatgatgaaattttgaactgttatttataaacatctaaggtaaaatggttagtcatggccagagtatgtttcatcctttaatttttgtccatttgaaaataaggatttttgaaagaattataccaattaaaattattaaaggcaaacatagaattcataaaaaattgtccaaagtagaaatgatgacctataatttggagcatttccaattcagtaatttcaattttgctcttgaaaacatttaatatatatccaagactgacatttctttagctgaacctaacgtttgggtctctgagtgaatttataataactccttccttccttagcatagggttttcaaaatttgatttataattcctatttccagtaaatattgttcatttgtccacatctctccctatgatatgttgctggaggtaagaatttctttcatattcctattttttttttccccatagactaggctcatagaatttaaacaagcaaattttcctgagctttttcttgccaaatgaaagaagactggtaaattctcatagagaggtttgtgtagttcttggctcttcctggggttaatgtgcttatattcacagtggcaaattggtctcagactttaatttatttatttttgatttgaatttctctttaaaagtatcaatttaaaaggtaactagaattattctttctcattttcaaaagtgatttttgcattattaaatttccctgccattgtaatgccatttcacgcagaaaaaaagtcagccagtaattaagaaaaaaagtgatggagattaagtagtattttggcttatttttaggactcatcatgagaagacacagttcctttaatcaggaaattaatatccataattttcactcaaaattgcagtatgtaaagcagattctcaaaaactctcctgaacacttatttatatatatgtttttatataagtaaaatttttctcatatttttatacgatatgcacacacacacatacatgcacatactacttactacatgttctgtacttgtactttgtaccatgcatattcaaatgtttatatacataagtttattataacataaacagtaaaagtaatgaatactgtttaaaataactaatatagtattttttaatttttgtggggatggattctcaaatacttgtgattttaaaagattctaaagctaaaacacaacttgattttaaaaagaatgattctccttacacaattataaatatttgcagtaaatattttccttataatactgttttgaccccatttaaaaagtattagattatattcctttgatccaatgaaaactgaaccttataaatggttagctgaaagtagaccttattcttgtccttctttagaagagtaaagatttgtcctagggaagatggctgacttcggttcccaacatgcgtatgcatttagactgtagctcctcagccctgtggacacaaaatttggacagcttattaggttacgttagcaatgcatgacggtttctccaacactaagatattcacgttgaaacagatttcctgttcgtcttatgtgtctggtaaaattgtttccccaattacaatttgacatatcaatagagggttaacaagagtataattacataacagaattcctcatgaactgtaatcagtctacaggaaaatcattattttatcttgatttgcagatgaatatactgctaagaaagggagcaactctgacctttgttaaagttgatcttttgtaattgaggtataaggtatgaaaagataaaaaaccgaaggccagagaatcaggaaatgaaagatagtatggactgaaggtaacaatattttaatgttatgcaatatagtcagagaaatattaaaaattagttgtttgctgtgcataggtggatctcgcaggaagctaatgaaacctaagcttcagtgcctctcacttagacatgttccattcgaggtcctgaacctaactttgtattaggaattctgtactaattttgttgaagaagaccagcaaagttgtgtacacttctacccccacaaaatctgcattgtccatgtgagtaaagtaaaataattcctgttatttttttctgttagaaataagtatggaggatatgtttttaaaaatttatgagttaattgaaatatccatatataacaagtgactttctcacaatatatatgatgtgatatatagggagatagtttcactttcatcatattttatacgttgattctgaactatagaaaaataataaatgggattttaattatagctcttagttgggaaagaaatatagagagatgtgggatttgaatgcccatgaaagacattttattttacttgaatatattcttgcttcactttaccctccataatatgttgtacattagtgctgatcaagtttacagagttacattttgctttcctaaccattcagtcaggaattaaaatatggcattgtataacaactgggaagaagctcatagtggatataaattagagtagataatgggtcaccttgatagcctctgtttacattacttgtatatgggcaaaataattattacctatacgtgtatttaagcttaattttcatataaacagtatttttaatctatgttaaaatagataatatctaaaagtgtgatctctaggtagtccttagtttattagtactgtacttcaaaaagatttttaaataggtccggcacggtggctcatgcctgtaatcccagcactttgggaggctgaggcgggcgaatcacctgaggtcaggagttcgagatcagcctggccaacatggtgaaaccctgtctcaactaaaaatataaaaattagccgggcgtggtggcaggcgcctgtaatcccagctactcgggaggctgaggcaggagaatcacttgaacccaaggggcagaagctgcagttagccaagatcgcatcattgcactccagcctaggggacaagagcgcgagacttcatctcaaaaaaaaaaaaaaaaaaaaaaaaagatttttaaataatagctaaaggtatgctctctaggtcatccttagtttattagtactgtacttaaaaattattttttaatagtcaattttgggagataattatttctttccttatattttccaattagttggtgtctaaaaataaatgttttgtctaattttagatcaggtatacattcacaaaagcataaatcatagtctcacaggaaattcaccaattttccatatgtcgtgagataactgtcctttctacaacctcataacaatgaatttatataattacctagattttcttagtgtgaatctacccattagttttattttcttggtagttatttttttccctcctctctgttactattggccttaaaatacacagaggacggttacagtgtcctaatagctgttacatgtgtgtgtttcagcgtacttgaatcaagtgtacatttatagtaccaataaccgcctttacagctttacagttaacaattctctcacaaaactgtagagcattaggcatctgagagccatagagggccaactttgttccagagtgaacatgctttttttcctcaacatatacactactgattttttttaaaagtatgactttcaagtgaattaatgtattggttaggagaactgcttgctaagtccttattacctcttgttaaagcctcagaaggccgtgctgaaagccagaggggaaaaaaagagtaatgcacaggtatctcttttgcagtggtgactgtattttgagtaccttgtgtgacagggtattattacagcatcttgtgggaaaacctattaggcctttgcatgttaaagctgtataatttgttgggttgtgagtggtctgacttaaatgtgtattataaaatttagacatcaaattttcctactaactaactttattagatgcatacttggaagcacagtcatatcacactgggaggcaatgcaatgtggttacctggtcctaggtttgaactgtcttatttcaaaagatttctgaattaatttttccctagaatttctccttcattccaaagtacaaacatactttgaagaatgaaacagattgttcccatgaatgtatgctcatactcgactagaaacgatctatgttaaatgactgtgtatatgaattatttcaagtactaccccaaataactttcttattgctctgaaagaagaaaagcaatgtaaatcactatgattattgcacaaacaaccagaattctccaacaattttaagtaatctgatcctcttcttggagaaaattgttacctaatagtttttccttatgaatgttattactactggtataaatcaaatttctataaatttcctacttaagtcttaagaactgggttcttcctttgatgttattcatgttcagaaaggaaacaacactttactcttttaggacaattcctagaatctatagtagtatcaggatatattttgctttaaaatatattttggttattttgaatacagacattggctccaaattttcatctttgcacaatagtatgacttttcactagaacttctcaacatttgggaactttgcaaatatgagcatcatatgtgttaaggctgtatcatttaatgctatgagatacattgttttctccctatgccaaacaggtgaacaaacgtagttgttttttactgatactaaatgttggctacctgtgattttatagtatgcacatgtcagaaaaaggcaagacaaatggcctcttgtactgaatacttcggcaaacttattgggtcttcattttctgacagacaggatttgactcaatatttgtagagcttgcgtagaatggattacatggtagtgatgcactggtagaaatggtttttagttattgactcagaattcatctcaggatgaatcttttatgtctttttattgtaagcatatctgaatttactttataaagatggttttagaaagctttgtctaaaaatttggcctaggaatggtaacttcattttcagttgccaaggggtagaaaaataatatgtgtgttgttatgtttatgttaacatattattaggtactatctatgaatgtatttaaatatttttcatattctgtgacaagcatttataatttgcaacaagtggagtccatttagcccagtgggaaagtcttggaactcaggttacccttgaaggatatgctggcagccatctctttgatctgtgcttaaactgtaatttatagaccagctaaatccctaacttggatctggaatgcattagttatgaccttgtaccattcccagaatttcaggggcatcgtgggtttggtctagtgattgaaaacacaagaacagagagatccagctgaaaaagagtgatcctcaatatcctaactaactggtcctcaactcaagcagagtttcttcactctggcactgtgatcatgaaacttagtagaggggattgtgtgtattttatacaaatttaatacaatgtcttacattgataaaattcttaaagagcaaaactgcattttatttctgcatccacattccaatcatattagaactaagatatttatctatgaagatataaatggtgcagagagactttcatctgtggattgcgttgtttcttagggttcctagcactgatgcctgcacaagcatgtgatatgtgaaataaaatggattcttctatagctaaatgagttccctctggggagagttctggtactgcaatcacaatgccagatggtgtttatgggctatttgtgtaagtaagtggtaagatgctatgaagtaagtgtgtttgttttcatcttatggaaactcttgatgcatgtgcttttgtatggaataaattttggtgcaatatgatgtcattcaactttgcattgaattgaattttggttgtatttatatgtattatacctgtcacgcttctagttgcttcaaccattttataaccatttttgtacatattttacttgaaaatattttaaatggaaatttaaataaacatttgatagtttacataa

SEQ ID NO: 5556 - DNA, 1727 bp, Homo sapiens
cagacggacactgtgccggggcgagctgacaggagttcacggctgcgatagaacatggagatgtcatgggcgcgacagagcctggcggggataccagcagcgatgagttccacccgttcatcgaggcactgctgcctcacgtccgcgctttctcctacacctggttcaacctgcaggcgcggaagcgcaagtacttcaagaagcatgaaaagcggatgtcgaaggacgaggagcgggcggtgaaggacgagctgctgggcgagaagcccgagatcaagcagaagtgggcatcccggctgctggccaagctgcgcaaggacatccggcccgagttccgcgaggacttcgtgctgaccatcacgggcaagaagcccccctgctgcgtgctctccaaccccgaccagaagggcaagatccggcggattgactgcctgcgccaggctgacaaggtgtggcggctggacctggtcatggtgattttgtttaaggggatccccctggaaagtactgatggggagcggctctacaagtcgcctcagtgctcgaaccccggcctgtgcgtccagccacatcacattggagtcacaatcaaagaactggatctttatctggcttactttgtccacactccggaatccggacaatcagatagttcaaaccagcaaggagatgcggacatcaaaccactgcccaacgggcacttaagtttccaggactgttttgtgacttccggggtctggaatgtgacggagctggtgagagtatcacagactcctgttgcaacagcatcagggcccaacttctccctggcggacctggagagtcccagctactacaacatcaaccaggtgaccctggggcggcggtccatcacctcccctccttccaccagcaccaccaagcgccccaagtccatcgatgacagtgagatggagagccctgttgatgacgtgttctatcccgggacaggccgttccccagcagctggcagcagccagtccagcgggtggcccaacgatgtggatgcagggagcccccgggccacagcatcagccctgcacttcccctccacgtccatcatccagcagtcgagcccgtatttcacgcacccgaccatccgctaccaccaccaccacgggcaggactcactgaaggagtttgtgcagtttgtgtgctcggatggctcgggccaggccaccggacagcattcgcaacgacaggcgcctcctctgccaaccggtttgtcagcatcggaccccgggacggcaactttctgaacatcccacagcagtctcagtcctggttcctctgataagatcgacaaaagaaacaacaaaatgagaagaagaggttcctcgaaaggggggagaagaaattttgagaatggaaaaatcccccagcccagcccagccccaccgaaaagcaaaaattacacgtcgtcagccactcagcccttctctcctccagcccggggacccccgcgggccccagaagcagcccagttctcagagagcccttggaaggggtctcggtggagctgtgcaccagcagccaagcagaaagaaacacgcgacatggactctgtcaagtagaggacagaaagcaagaaaggatgcagaactgccttcctccccctgaccccgccccgcccccgtcactgcgcttctgttataccatctttgcctgactctctccggcttctccattgaatggctaatgtgtatgtg

SEQ ID NO: 5557 - DNA, 5340 bp, Homo sapiens
tgcaaacaactctggcgatgccaaaattcccctccaagtgacacggctttgcgaaggaggtttcctcaggctgggctctttctgtcattcccttctgcctttctcggcgacgataaaaggctttgctctggcaataggaatttagaaaaaaagaaaaagctgcgctaaactccaccgtgacctcaaactctttggactgtttgaaaaaaaaaaaattggaagaaaatccatcctccaagagaatcggcataggaggagatggaagttttcccctttctcttggttttgtccgtctggtggtctcgaacctgggactcggcgaatgcggattcgatcattcacatcggagcaatttttgatgaatctgccaaaaaggatgatgaggtatttcgcactgcggttggtgaccttaaccagaatgaggagatcttacagactgagaaaatcacattttcagtgacgtttgttgatggcaacaaccctttccaagcagttcaagaagcctgtgaacttatgaatcaaggcatcttggccctggtcagctccattggctgcacgtcagcaggatccctccagtctttggcagacgccatgcatatcccccacctcttcattcagcgctcaacagctgggaccccaaggagtggctgtggactcacccggagcaacaggaatgatgactacactctctcagttcgcccacctgtctacttgcatgatgttatcctaagagtggtcacagagtatgcctggcagaaattcattatattctatgatagtgaatacgatatccgtggaatacaggagttcttggacaaagtctctcagcagggaatggatgttgcacttcagaaggtagaaaacaacatcaataaaatgattaccactctctttgacaccatgagaatagaagaactgaatcgctatcgagacactcttaggcgagcgatccttgttatgaatcctgctacagccaaatccttcattactgaggttgtggagactaatttggttgcttttgactgtcactggatcattataaatgaggaaataaacgatgtggacgtacaggaacttgtaagaaggtcaattggaaggttaacgattattcggcagacatttccagttccccagaacataagtcagcggtgtttccgtggcaaccatcgaatatcttcaacattgtgtgatccaaaggatccatttgctcagaatatggagatttccaacctttacatatatgacacggtgcttctgcttgctaatgcttttcataagaagctggaggaccgaaagtggcacagcatggcaagtctgtcatgtatcagaaagaactcaaagccctggcagggtgggcgctccatgttggagaccatcaagaagggtggagttagtgggttgactggagagctagaatttggagaaaatggaggcaatcccaatgtccactttgaaatccttggaaccaactatggagaagagcttggcagaggtgttcgaaaacttggttgctggaatcctgtcacaggtctgaatgggtcactgactgacaagaaattggagaataacatgcgtggagtggttctacgtgtagtaactgttctggaagaaccttttgtgatggtctctgaaaatgtcttgggtaagccgaagaaataccagggcttctccattgatgttttggatgccttatctaactacctgggttttaactacgaaatttacgtagcaccggatcacaaatacggaagcccacaagaagatgggacatggaatggcttggtaggagaacttgtctttaagagagccgacatagggatttctgctttaaccatcactccagatcgtgaaaatgtggtggactttacgacacgttacatggactactcagtgggggtactacttcgaagggctgaaaagacagtggatatgtttgcctgtcttgcaccatttgatctctctctatgggcttgcattgctggcacagtccttctggtgggtctactggtctacctcttgaactggcttaatcccccacgattacaaatgggatcaatgacgtctactactctctacaactccatgtggtttgtgtatggatcttttgtacaacaaggcggggaagtcccgtacacgactctggctacccgaatgatgatgggggcttggtggctatttgctttgattgttatctcatcttacacggcaaacctcgctgctttcctcactattacacgcattgaaagttccatccagtctctccaggacctttccaagcaaacagaaatcccttatggcacagtcctagactctgcggtatatgagcatgtccgcatgaaaggactgaatccttttgagagggacagcatgtattcccaaatgtggcggatgatcaaccgaagcaatggatcggagaacaatgttctggagtcccaggcaggcattcaaaaggtaaaatatggaaattatgctttcgtatgggatgcagctgtattggaatatgtggctatcaatgacccagattgttccttttacaccattggaaatactgttgctgatcggggatatggaattgcattacaacatggcagtccttaccgagatgttttttcacaaaggatcctggagcttcagcagaatggtgacatggacatcctgaagcacaaatggtggcctaagaatggccagtgtgacctgtactcgtcagtggacacaaagcagaaaggaggcgccctggacataaagagctttgcaggggtcttttgtatcctggctgctggaattgtcctctcctgcttcatagccatgctggagacgtggtggaacaagaggaaaggctcccgggttccatcaaaagaggatgacaaggaaattgacctggagcacctccatagacgtgtaaatagcttgtgcacagatgacgacagcccccataaacagttttccacctcgtcaattgatttgacccctctggacattgacactttgccaacacgacaagcactggagcaaatcagtgatttcaggaacactcatattaccacaacaacctttatcccagagcagatccagactcttagccgcacactgtcagctaaagctgcttctggtttcacttttggcaacgtgcctgagcaccgaactggcccttttaggcacagggcacctaatgggggctttttcaggagtcctataaaaacaatgtcatctattccttatcaaccaactcctaccctggggctcaatctgggtaatgatccagaccgaggcacctccatatgagcatcaaacaaatctcttcactgtttcttttttaggactccctttgcaaggagcaactgtaatattgtgggactaacatggatgtaacgtttaaaaaaaagatcaggattattagtaacaattctagttttttcctcccaccttctccctctcctctctcctctatgattttctctctttccccctcccttcctgtacattttcctccactttttttcattactcaacttgttccccaagaaggtagtgtactaggatcctattagtctgcttttcatatactgtacatcaagtataggaaatgtgcactgagtatactaaaagtatatgcaggattaattttacataaaggcctcttctgtaacatttctctattttttgaaatacaattgcaataacttcagtctttttacattcttctgctgcatccatacaatgctccactgctgttgagtgtcctttaactgtggaccaaaggcaacccctgcagtgtttataaaacaattttaagaccattcaggccacataagatgagaatgcaattttgtaggattacaaaaaagccattaatatgccagtcaagactacagttaaaactactcttgcactgcaacagtgcatatgacctttatgtgattgtacagtattaaaagttttttcttatgtacagtaaactttatcatatggcagaagcctctattgtgttaaataaattagtatttcatatatatacatatatatgcacctatataatgtgtatatatataaaaaggcagccattgctattgcaattcatttaataaagctttagtttaaacaaaagtattgtatacaggaactatgtatagtgcaggggttcttttcagttagaaaaggcaggttgctttaatgttattctgactcgcattgtttgccaacagaaaatattttatacttttgttattaaagcatccagggcaatttaatatttgttcctagatgtaactcatttgaataggttttgcatttgttattcagcagtgtataaagctaaccttgataattttacttttaattaattatctaaatgaaaaatgctattagctgaaccacatccacaacagcacatagagctctagaagagttgaaacatagatcattgaaggttaaaaatcctcttccaaagcagcaagtcaatcaatacaataatgatatttggggaggggtgggagcccttaagaactattgatgtggccttaaattactgtcatttattatcctaaagaagaaaacataataaccataatgggctctcaactcaactcccttttttatttagttctatttggaggagttatgtattttttacattagtgccaagtatatagaaggatgacagcaaaaacagtgcctctttgtgcacaatccttttaaagtagcattcttacttgttagaaatgtagaatgaactttgtttgtaatccttaaattaaaatgtggtaagtaggaagcaagaacttattctgtgtttttacgcagccatacacttactttaatctaactcattctgtggctaggattgatataggaatcaacctatgtgatttgctttaggagaaattaaaaggtatattcttaagatatattatattttgatgctaattctgttctggggagcatcttgtattgtcactgttttgtactaaatcttcaaatattgtctactgtgtaaggcagaaaaatttcttatcatgcaaaaaccattttgtttccagggtaacaagtaactaagtgcatgcacaacttgttttcccttgtaacattcatgatctcatttacaactctgattttaaaacaaaaaaatctttacaacaagctatatagggacataccagatgttgcagtgattttagctatcaacaaactgttaaccatgtacaatatttaaaataggcttattttgatgtatcgcctattatacaaacacacaaaacatttttggaggcctcagttatgagtgacagagctttctgtgtataatttgtctaaataatttgtctaataaaaatgttttctaaa

SEQ ID NO: 5558 - DNA, 7158 bp, Homo sapiens
gcggcggcggctgcggcggtggggccgggcgaggtccgctgcggtcccggcggctccgtggctgctccgctctgagcgcctggcgcgccccgcgccctccctgccggggccgctgggccggggatgcacgcggggcccgggagccatggtccgcttcggggacgagctgggcggccgctatgggggccccggcggcggagagcgggcccggggcggcggggccggcggggcggggggcccgggtcccggggggctgcagcccggccagcgggtcctctacaagcaatcgatcgcgcagcgcgcgcggaccatggcgctgtacaaccccatcccggtcaagcagaactgcttcaccgtcaaccgctcgctcttcgtcttcagcgaggacaacgtcgtccgcaaatacgcgaagcgcatcaccgagtggcctccattcgagtatatgatcctggccaccatcatcgccaactgcatcgtgctggccctggagcagcacctccctgatggggacaaaacgcccatgtccgagcggctggacgacacggagccctatttcatcgggatcttttgcttcgaggcagggatcaaaatcatcgctctgggctttgtcttccacaagggctcttacctgcggaacggctggaacgtcatggacttcgtggtcgtcctcacagggatccttgccacggctggaactgacttcgacctgcgaacactgagggctgtgcgtgtgctgaggcccctgaagctggtgtctgggattccaagtttgcaggtggtgctcaagtccatcatgaaggccatggttccactcctgcagattgggctgcttctcttctttgccatcctcatgtttgccatcattggcctggagttctacatgggcaagttccacaaggcctgtttccccaacagcacagatgcggagcccgtgggtgacttcccctgtggcaaggaggccccagcccggctgtgcgagggcgacactgagtgccgggagtactggccaggacccaactttggcatcaccaactttgacaatatcctgtttgccatcttgacggtgttccagtgcatcaccatggagggctggactgacatcctctataatacaaacgatgcggccggcaacacctggaactggctctacttcatccctctcatcatcatcggctccttcttcatgctcaacctggtgctgggcgtgctctcgggggagtttgccaaggagcgagagagggtggagaaccgccgcgccttcctgaagctgcgccggcagcagcagatcgagcgagagctcaacgggtacctggagtggatcttcaaggcggaggaagtcatgctggccgaggaggacaggaatgcagaggagaagtcccctttggacgtgctgaagagagcggccaccaagaagagcagaaatgacctgatccacgcagaggagggagaggaccggtttgcagatctctgtgctgttggatcccccttcgcccgcgccagcctcaagagcgggaagacagagagctcgtcatacttccggaggaaggagaagatgttccggttttttatccggcgcatggtgaaggctcagagcttctactgggtggtgctgtgcgtggtggccctgaacacactgtgtgtggccatggtgcattacaaccagccgcggcggcttaccacgaccctgtattttgcagagtttgttttcctgggtctcttcctcacagagatgtccctgaagatgtatggcctggggcccagaagctacttccggtcctccttcaactgcttcgactttggggtcatcgtggggagcgtctttgaagtggtctgggcggccatcaagccgggaagctcctttgggatcagtgtgctgcgggccctccgcctgctgaggatcttcaaagtcacgaagtactggagctccctgcggaacctggtggtgtccctgctgaactccatgaagtccatcatcagcctgctcttcttgctcttcctgttcattgtggtcttcgccctgctggggatgcagctgtttgggggacagttcaacttccaggatgagactcccacaaccaacttcgacaccttccctgccgccatcctcactgtcttccagatcctgacgggagaggactggaatgcagtgatgtatcacgggatcgaatcgcaaggcggcgtcagcaaaggcatgttctcgtccttttacttcattgtcctgacactgttcggaaactacactctgctgaatgtctttctggccatcgctgtggacaacctggccaacgcccaagagctgaccaaggatgaagaggagatggaagaagcagccaatcagaagcttgctctgcaaaaggccaaagaagtggctgaagtcagccccatgtctgccgcgaacatctccatcgccgccaggcagcagaactcggccaaggcgcgctcggtgtgggagcagcgggccagccagctacggctgcagaacctgcgggccagctgcgaggcgctgtacagcgagatggaccccgaggagcggctgcgcttcgccactacgcgccacctgcggcccgacatgaagacgcacctggaccggccgctggtggtggagctgggccgcgacggcgcgcgggggcccgtgggaggcaaagcccgacctgaggctgcggaggcccccgagggcgtcgaccctccgcgcaggcaccaccggcaccgcgacaaggacaagacccccgcggcgggggaccaggaccgagcagaggccccgaaggcggagagcggggagcccggtgcccgggaggagcggccgcggccgcaccgcagccacagcaaggaggccgcggggcccccggaggcgcggagcgagcgcggccgaggcccaggccccgagggcggccggcggcaccaccggcgcggctccccggaggaggcggccgagcgggagccccgacgccaccgcgcgcaccggcaccaggatccgagcaaggagtgcgccggcgccaagggcgagcggcgcgcgcggcaccgcggcggcccccgagcggggccccgggaggcggagagcggggaggagccggcgcggcggcaccgggcccggcacaaggcgcagcctgctcacgaggctgtggagaaggagaccacggagaaggaggccacggagaaggaggctgagatagtggaagccgacaaggaaaaggagctccggaaccaccagccccgggagccacactgtgacctggagaccagtgggactgtgactgtgggtcccatgcacacactgcccagcacctgtctccagaaggtggaggaacagccagaggatgcagacaatcagcggaacgtcactcgcatgggcagtcagcccccagacccgaacactattgtacatatcccagtgatgctgacgggccctcttggggaagccacggtcgttcccagtggtaacgtggacctggaaagccaagcagaggggaagaaggaggtggaagcggatgacgtgatgaggagcggcccccggcctatcgtcccatacagctccatgttctgtttaagccccaccaacctgctccgccgcttctgccactacatcgtgaccatgaggtacttcgaggtggtcattctcgtggtcatcgccttgagcagcatcgccctggctgctgaggacccagtgcgcacagactcgcccaggaacaacgctctgaaatacctggattacattttcactggtgtctttacctttgagatggtgataaagatgatcgacttgggactgctgcttcaccctggagcctatttccgggacttgtggaacattctggacttcattgtggtcagtggcgccctggtggcgtttgctttctcaggatccaaagggaaagacatcaataccatcaagtctctgagagtccttcgtgtcctgcggcccctcaagaccatcaaacggctgcccaagctcaaggctgtgtttgactgtgtggtgaactccctgaagaatgtcctcaacatcttgattgtctacatgctcttcatgttcatatttgccgtcattgcggtgcagctcttcaaagggaagtttttctactgcacagatgaatccaaggagctggagagggactgcaggggtcagtatttggattatgagaaggaggaagtggaagctcagcccaggcagtggaagaaatacgactttcactacgacaatgtgctctgggctctgctgacgctgttcacagtgtccacgggagaaggctggcccatggtgctgaaacactccgtggatgccacctatgaggagcagggtccaagccctgggtaccgcatggagctgtccatcttctacgtggtctactttgtggtctttcccttcttcttcgtcaacatctttgtggctttgatcatcatcaccttccaggagcagggggacaaggtgatgtctgaatgcagcctggagaagaacgagagggcttgcattgacttcgccatcagcgccaaacccctgacacggtacatgccccaaaaccggcagtcgttccagtataagacgtggacatttgtggtctccccgccctttgaatacttcatcatggccatgatagccctcaacactgtggtgctgatgatgaagttctatgatgcaccctatgagtacgagctgatgctgaaatgcctgaacatcgtgttcacatccatgttctccatggaatgcgtgctgaagatcatcgcctttggggtgctgaactatttcagagatgcctggaatgtctttgactttgtcactgtgttgggaagtattactgatattttagtaacagagattgcggaaacgaacaatttcatcaacctcagcttcctccgcctctttcgagctgcgcggctgatcaagctgctccgccagggctacaccatccgcatcctgctgtggacctttgtccagtccttcaaggccctgccctacgtgtgtctgctcattgccatgctgttcttcatctacgccatcatcggcatgcaggtgtttgggaatattgccctggatgatgacaccagcatcaaccgccacaacaacttccggacgtttttgcaagccctgatgctgctgttcaggagcgccacgggggaggcctggcacgagatcatgctgtcctgcctgagcaaccaggcctgtgatgagcaggccaatgccaccgagtgtggaagtgactttgcctacttctacttcgtctccttcatcttcctgtgctcctttctgatgttgaacctctttgtggctgtgatcatggacaattttgagtacctcacgcgggactcttccatcctaggtcctcaccacttggatgagttcatccgggtctgggctgaatacgacccggctgcgtgtgggcgcatcagttacaatgacatgtttgagatgctgaaacacatgtccccgcctctggggctggggaagaaatgccctgctcgagttgcttacaagcgcctggttcgcatgaacatgcccatctccaacgaggacatgactgttcacttcacgtccacgctgatggccctcatccggacggcactggagatcaagctggccccagctgggacaaagcagcatcagtgtgacgcggagttgaggaaggagatttccgttgtgtgggccaatctgccccagaagactttggacttgctggtaccaccccataagcctgatgagatgacagtggggaaggtttatgcagctctgatgatattcgacttctacaagcagaacaaaaccaccagagaccagatgcagcaggctcctggaggcctctcccagatgggtcctgtgtccctgttccaccctctgaaggccaccctggagcagacacagccggctgtgctccgaggagcccgggttttccttcgacagaagagttccacctccctcagcaatggcggggccatacaaaaccaagagagtggcatcaaagagtctgtctcctggggcactcaaaggacccaggatgcaccccatgaggccaggccacccctggagcgtggccactccacagagatccctgtggggcggtcaggagcactggctgtggacgttcagatgcagagcataacccggaggggccctgatggggagccccagcctgggctggagagccagggtcgagcggcctccatgccccgccttgcggccgagactcagcccgtcacagatgccagccccatgaagcgctccatctccacgctggcccagcggccccgtgggactcatctttgcagcaccaccccggaccgcccaccccctagccaggcgtcgtcgcaccaccaccaccaccgctgccaccgccgcagggacaggaagcagaggtccctggagaaggggcccagcctgtctgccgatatggatggcgcaccaagcagtgctgtggggccggggctgcccccgggagaggggcctacaggctgccggcgggaacgagagcgccggcaggagcggggccggtcccaggagcggaggcagccctcatcctcctcctcggagaagcagcgcttctactcctgcgaccgctttgggggccgtgagcccccgaagcccaagccctccctcagcagccacccaacgtcgccaacagctggccaggagccgggaccccacccacaggccggctcagccgtgggctttccgaacacaacgccctgctgcagagagaccccctcagccagcccctggcccctggctctcgaattggctctgacccttacctggggcagcgtctggacagtgaggcctctgtccacgccctgcctgaggacactctcactttcgaggaggctgtggccaccaactcgggccgctcctccaggacttcctacgtgtcctccctgacctcccagtctcaccctctccgccgcgtgcccaacggttaccactgcaccctgggactcagctcgggtggccgagcacggcacagctaccaccaccctgaccaagaccactggtgctagctgcaccgtgaccgctcagacgcctgcatgcagcaggcgtgtgttccagtggatgagttttatcatccacacggggcagccggccctcgggggaggccttgcccaccttggtgaggctcctgtggcccctccctccccctcctcccctcttttactctagacgacgaataaagccctgtt

SEQ ID NO: 5559 - DNA, 6857 bp, Homo sapiens
ttctctcagcccccgccctttccttccctcacagcggcagcctccctcctcccgccccccccgccccgcacccgcctgcccgcccgccacctccccccggtttctcattcctgccactagcgcgctcggcggctcattccgcggccgccgccagctgaggggagcgtcgcgggccgaggagcagatgccgcgggggccgctcgcagccgccgctgacttgtgaatgggaccgggactggggccgggactgacaccgcagcgcttgccctgcgccagggactggcggctcggaggttgcgtccaccctcaagggccccagaaatcactgtgttttcagctcagcggccctgtgacattccttcgtgttgtcatttgttgagtgaccaatcagatgggtggagtgtgttacagaaattggcagcaagtatccaatgggtgaagaagaagctaactggggacgtgggcagccctgacgtgatgagctcaaccagcagagacattccatcccaagagaggtctgcgtgacgcgtccgggaggccaccctcagcaagaccaccgtacagttggtggaaggggtgacagctgcattctcctgtgcctaccacgtaaccaaaaatgaaggagaactactgtttacaagccgccctggtgtgcctgggcatgctgtgccacagccatgcctttgccccagagcggcgggggcacctgcggccctccttccatgggcaccatgagaagggcaaggaggggcaggtgctacagcgctccaagcgtggctgggtctggaaccagttcttcgtgatagaggagtacaccgggcctgaccccgtgcttgtgggcaggcttcattcagatattgactctggtgatgggaacattaaatacattctctcaggggaaggagctggaaccatttttgtgattgatgacaaatcagggaacattcatgccaccaagacgttggatcgagaagagagagcccagtacacgttgatggctcaggcggtggacagggacaccaatcggccactggagccaccgtcggaattcattgtcaaggtccaggacattaatgacaaccctccggagttcctgcacgagacctatcatgccaacgtgcctgagaggtccaatgtgggaacgtcagtaatccaggtgacagcttcagatgcagatgaccccacttatggaaatagcgccaagttagtgtacagtatcctcgaaggacaaccctatttttcggtggaagcacagacaggtatcatcagaacagccctacccaacatggacagggaggccaaggaggagtaccacgtggtgatccaggccaaggacatgggtggacatatgggcggactctcagggacaaccaaagtgacgatcacactgaccgatgtcaatgacaacccaccaaagtttccgcagagcgtataccagatgtctgtgtcagaagcagccgtccctggggaggaagtaggaagagtgaaagctaaagatccagacattggagaaaatggcttagtcacatacaatattgttgatggagatggtatggaatcgtttgaaatcacaacggactatgaaacacaggagggggtgataaagctgaaaaagcctgtagattttgaaaccaaaagagcctatagcttgaaggtagaggcagccaacgtgcacatcgacccgaagtttatcagcaatggccctttcaaggacactgtgaccgtcaagatctcagtagaagatgctgatgagccccctatgttcttggccccaagttacatccacgaagtccaagaaaatgcagctgctggcaccgtggttgggagagtgcatgccaaagaccctgatgctgccaacagcccgataaggtattccatcgatcgtcacactgacctcgacagatttttcactattaatccagaggatggttttattaaaactacaaaacctctggatagagaggaaacagcctggctcaacatcactgtctttgcagcagaaatccacaatcggcatcaggaagccaaagtcccagtggccattagggtccttgatgtcaacgataatgctcccaagtttgctgccccttatgaaggtttcatctgtgagagtgatcagaccaagccactttccaaccagccaattgttacaattagtgcagatgacaaggatgacacggccaatggaccaagatttatcttcagcctaccccctgaaatcattcacaatccaaatttcacagtcagagacaaccgagataacacagcaggcgtgtacgcccggcgtggagggttcagtcggcagaagcaggacttgtaccttctgcccatagtgatcagcgatggcggcatcccgcccatgagtagcaccaacaccctcaccatcaaagtctgcgggtgcgacgtgaacggggcactgctctcctgcaacgcagaggcctacattctgaacgccggcctgagcacaggcgccctgatcgccatcctcgcctgcatcgtcattctcctggtcattgtagtattgtttgtgaccctgagaaggcaaaagaaagaaccactcattgtctttgaggaagaagatgtccgtgagaacatcattacttatgatgatgaagggggtggggaagaagacacagaagcctttgatattgccaccctccagaatcctgatggtatcaatggatttatcccccgcaaagacatcaaacctgagtatcagtacatgcctagacctgggctccggccagcgcccaacagcgtggatgtcgatgacttcatcaacacgagaatacaggaggcagacaatgaccccacggctcctccttatgactccattcaaatctacggttatgaaggcaggggctcagtggccgggtccctgagctccctagagtcggccaccacagattcagacttggactatgattatctacagaactggggacctcgttttaagaaactagcagatttgtatggttccaaagacacttttgatgacgattcttaacaataacgatacaaatttggccttaagaactgtgtctggcgttctcaagaatctagaagatgtgtaaacaggtatttttttaaatcaaggaaaggctcatttaaaacaggcaaagttttacagagaggatacatttaataaaactgcgaggacatcaaagtggtaaatactgtgaaataccttttctcacaaaaaggcaaatattgaagttgtttatcaacttcgctagaaaaaaaaaacacttggcatacaaaatatttaagtgaaggagaagtctaacgctgaactgacaatgaagggaaattgtttatgtgttatgaacatccaagtctttcttcttttttaagttgtcaaagaagcttccacaaaattagaaaggacaacagttctgagctgtaatttcgccttaaactctggacactctatatgtagtgcatttttaaacttgaaatatataatattcagccagcttaaacccatacaatgtatgtacaatacaatgtacaattatgtctcttgagcatcaatcttgttactgctgattcttgtaaatctttttgcttctactttcatcttaaactaatacgtgccagatataactgtcttgtttcagtgagagacgccctatttctatgtcatttttaatgtatctatttgtacaattttaaagttcttattttagtatacgtataaatatcagtattctgacatgtaagaaaatgttacggcatcacacttatattttatgaacattgtactgttgctttaatatgagcttcaatataagaagcaatctttgaaataaaaaaagatttttttttaattctgggtttgattcttaacattgaaacaaacgttaagtatttctaatgatccatttatatttctaatttaattgtgatcttttaataaccctatttatgatctgttgttgtctgtctgctgcttttattgtttatttaaaatcaaatatgttttacaaatgttttttcagacaagattctgtaacatcatgtaaagcttttttgtacattcttggtgttaacctcctggcttctcttcacacacatcttctaaaaaagaaggatgtgaaagaactaggtcagtctatgactttgcaatatgtgttatatagtatgcatttatcttgtatatcagtaatttgatggttatgagagatgaatccatgagggaatggagctatcagaactctaatgttccaggtatacattctatgccccacactgagcactggggaactgggggactagagtcaaaaatataaatttgcccagactctaatgttattctattttttcttctgttgaacttaccaggctattgtaagactcttgatagttgaaactgcttatttttcctcctgtaattttaactaattgtaaaatgatgtggcattttatgttttaatgagaatgggcgattcatttaaaaaagctttgtttagaatatgcttggggccgtaagctcagaatgagggcagggaccattttggattctgagagtcgatgccatttggtccaggagtgtgtctacagtcccctgcattccagctagtttcttggggattgaaacttatgtgaagggcatttcacctgttcagttgggccaaaggtcaaaacgtagcaatacttggggaaagaccacataaagtcacactgcaagtgctttccctctttccccctacacacagggcacgtgctttttcttggattgcagacaatttttacagtttttttctgactttattgtgaaagtttgtttcaagcatttcttgatatcatgttatgtactatttttatgatttagtcaacatgcatacaaagaaatgttttttatgaagtgctcacttccattttactttgcattgaaatcaaattgggctgaacacttcaatggaatacattttgtggacaatgtcactttagaatctttcatctcagtgaaggattacacattctcaatacttccataattgcaggttgtgttcatttttttatatagtttttgtaatccaaagaatattttgctagatttgcacagatctccaattgaatttgcaatgaagaaataactcaaaaggaatatgaatagcatttaaataagtatacagctgtaagtaaccctgtcaccatggatgatccttttctctaggaatgtatttggattagagatgacaactacattttcgcatttttatgttgaagtcttttttaaaaaggctgtttacttttcagtagttaagaatacttgtttttctttttcttttttttttttttttttaccttttattttttcgttaagcctctattgtttgtagaacactcttagaaacttggaaataaaatgtctttcccaactagtggagtcctttttcatttggagcacattgccttaaaagaagtcttaatttaaacggtccttccttattctaaagtaatcactgttttataccatctatgcagctaaaagaaggaacatgcttctgttcttttcctcaagtaatggttattgtttctagtcatcattcattcattgattcattcattaattcatcaaaatcttattttataaaccctgttccacttactggaggattcagaatgaatcttactaccttttctgacatcttttgataattcagccctgtaccaaagtatccaccttgttgtcttataatcacctatttacctatttgccctcctagaaaatgcaagaagatattttctctccttccaaattgaaggaagaacataaaagatataacaggaaggagatggtgagatatagagtgtgagcggaaattaggccagctgtggcaattctggacagatcttgggtttagctaagttatttcttttaggcctgggtttctgggggtgacagggaagataaaagagtagtttatttgcacctcttggagaattgcttaaaaatatagagatcatggctctgtatgtcaggtggaaccaggtcaggagtatttgaaactgctcctgggtcattgtgacatatccttcacatctttttgagaaactttataagacaatgggggtgaatgggggctgggcagttggagtctctgagcagaagaggggcaaaatttatttggcaggcagtgtggaggacagattaggagcatataaacccagaggtgtgccccaggagggcttttgcaaaggtcaatatgagatagaatgagggcctgaaataattcagtaatttggagatggagaagaggaaagacttctctgctcttgcactgccatcagcctggtctgggccatggtcatctctgacccggaagactgaccccacctcttggctcaccctctgcctcccaacctcctcttcacaaagaagccagagggatacttttaacacacaacccagatcacatgacttcgtaacttaaacctcttcactggcttcccaaagacttaaaatgaattctgatgcctttattttattgctttacatgaacagggccctgcgaacctctccagtgtcattccactccatcctcctttcagtgcacgatgctccagccacactggccatctttcggttcctgatacaaaaaaaaacacgttccttttccatggaaagcaggtcacccttgttattttgtatcgatgacaactctttaaacttattttgctttttggctttatgtatgtgtgtgggtgggtgggactgactgccccactagaatgtaagctccatgagggcagggaatcttgctttcttgtttaccattgtatactcagttctttacacagtgcctgaaacataacaggtacacaataaatatctattgaatgaaagcaaa

SEQ ID NO: 5560 - DNA, 6314 bp, Homo sapiens; identical to SEQ ID NO: 195

SEQ ID NO: 5561 - DNA, 1626 bp, Homo sapiens
acatccagctgcctgagaccctcctgcagccttctcaagggacagccccactctgcctcttgctcctccagggcagcaccatgcagcccctgtggctctgctgggcactctgggtgttgcccctggccagccccggggccgccctgaccggggagcagctcctgggcagcctgctgcggcagctgcagctcaaagaggtgcccaccctggacagggccgacatggaggagctggtcatccccacccacgtgagggcccagtacgtggccctgctgcagcgcagccacggggaccgctcccgcggaaagaggttcagccagagcttccgagaggtggccggcaggttcctggcgttggaggccagcacacacctgctggtgttcggcatggagcagcggctgccgcccaacagcgagctggtgcaggccgtgctgcggctcttccaggagccggtccccaaggccgcgctgcacaggcacgggcggctgtccccgcgcagcgcccgggcccgggtgaccgtcgagtggctgcgcgtccgcgacgacggctccaaccgcacctccctcatcgactccaggctggtgtccgtccacgagagcggctggaaggccttcgacgtgaccgaggccgtgaacttctggcagcagctgagccggccccggcagccgctgctgctacaggtgtcggtgcagagggagcatctgggcccgctggcgtccggcgcccacaagctggtccgctttgcctcgcagggggcgccagccgggcttggggagccccagctggagctgcacaccctggaccttggggactatggagctcagggcgactgtgaccctgaagcaccaatgaccgagggcacccgctgctgccgccaggagatgtacattgacctgcaggggatgaagtgggccgagaactgggtgctggagcccccgggcttcctggcttatgagtgtgtgggcacctgccggcagcccccggaggccctggccttcaagtggccgtttctggggcctcgacagtgcatcgcctcggagactgactcgctgcccatgatcgtcagcatcaaggagggaggcaggaccaggccccaggtggtcagcctgcccaacatgagggtgcagaagtgcagctgtgcctcggatggtgcgctcgtgccaaggaggctccagccataggcgcctagtgtagccatcgagggacttgacttgtgtgtgtttctgaagtgttcgagggtaccaggagagctggcgatgactgaactgctgatggacaaatgctctgtgctctctagtgagccctgaatttgcttcctctgacaagttacctcacctaatttttgcttctcaggaatgagaatctttggccactggagagcccttgctcagttttctctattcttattattcactgcactatattctaagcacttacatgtggagatactgtaacctgagggcagaaagcccaatgtgtcattgtttacttgtcctgtcactggatctgggctaaagtcctccaccaccactctggacctaagacctggggttaagtgtgggttgtgcatccccaatccagataataaagactttgtaaaacatgaataaaacacattttattcta

SEQ ID NO: 5562 - DNA, 4891 bp, Homo sapiens
gcggccgcggtgaagcgcggagggcggcgcgggcaccggggccgggccggggctgcagccgcagcggccatgggggccctgacgagccggcagcacgcgggcgtggaggaggtggacatcccgtctaattccgtgtaccgctacccgcccaagtccggaagctattttgccagccacttcattatgggaggagagaagtttgactcaactcatcctgaaggttacctgtttggagagaacagcgatctgaactttctggggaacagaccagttgtgtttccttacgccgccccacctccccaagaacccgtgaagactctgagaagcctggtcaatatccgaaaggacacactgaggctcgtcaaatgtgctgaggaagtgaagagccctggagaagaggccagtaaagctaaagtccactacaatgttgagttcacctttgacacagatgctcgggtagccatcaccatctattaccaggccacggaagagttccagaatggtattgccagctacattcccaaagacaacagcctccagtcggagactgtgcagtacaagcgaggagtgtgtcagcagttctgcctgccctcccacaccgtggatccctccgagtgggccgaagaggagcttggctttgatttagaccgagaagtttaccctctagtggtacatgccgtggtggatgaaggagacgagtattttggccattgccatgtactgctgggtacttttgagaagcacacagatggaactttctgtgtcaagcccctcaaacagaaacaagtagtagacggggtcagctacctccttcaggagatctatggaattgaaaacaagtacaacacacaagattctaaggtggctgaagacgaagtgagtgataacagtgccgagtgtgtggtgtgtctctcggatgtccgggacaccttgattctgccctgtcgccacctctgcctctgtaacacctgtgcagacacgctgcgctaccaggccaacaactgccccatctgccgactgcccttccgggcactgcttcagatccgagccatgaggaaaaaattgggccccttgtccccaaccagctttaaccccatcatctcatcccagacatctgactctgaagagcatccatcctcagagaatattccaccaggctatgaagtagtatctcttctggaggccctcaacgggcccctcaccccgtccccagcagttcctccacttcacgtgcttggagatggccacctctcaggaatgctcccttcatatggcagtgatggccacctgccccccgtcaggacgatctcgcctcttgaccgcctgtctgacagcagcagtcagggactcaaactcaaaaagagtctctccaaatccacttcccaaaactcttccgtgctgcatgaagaggaagatgagcattcctgcagcgagtcggagacacagctctctcagagaccgtcggttcagcatctcggagaggaatgtggtgtgactccagaaagtgagaatctcaccttgtcgtcatctggagctattgaccagtcgtcttgcacagggacgcctctgtcatccactatttcctccccagaaggccctgccagcagcagcttggcccagtctgtcatgtccatggcatcctcccagatcagcactgacaccgtctcctccatgtctggctcctacatcgcccctggcactgaagaggagggagaggctctctcttccccccagcctgccagcagggccccctcagaagaaggagaggggctgccagcggagtctccagacagcaactttgctggcctcccagctggagagcaggatgcagagggaaatgatgttatagaggaagaggatggatcacccacgcaggaaggccagaggacgtgcgcatttctaggtatggagtgtgacaataacaatgactttgacatcgcaagcgtgaaagcactggacaataagctgtgctctgaggtctgcttacctggtgcctggcaggctgatgacaatgccgtcagtcggaatgcccagcgccggcgcttgtcatccagcagcctggaggactctgagacgaggccctgtgtgtggggccctttggctgtctgagccccagcctctgcacttgggctcccctcctgccctgcattccatccatcctcactcagctgctgcctactgggcatcctcagcaagatgctggagactttttaccctcctgtgacagctgttacaacctgtaaccacaatccctcacctctcagagggaactggaaccctcctttctccgtgtgacctaaagccactcaatgaactgcagctcacgagaccttttgcagggactctggaatgtcctcacggtatattgatgttcaggtggagctggggtccatgggctaatttcttacacatcttttttctccttagggggtagaacaagaaggcttagagtttggcagctttgttacaaacatccctctggcatttcctggtctctggcacatcataaccaattggaaacctgcagtttggggtagggctggaggatcgctcctgtggaaagggagagccatactgcacggacgtagcgtttccctctacaagcactaggagcacctttctcaaggacaagaaatggtagcaaccaaaaggttggttgaaggaaacaatccttccttctggtggcagagccagtcttctgggcctcacatgcctgtgcggttaagaaggagctcttggccgggcgcggtggctcacgcctgtaatcccagcactttgggaggccgaggcgggtggatcatgagatcaggagatcgagaccatcctggctaacacggcgaaaccccgtctctactaaaaatacaaaaaattagctgggcatggttgcaggcgcctgtagtcccagctacttgggaggctgaggcaggagaatggcctgaacccgggaggcggagcttgcagtgagccgagatcgcgccaatgcactccagcctgggcgacagagaaaaaaaaaaaaaaagaaggagcccttgaatctgagaatcccccagttaagatgatttcccttaaggagcatttctcctgatcaggtgcattcagggaggcctgcaactccatcctaaggtgacatttcaagaaacacatgtgttgaccacctctgtgtgccaagcactgggtgaggagtggtcgtatattaccataattcatcctcactcaattgggaggtggcattcttgtccctgttgcccccatctctacccccttttgttaatggttgagagaaatgtggaccagtgattctcagtttggtgcccaggtccccaaaggaagtgatggagagccttgagctaagttcaggcagcagcatgtggccagcagcagtgtgctgggagcagaggttggaatcagggctcagggccttcacttcaagggccctccccagctactcgggaggctgaggcaggagaatcgcttgaactcaggaggtggaggttgcggtgagccaagatcgtgccactgcactccagcctgggctacaagattgaaaagatcgaaactctgtctcaaacaaaaaaaaaaaaattcaaggctgtttccaaggcagcctcaaaaagagcctggtgcccagggggtccttcgtttctgtgtggctgcagaggccaggagtgcagtgactgtctcactgcctagtggttgtggctcacatcctgccctgatggagaggggggcctgtcgtccaaccctctctgaaaaactgcagtagactttaccatttcaggccccacctaatgttctttccttccttccccctacattcttcccgcccctttcatagttaagatgcataagctgagcaataaccccacttcctgatttccctgaaatatgagcccagaagcagcaggtgacagggagcttcccttaccctggggtggtggcacacagaccacctcctgtcctgtcccctgcaggtagtattcacagtgtggtgttacctgggaggagggaggaaggagctgagatgaaggagattcaggtaaacagtagccacagtggccaggacccccttcctgaggatccctgtccttcctcgcagcaggtgcttagtcctctcctagggagaagcacggaaagattcctcaaggcctcagtcccatgtccaaggcatacctaggttagaaatgtcctttacttgtttctcagttactatttctcctcttcctccctccccctgccttctcttggctgtcatttagctctctggcccacagaaatactccatccaaggagctggtcctcagtcagcctgatgaggacaggtcagtggccaacccttttgccccagtccttcatctggagacagtcacatagtcacgtcaacagttcacccaaagagaagaggtggggcctggcttctcccacagggcacagcctaactatggagacccagggctccttcctgctgcactaggcctgtgctctccctattgccttcaggtggtgtgatcccggcttcctcacagagcccttttttccttctgcccagctccatcccaccagagtttctacccccgctgaggcatctcctgggcacagaccaccacactctaagccggctggcctgggagttagggtcctgcccacctcacctgggagttggggtcctgcccacctggagtttagcacgctggtcgctcactttgctttggtctgcacacctggtgtgtgcatgtgtatactgcttgtgccatctgtgtacccctctccctggagtacacttgtggtcacactacagtggggacatcaagaatgcaatatttatggattgctgcatgattcttaaaaatgaataaaactgtttacaagggaaggagagctaactgcaaagtga

SEQ ID NO: 5563 - DNA, 1989 bp, Homo sapiens
ctccttcccgctccgcgtcccgcccagcggcgcagggggccgggctccggctaggagggtgggggccgcgccggtgacagccgatccccgcccctgctgcccgccacgtccctcacgtaccactcggcagaggcgcggggaaacctggcgtactggctgtggcttctctagcgggactcggcatgaggctggcgcggctgcttcgcggagccgccttggccggcccgggcccggggctgcgcgccgccggcttcagccgcagcttcagctcggactcgggctccagcccggcgtccgagcgcggcgttccgggccaggtggacttctacgcgcgcttctcgccgtccccgctctccatgaagcagttcctggacttcggatcagtgaatgcttgtgaaaagacctcatttatgtttctgcggcaagagttgcctgtcagactggcaaatataatgaaagaaataagtctccttccagataatcttctcaggacaccatccgttcaattggtacaaagctggtatatccagagtcttcaggagcttcttgattttaaggacaaaagtgctgaggatgctaaagctatttatgactttacagatactgtgatacggatcagaaaccgacacaatgatgtcattcccacaatggcccagggtgtgattgaatacaaggagagctttggggtggatcctgtcaccagccagaatgttcagtactttttggatcgattctacatgagtcgcatttcaattagaatgttactcaatcagcactctttattgtttggtggaaaaggcaaaggaagtccatctcatcgaaaacacattggaagcataaatccaaactgcaatgtacttgaagttattaaagatggctatgaaaatgctaggcgtctgtgtgatttgtattatattaactctcccgaactagaacttgaagaactaaatgcaaaatcaccaggacagccaatacaagtggtttatgtaccatcccatctctatcacatggtgtttgaacttttcaagaatgcaatgagagccactatggaacaccatgccaacagaggtgtttacccccctattcaagttcatgtcacgctgggtaatgaggatttgactgtgaagatgagtgaccgaggaggtggcgttcctttgaggaaaattgacagacttttcaactacatgtattcaactgcaccaagacctcgtgttgagacctcccgcgcagtgcctctggctggttttggttatggattgcccatatcacgtctttacgcacaatacttccaaggagacctgaagctgtattccctagagggttacgggacagatgcagttatctacattaaggctctgtcaacagactcaatagaaagactcccagtgtataacaaagctgcctggaagcattacaacaccaaccacgaggctgatgactggtgcgtccccagcagagaacccaaagacatgacgacgttccgcagtgcctagacacacttgggacatcggaaaatccaaatgtggcttttgtattaaatttggaaggtatggtgttcagaactatattataccaagtactttatttatcgttttcacaaaactatttgagtagaataaatggaaactgaattccatttgtgcccgttaaacctcctaaaggatgaaattgcacctattttacacttatattttcacagttaattgaacatatttttaaacaactgtagttttgggcaacttttcactttgtggtagacttcagaagtgtggaaatcttcgggtttctataggaaactagttttttttttttaagaaatactttcatttatgtttgctagaaacattttctaaatgatagtgattagctggttagccatcttcctgttatttggaggagttctgccatcttttattcggtagtgacagctgtaatatggtcttcatgtttatcagtgacttgactacaagtaaagcagaaaacagttgg

SEQ ID NO: 5564 - DNA, 4751 bp, Homo sapiens
acccgcgcgaggtaggcgctctggtgcttgcggaggacgcttccttcctcagatgcaccgatcttcccgatactgcctttggagcggctagattgctagccttggctgctccattggcctgccttgccccttacctgccgattgcatatgaactcttcttctgtctgtacatcgttgtcgtcggagtcgtcgcgatcgtcgtggcgctcgtgtgatggccttcgtccgtttagagtagtgtagttagttaggggccaacgaagaagaaagaagacgcgattagtgcagagatgctggaggtggtcagttactaagctagagtaagatagcggagcgaaaagagccaaacctagccggggggcgcacggtcacccaaaggaggtcgactcgccggcgcttcctatcgcgccgagctccctccattcctctccctccgccgaggcgcgaggttgcggcgcgcagcgcagcgcagctcagcgcaccgactgccgcgggctccgctgggcgattgcagccgagtccgtttctcgtctagctgccgccgcggcgaccgctgcctggtcttcctcccggacgctagtgggttatcagctaacacccgcgagcatctataacataggccaactgacgccatccttcaaaaacaactaaaggatgatatgatgaacctagcctgttaatttcgtcttctcaattttaaactttggttgcttaagactgaagcaatcatggtgaacctgaggaatgcggtgcattcattccttgtgcacctaattggcctattggtttggcaatgtgatatttctgtgagcccagtagcagctatagtaactgacattttcaatacctccgatggtggacgcttcaaattcccagacggggtacaaaactggccagcactttcaatcgtcatcataataatcatgacaataggtggcaacatccttgtgatcatggcagtaagcatggaaaagaaactgcacaatgccaccaattacttcttaatgtccctagccattgctgatatgctagtgggactacttgtcatgcccctgtctctcctggcaatcctttatgattatgtctggccactacctagatatttgtgccccgtctggatttctttagatgttttattttcaacagcgtccatcatgcacctctgcgctatatcgctggatcggtatgtagcaatacgtaatcctattgagcatagccgtttcaattcgcggactaaggccatcatgaagattgctattgtttgggcaatttctataggtgtatcagttcctatccctgtgattggactgagggacgaagaaaaggtgttcgtgaacaacacgacgtgcgtgctcaacgacccaaatttcgttcttattgggtccttcgtagctttcttcataccgctgacgattatggtgattacgtattgcctgaccatctacgttctgcgccgacaagctttgatgttactgcacggccacaccgaggaaccgcctggactaagtctggatttcctgaagtgctgcaagaggaatacggccgaggaagagaactctgcaaaccctaaccaagaccagaacgcacgccgaagaaagaagaaggagagacgtcctaggggcaccatgcaggctatcaacaatgaaagaaaagcttcgaaagtccttgggattgttttctttgtgtttctgatcatgtggtgcccatttttcattaccaatattctgtctgttctttgtgagaagtcctgtaaccaaaagctcatggaaaagcttctgaatgtgtttgtttggattggctatgtttgttcaggaatcaatcctctggtgtatactctgttcaacaaaatttaccgaagggcattctccaactatttgcgttgcaattataaggtagagaaaaagcctcctgtcaggcagattccaagagttgccgccactgctttgtctgggagggagcttaatgttaacatttatcggcataccaatgaaccggtgatcgagaaagccagtgacaatgagcccggtatagagatgcaagttgagaatttagagttaccagtaaatccctccagtgtggttagcgaaaggattagcagtgtgtgagaaagaacagcacagtcttttcctacggtacaagctacatatgtaggaaaattttcttctttaatttttctgttggtcttaactaatgtaaatattgctgtctgaaaaagtgtttttacatatagctttgcaaccttgtactttacaatcatgcctacattagtgagatttagggttctatatttactgtttataataggtggagactaacttattttgattgtttgatgaataaaatgtttatttttgctctccctcccttctttccttccttttttcctttcttccttcctttctctctttcttttgtgcatatggcaacgttcatgttcatctcaggtggcatttgcaggtgaccagaatgaggcacatgacagtggttatatttcaaccacacctaaattaacaaattcagtggacatttgttctgggttaacagtaaatatacactttacattcttgctctgctcatctacacatataaacacagtaagataggttctgctttctgatacatctgtcagtgagtcagaggcagaacctagtcttgttgttcatataggggcaaaaatttgacattgtcagaatgttgtgttggtatttactgcaatgtctgtccctaaacatagtggtattttaacatagcagctggttaaccgggactacagaagtggaaggataatgagatgtaatacaccaaatagcttttcacttcttaaggacagtgttcaaattctgattattacaacaagcaaactgaaattagtgttttcattctggtccttagtaaattcctaattctatgattaaactgggaaatgagatcccagagttatttcccaacccaggattcaacatcaattgggttttgatctcagcatcctggaaatttgtgtgcttcacacaaagtgaaattagtattttgagccttattaaaatattttcttaattatggtacctctgtctataggacttaatttagcagtccatttttgagtaaaacttgtattggaagtatagatggtagaaactttggaagttttacttgattaaggactacagaattgggcccttagaatgtgaaaaaaaaaagtaattaaaaagacacttttaccgaactcgggattacagaaacacggagtttccatttggattttaaacaaaatttatgtcattttcagatccttccaaactctctagtgcaggaaaaggctgcagctaatttgtgaaagtggcaagctcttcattgcactgcagttatttaccagaagtttaaatctttgttaaaatatagtgttgtgttacaataagtgttggccatcatttcattcgtgggcctgctgctctctaagaattcagtagcattttaatagtttctaaaccatgaaaagttttcaagcattgctaaagtcaggccattcagtctatgctgtgtgcagagtatacaagtgtttctagtaacagtatttccatacgtgcccatttcacacaactgtggataaattttggaagaattcatgatgctagttcttacgcttgacagttacttacacacctgagaatgtgcctctcagtatcttaaaattggttaatgaaaaatctgaatttctaaaacccttggtctgtgttctcaacacacagtatagataaatccaatagtctgccacaagggcagtggaagagctgctgtatttgaggaaactcatacagtctctatttgatttgcaacactgccaaacatcagtcaattgcttgagcatgcccaaatataacatgaaagtcaagtctacctgccttgcctgttaggtctgttgaagtgcatgttaaaataattatatgaagcagaatgagatgatttaattcttaccgaaatgaaaatggctgaagaaacacagcatgcatttagcatgagttctgcacatacagatggtgtcctgcatgtatgccatgtatgttgcatgaatccatcgatttgtattaatgtagggcagaatagctgatagaagaaggactgaagaaaatccttcagcaatccttaaaaagaccatgcattcagatctgaagtagtgtgagtgttagaaaaaactggaaacatctgatttctgaactatcagggcaagctcatagcacatgttttacaaagaaacaaaatataaatcacagatttccaaaagtactagcaataagttgaatgataatagctcacagcacatttgttaatgattcttgtgtcatcaagtagtagtacttaatagtacccaacctggtaattatcctcaagttgtgtgctattcgtaagttctgtgcagtttggtatgaaacaaatatactcatttggatataaatcttacccttcaatgttaaatctacaaacttttataaatgttttaaagaagtccatgtgataattgtaaaggtgatgaatttaccatcaaacaaatcattttgatgtattattatatatgtatatctgtgtaagacacgtgcaacagactgccttatattattttctgtaattcttctcctttgtcaaatggtattttttgtgaatggttgcaaagtgttgtcttattcctaattcctgtatgttatccactacaggttttatgagacttcctattaatttattaaatttattaaatgttg

SEQ ID NO: 5565 - DNA, 3959 bp, Homo sapiens; identical to SEQ ID NO: 96

SEQ ID NO: 5566 - DNA, 3832 bp, Homo sapiens
ggggccggcgcggcgagcgcaccagcagcatcctggctcagccgcggcggtggcgggggcgcaaccagcgggccgaggcggcggcgccagcggcgccttaaatagcatccagagccggcgcggggcagggagtgggctgcagtgacagccggcggcggagcggccggtccacggaggagaattcagcttagagaactatcaacacaggacaatgcaagcccatgagctgttccggtattttcgaatgccagagctggttgacttccgacagtacgtgcgtactcttccgaccaacacgcttatgggcttcggagcttttgcagcactcaccaccttctggtacgccacgagacccaaacccctgaagccgccatgcgacctctccatgcagtcagtggaagtggcgggtagtggtggtgcacgaagatccgcactacttgacagcgacgagcccttggtgtatttctatgatgatgtcacaacattatacgaaggtttccagaggggaatacaggtgtcaaataatggcccttgtttaggctctcggaaaccagaccaaccctatgaatggctttcatataaacaggttgcagaattgtcggagtgcataggctcagcactgatccagaagggcttcaagactgccccagatcagttcattggcatctttgctcaaaatagacctgagtgggtgattattgaacaaggatgctttgcttattcgatggtgatcgttccactttatgatacccttggaaatgaagccatcacgtacatagtcaacaaagctgaactctctctggtttttgttgacaagccagagaaggccaaactcttattagagggtgtagaaaataagttaataccaggccttaaaatcatagttgtcatggatgcctacggcagtgaactggtggaacgaggccagaggtgtggggtggaagtcaccagcatgaaggcgatggaggacctgggaagagccaacagacggaagcccaagcctccagcacctgaagatcttgcagtaatttgtttcacaagtggaactacaggcaaccccaaaggagcaatggtcactcaccgaaacatagtgagcgattgttcagcttttgtgaaagcaacagagaatacagtcaatccttgcccagatgatactttgatatctttcttgcctctcgcccatatgtttgagagagttgtagagtgtgtaatgctgtgtcatggagctaaaatcggatttttccaaggagatatcaggctgctcatggatgacctcaaggtgcttcaacccactgtcttccccgtggttccaagactgctgaaccggatgtttgaccgaattttcggacaagcaaacaccacgctgaagcgatggctcttggactttgcctccaagaggaaagaagcagagcttcgcagcggcatcatcagaaacaacagcctgtgggaccggctgatcttccacaaagtacagtcgagcctgggcggaagagtccggctgatggtgacaggagccgccccggtgtctgccactgtgctgacgttcctcagagcagccctgggctgtcagttttatgaaggatacggacagacagagtgcactgccgggtgctgcctgaccatgcctggagactggaccgcaggccatgttggggccccgatgccgtgcaatttgataaaacttgttgatgtggaagaaatgaattacatggctgccgagggcgagggcgaggtgtgtgtgaaagggccaaatgtatttcagggctacttgaaggacccagcgaaaacagcagaagctttggacaaagacggctggttacacacaggggacattggaaaatggttaccaaatggcaccttgaaaattatcgaccggaaaaagcacatatttaagctggcacaaggagaatacatagcccctgaaaagattgaaaatatctacatgcgaagtgagcctgttgctcaggtgtttgtccacggagaaagcctgcaggcatttctcattgcaattgtggtaccagatgttgagacattatgttcctgggcccaaaagagaggatttgaagggtcgtttgaggaactgtgcagaaataaggatgtcaaaaaagctatcctcgaagatatggtgagacttgggaaggattctggtctgaaaccatttgaacaggtcaaaggcatcacattgcaccctgaattattttctatcgacaatggccttctgactccaacaatgaaggcgaaaaggccagagctgcggaactatttcaggtcgcagatagatgacctctattccactatcaaggtttagtgtgaagaagaaagctcagaggaaatggcacagttccacaatctcttctcctgctgatggccttcatgttgttaattttgaatacagcaagtgtagggaaggaagcgttcgtgtttgacttgtccattcggggttcttctcataggaatgctagaggaaagagaacactgccttacagtcacctcatgttgcagaccatgtttatggtaatacacactttccaaaatgagccttaaaaattgtaaaggggatactataaatgtgctaagttatttgagacttcctcagtttaaaaagtgggttttaaatcttctgtctccctgtttctctaatcaaggggttaggactttgctatctctgagatgtctgctacttgctgcaaattctgcagctgtctgctgctctaaagagtacagtgcactagagggaagtgttccctttaaaaataagaacaactgtcctggctggagaatctcacaagcggaccagagatctttttaaatccctgctactgtcccttctcacaggcattcacagaacccttctgattcgtaagggttacgaaactcatgttcttctccagtcccctgtggtttctgttggagcataaggtttccagtaagcgggagggcagatccaactcagaaccatgcagataaggagcctctggcaaatgggtgctcatcagaacgcgtggattctctttcatggcagaatgctcttggactcggttctccaggcctgattccccgactccatcctttttcaggggttatttaaaaatctgccttagattctatagtgaagacaagcatttcaagaaagagttacctggatcagccatgctcagctgtgacgcctgaataactgtctactttatcttcactgaaccactcactctgtgtaaaggccaacagatttttaatgtggttttcatatcaaaagatcatgttgggattaacttgcctttttccccaaaaaataaactctcaggcaagcatttctttaaagctattaagggagtatatacttgagtacttattgaaatggacagtaataagcaaatgttcttataatgctacctgatttctatgaaatgtgtttgacaagccaaaattctaggatgtagaaatctggaaagttcatttcctgggattcacttctccagggattttttaaagttaatttgggaaattaacagcagttcactttattgtgagtctttgccacatttgactgaattgagctgtcatttgtacatttaaagcagctgttttggggtctgtgagagtacatgtattatatacaagcacaacagggcttgcactaaagaattgtcattgtaataacactacttggtagcctaacttcatatatgtattcttaattgcacaaaaagtcaataatttgtcaccttggggttttgaatgtttgctttaagtgttggctatttctatgttttataaaccaaaacaaaatttccaaaaacaatgaaggaaaccaaaataaatatttctgcatttc

SEQ ID NO: 5567 - DNA, 9371 bp, Homo sapiens
gcgcgtgtgcgtcccagccccgccggccagcgcaggaggccgccgcccgggcgcagagggcagccggtggggaggcatgccgccgctcctggcgcccctgctctgcctggcgctgctgcccgcgctcgccgcacgaggcccgcgatgctcccagcccggtgagacctgcctgaatggcgggaagtgtgaagcggccaatggcacggaggcctgcgtctgtggcggggccttcgtgggcccgcgatgccaggaccccaacccgtgcctcagcaccccctgcaagaacgccgggacatgccacgtggtggaccgcagaggcgtggcagactatgcctgcagctgtgccctgggcttctctgggcccctctgcctgacacccctggacaatgcctgcctcaccaacccctgccgcaacgggggcacctgcgacctgctcacgctgacggagtacaagtgccgctgcccgcccggctggtcagggaaatcgtgccagcaggctgacccgtgcgcctccaacccctgcgccaacggtggccagtgcctgcccttcgaggcctcctacatctgccactgcccacccagcttccatggccccacctgccggcaggatgtcaacgagtgtggccagaagcccgggctttgccgccacggaggcacctgccacaacgaggtcggctcctaccgctgcgtctgccgcgccacccacactggccccaactgcgagcggccctacgtgccctgcagcccctcgccctgccagaacgggggcacctgccgccccacgggcgacgtcacccacgagtgtgcctgcctgccaggcttcaccggccagaactgtgaggaaaatatcgacgattgtccaggaaacaactgcaagaacgggggtgcctgtgtggacggcgtgaacacctacaactgccgctgcccgccagagtggacaggtcagtactgtaccgaggatgtggacgagtgccagctgatgccaaatgcctgccagaacggcgggacctgccacaacacccacggtggctacaactgcgtgtgtgtcaacggctggactggtgaggactgcagcgagaacattgatgactgtgccagcgccgcctgcttccacggcgccacctgccatgaccgtgtggcctccttctactgcgagtgtccccatggccgcacaggtctgctgtgccacctcaacgacgcatgcatcagcaacccctgtaacgagggctccaactgcgacaccaaccctgtcaatggcaaggccatctgcacctgcccctcggggtacacgggcccggcctgcagccaggacgtggatgagtgctcgctgggtgccaacccctgcgagcatgcgggcaagtgcatcaacacgctgggctccttcgagtgccagtgtctgcagggctacacgggcccccgatgcgagatcgacgtcaacgagtgcgtctcgaacccgtgccagaacgacgccacctgcctggaccagattggggagttccagtgcatctgcatgcccggctacgagggtgtgcactgcgaggtcaacacagacgagtgtgccagcagcccctgcctgcacaatggccgctgcctggacaagatcaatgagttccagtgcgagtgccccacgggcttcactgggcatctgtgccagtacgatgtggacgagtgtgccagcaccccctgcaagaatggtgccaagtgcctggacggacccaacacttacacctgtgtgtgcacggaagggtacacggggacgcactgcgaggtggacatcgatgagtgcgaccccgacccctgccactacggctcctgcaaggacggcgtcgccaccttcacctgcctctgccgcccaggctacacgggccaccactgcgagaccaacatcaacgagtgctccagccagccctgccgccacgggggcacctgccaggaccgcgacaacgcctacctctgcttctgcctgaaggggaccacaggacccaactgcgagatcaacctggatgactgtgccagcagcccctgcgactcgggcacctgtctggacaagatcgatggctacgagtgtgcctgtgagccgggctacacagggagcatgtgtaacatcaacatcgatgagtgtgcgggcaacccctgccacaacgggggcacctgcgaggacggcatcaatggcttcacctgccgctgccccgagggctaccacgaccccacctgcctgtctgaggtcaatgagtgcaacagcaacccctgcgtccacggggcctgccgggacagcctcaacgggtacaagtgcgactgtgaccctgggtggagtgggaccaactgtgacatcaacaacaatgagtgtgaatccaacccttgtgtcaacggcggcacctgcaaagacatgaccagtggctacgtgtgcacctgccgggagggcttcagcggtcccaactgccagaccaacatcaacgagtgtgcgtccaacccatgtctgaaccagggcacgtgtattgacgacgttgccgggtacaagtgcaactgcctgctgccctacacaggtgccacgtgtgaggtggtgctggccccgtgtgcccccagcccctgcagaaacggcggggagtgcaggcaatccgaggactatgagagcttctcctgtgtctgccccacgggctggcaagggcagacctgtgaggtcgacatcaacgagtgcgttctgagcccgtgccggcacggcgcatcctgccagaacacccacggcggctaccgctgccactgccaggccggctacagtgggcgcaactgcgagaccgacatcgacgactgccggcccaacccgtgtcacaacgggggctcctgcacagacggcatcaacacggccttctgcgactgcctgcccggcttccggggcactttctgtgaggaggacatcaacgagtgtgccagtgacccctgccgcaacggggccaactgcacggactgcgtggacagctacacgtgcacctgccccgcaggcttcagcgggatccactgtgagaacaacacgcctgactgcacagagagctcctgcttcaacggtggcacctgcgtggacggcatcaactcgttcacctgcctgtgtccacccggcttcacgggcagctactgccagcacgatgtcaatgagtgcgactcacagccctgcctgcatggcggcacctgtcaggacggctgcggctcctacaggtgcacctgcccccagggctacactggccccaactgccagaaccttgtgcactggtgtgactcctcgccctgcaagaacggcggcaaatgctggcagacccacacccagtaccgctgcgagtgccccagcggctggaccggcctttactgcgacgtgcccagcgtgtcctgtgaggtggctgcgcagcgacaaggtgttgacgttgcccgcctgtgccagcatggagggctctgtgtggacgcgggcaacacgcaccactgccgctgccaggcgggctacacaggcagctactgtgaggacctggtggacgagtgctcacccagcccctgccagaacggggccacctgcacggactacctgggcggctactcctgcaagtgcgtggccggctaccacggggtgaactgctctgaggagatcgacgagtgcctctcccacccctgccagaacgggggcacctgcctcgacctccccaacacctacaagtgctcctgcccacggggcactcagggtgtgcactgtgagatcaacgtggacgactgcaatccccccgttgaccccgtgtcccggagccccaagtgctttaacaacggcacctgcgtggaccaggtgggcggctacagctgcacctgcccgccgggcttcgtgggtgagcgctgtgagggggatgtcaacgagtgcctgtccaatccctgcgacgcccgtggcacccagaactgcgtgcagcgcgtcaatgacttccactgcgagtgccgtgctggtcacaccgggcgccgctgcgagtccgtcatcaatggctgcaaaggcaagccctgcaagaatgggggcacctgcgccgtggcctccaacaccgcccgcgggttcatctgcaagtgccctgcgggcttcgagggcgccacgtgtgagaatgacgctcgtacctgcggcagcctgcgctgcctcaacggcggcacatgcatctccggcccgcgcagccccacctgcctgtgcctgggccccttcacgggccccgaatgccagttcccggccagcagcccctgcctgggcggcaacccctgctacaaccaggggacctgtgagcccacatccgagagccccttctaccgttgcctgtgccccgccaaattcaacgggctcttgtgccacatcctggactacagcttcgggggtggggccgggcgcgacatccccccgccgctgatcgaggaggcgtgcgagctgcccgagtgccaggaggacgcgggcaacaaggtctgcagcctgcagtgcaacaaccacgcgtgcggctgggacggcggtgactgctccctcaacttcaatgacccctggaagaactgcacgcagtctctgcagtgctggaagtacttcagtgacggccactgtgacagccagtgcaactcagccggctgcctcttcgacggctttgactgccagcgtgcggaaggccagtgcaaccccctgtacgaccagtactgcaaggaccacttcagcgacgggcactgcgaccagggctgcaacagcgcggagtgcgagtgggacgggctggactgtgcggagcatgtacccgagaggctggcggccggcacgctggtggtggtggtgctgatgccgccggagcagctgcgcaacagctccttccacttcctgcgggagctcagccgcgtgctgcacaccaacgtggtcttcaagcgtgacgcacacggccagcagatgatcttcccctactacggccgcgaggaggagctgcgcaagcaccccatcaagcgtgccgccgagggctgggccgcacctgacgccctgctgggccaggtgaaggcctcgctgctccctggtggcagcgagggtgggcggcggcggagggagctggaccccatggacgtccgcggctccatcgtctacctggagattgacaaccggcagtgtgtgcaggcctcctcgcagtgcttccagagtgccaccgacgtggccgcattcctgggagcgctcgcctcgctgggcagcctcaacatcccctacaagatcgaggccgtgcagagtgagaccgtggagccgcccccgccggcgcagctgcacttcatgtacgtggcggcggccgcctttgtgcttctgttcttcgtgggctgcggggtgctgctgtcccgcaagcgccggcggcagcatggccagctctggttccctgagggcttcaaagtgtctgaggccagcaagaagaagcggcgggagcccctcggcgaggactccgtgggcctcaagcccctgaagaacgcttcagacggtgccctcatggacgacaaccagaatgagtggggggacgaggacctggagaccaagaagttccggttcgaggagcccgtggttctgcctgacctggacgaccagacagaccaccggcagtggactcagcagcacctggatgccgctgacctgcgcatgtctgccatggcccccacaccgccccagggtgaggttgacgccgactgcatggacgtcaatgtccgcgggcctgatggcttcaccccgctcatgatcgcctcctgcagcgggggcggcctggagacgggcaacagcgaggaagaggaggacgcgccggccgtcatctccgacttcatctaccagggcgccagcctgcacaaccagacagaccgcacgggcgagaccgccttgcacctggccgcccgctactcacgctctgatgccgccaagcgcctgctggaggccagcgcagatgccaacatccaggacaacatgggccgcaccccgctgcatgcggctgtgtctgccgacgcacaaggtgtcttccagatcctgatccggaaccgagccacagacctggatgcccgcatgcatgatggcacgacgccactgatcctggctgcccgcctggccgtggagggcatgctggaggacctcatcaactcacacgccgacgtcaacgccgtagatgacctgggcaagtccgccctgcactgggccgccgccgtgaacaatgtggatgccgcagttgtgctcctgaagaacggggctaacaaagatatgcagaacaacagggaggagacacccctgtttctggccgcccgggagggcagctacgagaccgccaaggtgctgctggaccactttgccaaccgggacatcacggatcatatggaccgcctgccgcgcgacatcgcacaggagcgcatgcatcacgacatcgtgaggctgctggacgagtacaacctggtgcgcagcccgcagctgcacggagccccgctggggggcacgcccaccctgtcgcccccgctctgctcgcccaacggctacctgggcagcctcaagcccggcgtgcagggcaagaaggtccgcaagcccagcagcaaaggcctggcctgtggaagcaaggaggccaaggacctcaaggcacggaggaagaagtcccaggacggcaagggctgcctgctggacagctccggcatgctctcgcccgtggactccctggagtcaccccatggctacctgtcagacgtggcctcgccgccactgctgccctccccgttccagcagtctccgtccgtgcccctcaaccacctgcctgggatgcccgacacccacctgggcatcgggcacctgaacgtggcggccaagcccgagatggcggcgctgggtgggggcggccggctggcctttgagactggcccacctcgtctctcccacctgcctgtggcctctggcaccagcaccgtcctgggctccagcagcggaggggccctgaatttcactgtgggcgggtccaccagtttgaatggtcaatgcgagtggctgtcccggctgcagagcggcatggtgccgaaccaatacaaccctctgcgggggagtgtggcaccaggccccctgagcacacaggccccctccctgcagcatggcatggtaggcccgctgcacagtagccttgctgccagcgccctgtcccagatgatgagctaccagggcctgcccagcacccggctggccacccagcctcacctggtgcagacccagcaggtgcagccacaaaacttacagatgcagcagcagaacctgcagccagcaaacatccagcagcagcaaagcctgcagccgccaccaccaccaccacagccgcaccttggcgtgagctcagcagccagcggccacctgggccggagcttcctgagtggagagccgagccaggcagacgtgcagccactgggccccagcagcctggcggtgcacactattctgccccaggagagccccgccctgcccacgtcgctgccatcctcgctggtcccacccgtgaccgcagcccagttcctgacgcccccctcgcagcacagctactcctcgcctgtggacaacacccccagccaccagctacaggtgcctgagcaccccttcctcaccccgtcccctgagtcccctgaccagtggtccagctcgtccccgcattccaacgtctccgactggtccgagggcgtctccagccctcccaccagcatgcagtcccagatcgcccgcattccggaggccttcaagtaaacggcgcgccccacgagaccccggcttcctttcccaagccttcgggcgtctgtgtgcgctctgtggatgccagggccgaccagaggagcctttttaaaacacatgtttttatacaaaataagaacgaggattttaattttttttagtatttatttatgtacttttattttacacagaaacactgcctttttatttatatgtactgttttatctggccccaggtagaaacttttatctattctgagaaaacaagcaagttctgagagccagggttttcctacgtaggatgaaaagattcttctgtgtttataaaatataaacaaagattcatgatttataaatgccatttatttattgattccttttttcaaaatccaaaaagaaatgatgttggagaagggaagttgaacgagcatagtccaaaaagctcctggggcgtccaggccgcgccctttccccgacgcccacccaaccccaagccagcccggccgctccaccagcatcacctgcctgttaggagaagctgcatccagaggcaaacggaggcaaagctggctcaccttccgcacgcggattaatttgcatctgaaataggaaacaagtgaaagcatatgggttagatgttgccatgtgttttagatggtttcttgcaagcatgcttgtgaaaatgtgttctcggagtgtgtatgccaagagtgcacccatggtaccaatcatgaatctttgtttcaggttcagtattatgtagttgttcgttggttatacaagttcttggtccctccagaaccaccccggccccctgcccgttcttgaaatgtaggcatcatgcatgtcaaacatgagatgtgtggactgtggcacttgcctgggtcacacacggaggcatcctacccttttctggggaaagacactgcctgggctgaccccggtggcggccccagcacctcagcctgcacagtgtcccccaggttccgaagaagatgctccagcaacacagcctgggccccagctcgcgggacccgaccccccgtgggctcccgtgttttgtaggagacttgccagagccgggcacattgagctgtgcaacgccgtgggctgcgtcctttggtcctgtccccgcagccctggcagggggcatgcggtcgggcaggggctggagggaggcgggggctgcccttgggccacccctcctagtttgggaggagcagatttttgcaataccaagtatagcctatggcagaaaaaatgtctgtaaatatgtttttaaaggtggattttgtttaaaaaatcttaatgaatgagtctgttgtgtgtcatgccagtgagggacgtcagacttggctcagctcggggagccttagccgcccatgcactggggacgctccgctgccgtgccgcctgcactcctcagggcagcctcccccggctctacgggggccgcgtggtgccatccccagggggcatgaccagatgcgtcccaagatgttgatttttactgtgttttataaaatagagtgtagtttacagaaaaagactttaaaagtgatctacatgaggaactgtagatgatgtatttttttcatcttttttgttaactgatttgcaataaaaatgatactgatggtga

SEQ ID NO: 5568 - DNA, 2277 bp, Homo sapiens
gtagtttcagtataaacaaggaacccgactggttagacagattttgtttttcttcttcccgcgcgctttagctccctgtcctttggtcgcatttgtgggcgcgcggcacgcagccgggaggccgaggactcggagttcacctgcaggaaagtatgcctcagactcctcccttttcagcaatgtttgacagcagtggttacaatcgaaacctctatcagtctgcagaggacagctgtggagggttgtattaccatgacaacaacctcctctctggatccctggaagcactcatccagcacttagtacctaatgtggattactatccagatagaacatacatatttaccttcctactcagttctcggttatttatgcatccgtatgagctaatggccaaagtttgccacttatgtgttgagcaccagagactaagtgatcctgatagtgataagaaccagatgagaaaaattgcacccaaaatccttcaactcctcacggaatggacggaaacatttccctatgattttcgggatgaaagaatgatgagaaacttaaaagatctggctcaccgaatagccagtggcgaagagcagacatacagaaagaatgtccagcaaatgatgcagtgtctgatccgcaagcttgctgcgctcagccagtacgaagaagtcctggcaaaaatcagctccacatccacagatcggctcacagttctcaagaccaagccacagtctatacaaagggatatcattactgtctgcaacgacccttacacgttggcccagcagctgactcatatagagctggagaggctcaattatattgggccagaagaatttgttcaggcgttcgtgcagaaggaccctttggataatgacaagagttgctacagtgaacggaagaaaacacgaaacttagaagcttacgtggaatggtttaatcgcctcagctacttggttgctacagaaatctgtatgcctgttaagaaaaaacaccgagcaagaatgattgagtatttcattgacgtagctcgggagtgttttaacattggcaacttcaactccttgatggcgataatctctggtatgaatatgagcccagtctctcgactaaaaaaaacttgggccaaagtgaagactgcaaaatttgacattcttgagcatcagatggacccttcaagcaatttctataattatcgaacagctcttcgtggggcagcacaaaggtctttaactgctcatagtagtagagaaaagattgtgataccattcttcagtctcttaatcaaagatatttatttcctcaatgagggttgtgccaaccgccttcccaatggccatgtcaattttgagaaattttgggaactggccaaacaagtgagtgaatttatgacatggaaacaagtggagtgtccatttgagagggaccggaagatcttgcagtatctgctcacagtaccagtcttcagtgaagatgctctctacttggcttcttatgagagtgaaggacctgaaaatcatatagagaaagacagatggaagtctttaaggtcgagcctcttaggcagagtttaacacatgggagctgcctgcctgctgctgctgctgcttcctgcagatcatggaggggctggcctttgttttctggcatctcgtaccacgaacactcatgaagaccctgcagtcattggagcacccgggtcagcaaagcacacaagctcactcaagaccagatggagaacttatttcctgcagctgacagatagactcagattttgtgagactgaaatgttcactgaagacacttgagaaagaatcctctaaaaatcccggctctgcacattattcatctcctggaatttccatgtgaatcacagctctgcacctggatggagttttcttttgtgtgtgtgtgttttttttaatttggttgaacatttgctgctaatgggacttgcccagctgagtgctggctctgaggaagcccacgtttcttttgttaacttaaatgaagaaaggagtggagggaggggatctaaaacccccccgtttagatcccaaaccttagctcaatcagtattgccagagaggggtaagactggttggaagctgactgcagactttgtttccccttagtatgtgctgtgttgtaaatttttctcctccctcctcctacaaggttttgagttggctgctggttagcaaactcctttttacccatataagttatttaatataataatgaagctcaacactgtggtaggaaaatagccactag

SEQ ID NO: 5569 - DNA, 2711 bp, Homo sapiens
aaagccgcgcagagagcgtgaaacaaagcagtcggctcggaattggacttgggaggcgcggtgaggagtcaggcttaaaacttgttggaggggagtaaccagcctgctcctctcgctctcctcctcgtctgcgccgcgtttcagagagaaaattcctgttccaagagaaaataaggcaacatcaatgaaggagagaagagccagccagaaattatccagcaaatctatcatggatcctaatcagaacgtgaaatgcaagatagttgtggtgggagacagtcagtgtggaaaaactgcgctgctccatgtcttcgccaaggactgcttccccgagaattacgttcctacagtgtttgagaattacacggccagttttgaaatcgacacacaaagaatagagttgagcctgtgggacacttcgggttctccttactatgacaatgtccgccccctctcttaccctgattcggatgctgtgctgatttgctttgacatcagtagaccagagaccctggacagtgtcctcaaaaagtggaaaggtgaaatccaggaattttgtccaaataccaaaatgctcttggtcggctgcaagtctgatctgcggacagatgttagtacattagtagagctctccaatcacaggcagacgccagtgtcctatgaccagggggcaaatatggccaaacagattggagcagctacttatatcgaatgctcagctttacagtcggaaaatagcgtcagagacatttttcacgttgccaccttggcatgtgtaaataagacaaataaaaacgttaagcggaacaaatcacagagagccacaaagcggatttcacacatgcctagcagaccagaactctcggcagttgctacggacttacgaaaggacaaagcgaagagctgcactgtgatgtgaatctttcattatctttaatgaagacaaaggaatctagtgtaaaaaacaacagcaaacaaaaaggtgaagtctaaatgaagtgcacagccaaagtcatgtataccagaggcttaggaggcgtttgagaggatactcatctttttggaatcctgaccttaggttcggcatgtagaccaagtgatgagaagtgaatacatggaagagtttttaagtgtgacttgaaaaatatgccaaaaaatgagagatacaaatgagctagaggaagatgaggggggatgcgagtacctccaagaagaaaaatcacactctgaatggtgcttgcatttttgggttttttttttttgttataatctattcatggatctccactttgatttaatttttaaatgttttaatctcctttacaaaaagtatacgttaatataccgtcctcaagggggaactggcactgtgaccttagcatttagttttctagaggatgtgatctaatttctttctagctcatcattaaaaaggaaattgtatcaggacccatgggatatatccagaggcaaactttatgaggctttgaaatcttgccttcctgaagatagctgagtaggatggttctaaggaaagcctttgcaatcttgcaagatttgtagaccagcactacaaagatcgcatagatcaaataggaaaaaaaatgtcgatttttattcagtctgatggttctgttcttcattgtgattgtcattaaaaagtggtaaattgctcaatgtaatatttttgtgcgctgtttagaagttgtgtgattttttgccatcgttgataaaaatgcaaagtcaaataaaaggtgtcttggtttgatgtcatagaatgatccaaggagagaaaaaaggtagttactgttttcaccagaaaaggtaatgagtgaaggaaagaatagtagcagaaagcacagtttgtgagtaaagctgtctggaattaagttaccaaaaatacaaagcaaaaggactattattttgggttgaagctccaaaactgacagcatctgataatctgttggtttatttcacttttcattaaatgaacattgatgagagaagatgccacttacccaagctttagagaatccctagtggaagattatatgataaactttcagtcctgacataacactagggcatttctagagtgtcattgctaaaacctcactgaacagatgcagccaaggtctgtgttcagcacttggtctctgttgttacgtaaaataataagcatttaaaatagtttacagatatttttgaccagttccttttagagattctttcagagaagaaaccagatctgacctgtttattgttggcgcttgttgaaaacgagctttctttcccatgatagtgcttcgtttttgaagtgttgaagctgtgctccccttaaatcgtggcaggagagattaaggtaattacaacactcagttctatgtcttacaagcactttgtcttgtctctgcaagaaaattcgattccagtcatttcccataaaatacagacattttaccaacataatatgctttgattgatgcagcattatgctttgggcagtattacaaaatagctggcgagtgctttctgtatttaaatattgtaaaaagaaaataagttataactgttataaagcagaacttttgttgcattttttaaactgttgaagtcactgtgtatgtttgtttggtcaatgtttccgcagtatttattaaaacatactttttttttcttcaaataaaaaagtaaccatgtctttgtctaaa

SEQ ID NO: 5570 - DNA, 1326 bp, Homo sapiens
gcggccgcggtgaagcgcggagggcggcgcgggcaccggggccgggccggggctgcagccgcagcggccatgggggccctgacgagccggcagcacgcgggcgtggaggaggtggacatcccgtctaattccgtgtaccgctacccgcccaagtccggaagctattttgccagccacttcattatgggaggagagaagtttgactcaactcatcctgaaggttacctgtttggagagaacagcgatctgaactttctggggaacagaccagttgtgtttccttacgccgccccacctccccaagaacccgtgaagactctgagaagcctggtcaatatccgaaaggacacactgaggctcgtcaaatgtgctgaggaagtgaagagccctggagaagaggccagtaaagctaaagtccactacaatgttgagttcacctttgacacagatgctcgggtagccatcaccatctattaccaggccacggaagagttccagaatggtattgccagctacattcccaaagacaacagcctccagtcggagactgtgcagtacaagcgaggagtgtgtcagcagttctgcctgccctcccacaccgtggatccctccgagtgggccgaagaggagcttggctttgatttagaccgagaagtttaccctctagtggtacatgccgtggtggatgaaggagacgagtattttggccattgccatgtactgctgggtacttttgagaagcacacagatggaactttctgtgtcaagcccctcaaacagaaacaagtagtagacggggtcagctacctccttcaggagatctatggaattgaaaacaagtacaacacacaagattctaaggtggctgaagacgaagtgagtgataacagtgccgagtgtgtggtgtgtctctcggatgtccgggacaccttgattctgccctgtcgccacctctgcctctgtaacacctgtgcagacacgctgcgctaccaggccaacaactgccccatctgccgactgcccttccgggcactgcttcagatccgagccatgaggaaaaaattgggccccttgtccccaaccagctttaaccccatcatctcatcccagacatctgactctgaagagcatccatcctcagagaatattccaccaggctatgaagtagtatctcttctggaggccctcaacgggcccctcaccccgccgtctctactaaaaatacaaaaaattagctgggcatggttgcaggcgcctgtagtcccagctacttgggaggctgaggcaggagaatggcctgaacccgggaggcggagcttgcagtga

SEQ ID NO: 5571 - DNA, 1470 bp, Homo sapiens
cactcaccgccttcctggtggacgggctcctggtggctgtgctgctgctgtgagcgggcccctgctcctccatgcccccagctctccggctgggtgggcttggccatggtcagcgtgaacgcgcccctcggggctccagtggagagttcttacgacacgtccccatcagaaggcaccaacctcaacgcgcccaacagcctgggtgtcagcgccctgtgtgccatctgcggggaccgggccacgggcaaacactacggtgcctcgagctgtgacggctgcaagggcttcttccggaggagcgtgcggaagaaccacatgtactcctgcagatttagccggcagtgcgtggtggacaaagacaagaggaaccagtgccgctactgcaggctcaagaaatgcttccgggctggcatgaagaaggaagccgtccagaatgagcgggaccggatcagcactcgaaggtcaagctatgaggacagcagcctgccctccatcaatgcgctcctgcaggcggaggtcctgtcccgacagatcacctcccccgtctccgggatcaacggcgacattcgggcgaagaagattgccagcatcgcagatgtgtgtgagtccatgaaggagcagctgctggttctcgttgagtgggccaagtacatcccagctttctgcgagctccccctggacgaccaggtggccctgctcagagcccatgctggcgagcacctgctgctcggagccaccaagagatccatggtgttcaaggacgtgctgctcctaggcaatgactacattgtccctcggcactgcccggagctggcggagatgagccgggtgtccatacgcatccttgacgagctggtgctgcccttccaggagctgcagatcgatgacaatgagtatgcctacctcaaagccatcatcttctttgacccagatgccaaggggctgagcgatccagggaagatcaagcggctgcgttcccaggtgcaggtgagcttggaggactacatcaacgaccgccagtatgactcgcgtggccgctttggagagctgctgctgctgctgcccaccttgcagagcatcacctggcagatgatcgagcagatccagttcatcaagctcttcggcatggccaagattgacaacctgttgcaggagatgctgctgggagggtcccccagcgatgcaccccatgcccaccaccccctgcaccctcacctgatgcaggaacatatgggaaccaacgtcatcgttgccaacacaatgcccactcacctcagcaacggacagatgtgtgagtggccccgacccaggggacaggcagccacccctgagaccccacagccctcaccgccaggtggctcagggtctgagccctataagctcctgccgggagccgtcgccacaatcgtcaagcccctctctgccatcccccagccgaccatcaccaagcaggaagttatctagcaagcc

SEQ ID NO: 5572 - DNA, 3088 bp, Homo sapiens
tttcctatgcaaaagagcccaggcagaaagacaaacctaaataagaatctaacttctgtaagaagctgtgaagagtgatgctggcagctgcctttgcagactctaactccagcagcatgaatgtgtcctttgctcacctccactttgccggagggtacctgccctctgattcccaggactggagaaccatcatcccggctctcttggtggctgtctgcctggtgggcttcgtgggaaacctgtgtgtgattggcatcctccttcacaatgcttggaaaggaaagccatccatgatccactccctgattctgaatctcagcctggctgatctctccctcctgctgttttctgcacctatccgagctacggcgtactccaaaagtgtttgggatctaggctggtttgtctgcaagtcctctgactggtttatccacacatgcatggcagccaagagcctgacaatcgttgtggtggccaaagtatgcttcatgtatgcaagtgacccagccaagcaagtgagtatccacaactacaccatctggtcagtgctggtggccatctggactgtggctagcctgttacccctgccggaatggttctttagcaccatcaggcatcatgaaggtgtggaaatgtgcctcgtggatgtaccagctgtggctgaagagtttatgtcgatgtttggtaagctctacccactcctggcatttggccttccattattttttgccagcttttatttctggagagcttatgaccaatgtaaaaaacgaggaactaagactcaaaatcttagaaaccagatacgctcaaagcaagtcacagtgatgctgctgagcattgccatcatctctgctctcttgtggctccccgaatgggtagcttggctgtgggtatggcatctgaaggctgcaggcccggccccaccacaaggtttcatagccctgtctcaagtcttgatgttttccatctcttcagcaaatcctctcatttttcttgtgatgtcggaagagttcagggaaggcttgaaaggtgtatggaaatggatgataaccaaaaaacctccaactgtctcagagtctcaggaaacaccagctggcaactcagagggtcttcctgacaaggttccatctccagaatccccagcatccataccagaaaaagagaaacccagctctccctcctctggcaaagggaaaactgagaaggcagagattcccatccttcctgacgtagagcagttttggcatgagagggacacagtcccttctgtacaggacaatgaccctatcccctgggaacatgaagatcaagagacaggggaaggtgttaaatagatttaagtttcaaagcaaaacaaactgtgattattgtatttacttgtactgctgcttatcaatattgctgactttacaaactgatataattattaccattaggaattataaaaatatttcacaatctacactttccaaatgtgcaatgtggtaagtagagaaccatgttagaagtaataattgtttcagaattagaacttggcttcccaaacaatttaagtgttgtgtaaagatgttgctgtcaaagtgattagacagcctggctattctgtcatttgttcacagtggttttactgggtaccccctaggaccagccctgtagtggaccggctggagcctgcagtagaggttctgtcaaagctgagcccctttaccttcagtttcacccaggacctgctagtcctaattttacctactaaattgtatttcacataaccaaagctcaaaatctactttcacttgagatttttaacacattaatgataaattttaatgcgttcttcatttacttaataagtgttaatttacttgatgaaaagtccgtatcataatgttcatgactgaaggtcaaagaaaaagaaacagcaccttattccaattctggactcatttcaagccatggctggttctggccaagtttaaataaattcaaacttaaactaaagcctgcttcagtgaactttttaaagctacctgaatgagtcttcagtttctaagtctaagaattgtagcagctttccaatgacattcagtagtctgatatgggggaaaaaatacttaaaaaaatgtcctctcttcacttccaaaatgtgggaaagttatttttctataagcagaaatgtgttcctcctaatatctcctttctcccaagataaaccatggttaatgatataggtatagattactcctcaaatacaaatagaagatggagatggtgatctttcttgttaatggtactaaacttacccttactcagaacattgaacttgaaccctactcaacttttaaaatactataggctaagttataaaaataatctagcaacctgagaaagagattaatatcaaaaagagaaaattcaacaaaccaagacagaatttggttaagaatacaaaataaaaagcataagggcaatgcagaaagcagtaaaactgtgtacccagacatacggtaaaatctgagtaacaggcaataaccattcattttatagcaaggtaaaacatacccaataaaacatgattatgatatatttctgccccttttaagtataatgacattcacccatgattcttgattactttgttatggaactcgggtattttcactgaaagtttccctcagaatagaaatgcctttagggcaaaccaagccatggagaatctgaaatataaaggatatgttatggaaaaaaaaagattttgctttttgtctatgggtttccggattctttgctttttcataagtggtcatagtttgctttttaacacaggaggtagggctgtattctttttacatccttcattacaaattttatttgaagctcatgtattcaaataaagtaaaatttaacccaagaatccaaaatattgtcttgtgatatggtagttataaaaaggattatcattgtctgtgattatttgaataaataatttttatgttcattatatgtagtaaatttaggatgtaagcttccagggtttgacactttaaacttgtaaagaaataaaaataattacgctttacttccgata

SEQ ID NO: 5573 - DNA, 2642 bp, Homo sapiens
atactgctgggattacaggcgcccgccaccacgcccggctaattttttgtatttttagtagagacggggtttcactgtgttggcaaggatggtctctatctcctgacctcgtgatatgcccgcctccgcctcccaaagtgctgggattacaggcttgagccaccgcgtctggcctatttatttattattttcgagacggagtgttgctcttgtggcccaggctggagtgcaacggcgggatttcggctcactgcaacctctgcctcccgggttcaagcaattctcctgcctcagcctcctgagtagctgggattacaggcaggcaccaccacacccggctaattttgtatttttagtagaaacggggtttctccatgttggtcagtctggtttcgaactcccagcgtcaggtcatctgcctgcctcggcctcccaaagtgctgggattacaggcgtgagccaccgcgcccagccacttctgtatttttaaaaaagtggtaaggaagtggaggattaaatgatttgcccaaagtctcacagtaatttgtagagctgagattgaaattcgggtgaaacttcacatatcacattctttttatcagatggcagtttctggatttactcttggtacctgcatacttctgttgcacattagttatgtggctaattatcccaatggaaaagtaacacagtcatgccatggaatgattcctgaacatggtcatagtccacagtctgttcctgttcatgacatttacgtgagtcagatgacattcaggccaggagatcagattgaagttactttgtcagggcatccatttaaaggctttctcctagaagcgcgtaatgctgaggatctgaatggccctcctattggctccttcacattgattgacagtgaagtgtcacaacttttgacctgtgaagatatacagggatcagcagtgagtcacagaagtgcatctaaaaaaacagaaattaaagtctactggaatgctccaagcagtgctccaaatcacacacagtttctagtcacagttgttgagaagtataaaatctactgggtgaagattcctggtcctataatttcacaaccaaatgcatttccttttacaacacctaaagctacagtagtacctttgccaacgttacctcccgtttcccacttaaccaaaccattcagtgcctcagattgtgggaacaagaagttctgtattaggagtcctttgaactgtgacccagagaaggaggcttcctgtgtcttcttgtccttcacaagagatgaccaatcggtgatggttgaaatgagcggccccagtaaaggctatttatcctttgcattgtctcatgatcagtggatgggtgatgatgatgcttatctgtgtattcatgaagatcagactgtgtacatccagccttcccatttaacggggcgaagtcaccctgtaatggactccagggatacccttgaggatatggcttggaggttggcggacggtgttatgcagtgttctttcagaagaaacattacccttcctggagttaagaatagatttgatctaaacacaagctattacatatttctagcagatggtgcagctaatgatggtcgaatttacaagcactctcagcaacctttgattacctatgaaaaatatgatgtgacagactctccaaagaacataggaggatcccattctgtactccttctgaaggttcatggtgccttaatgtttgtggcatggatgactactgttagcataggtgtactggttgcccggttcttcaagccagtttggtcaaaagctttcttgcttggtgaagcagcttggtttcaggtgcatcggatgctcatgttcaccacaactgtcctcacctgcattgcttttgttatgccgtttatatacaggggaggctggagtaggcatgcaggttaccacccatacctcggctgtatagtgatgactttggcagttcttcagcctcttctggcagtcttcaggccacctttacatgacccaagaaggcaaatgtttaactggactcattggagtatgggaacagctgctagaataatagcagtggcagcgatgttcctgggaatggatttaccaggactgaatcttcctgattcatggaaaacctatgcaatgaccggattcgtagcctggcatgttgggactgaggttgttctggagttgaaatattggatgatgacagaattcagatccttcagtcatttactgcagtggaaacagagggtcatgcttttaaaaaggcagtgttggcaatttatgtctgtgggaatgttacttttctcatcatatttttatctgcaatcaaccatctatgagcaagcaaagaccttggcttttgcaggccaagtgataattatcatcaaaccaaagaaacttgaagcctgtcctgactgcctggagcatatttgtgaattctcacttggaagactggggtcatgtctgtagaggaattctgaagtccagcctttagagaacaacattcaagagggtcatatagactataaattaatgtcatgccctatatgtaattctgggtcttaaaggaaagattgtacttcaggagaagtaactctcaaatatttcatgccaagattttaagaatgt

SEQ ID NO: 5574 - DNA, 5225 bp, Homo sapiens
gttggtactaagaagtgcctttcctgacgtctctgctgcttggaaccgcttctagagcagtctctgcttttgccttgcttgctgccagctagactgtgacgacagcacatccaccctccacctctagcccagacacccccatttctacttataatcaagagaaaagctctaagtatctggcattgccctaggctgctttagtgttaaaagaaaagtttgctgaaaaagtaagatatcttctgccaggaaatcaaggaggaaaaaaaaaatcattttctcgattttgctctaaactgctgcatctgtctatgccaaactaatcaataccgattgcaccaccaaactccattgcaaattcagctgtgaggagattccctttcagacaactttgctgaaagcagcttggaaattcggtgtcgaagggtctgccacgttttcatgcttgcattttgggctccaaattggcactgggaaggggttactgagagcacaaggctgataccaggccctacttttaaacgttcatctacttacaatcctagtatttctctaaaaaccaaaacctctttgaattaacagtttcatgctgtgaatttctagtgggagatcttttccttgatattgacgacacaattttccatgtacttttaaagcagggagtggggaaaagtattttgaggggacattttcatcatcagttcagctttttttttttggttgttgctcttttttgggggggttgggtttgttggtttcactgaaacatttaactacctgtaaaatctaaacatggctgttagtgtcacaccaattcgggacacaaaatggctaacactggaagtatgtagagagttccagagggggacttgctcacggccagacacggaatgtaaatttgcacatccttcgaaaagctgccaagttgaaaatggacgagtaatcgcctgctttgattcattgaaaggccgttgctccagggagaactgcaaatatcttcatccacccccacatttaaaaacgcagttggagataaatggacgcaataacttgattcagcagaagaacatggccatgttggcccagcaaatgcaactagccaatgccatgatgcctggtgccccattacaacccgtgccaatgttttcagttgcaccaagcttagccaccaatgcatcagcagccgcctttaatccctatctgggacctgtttctccaagcctggtcccggcagagatcttgccgactgcaccaatgttggttacagggaatccgggtgtccctgtacctgcagctgctgcagctgctgcacagaaattaatgcgaacagacagacttgaggtatgtcgagagtaccaacgtggcaattgcaaccgaggagaaaatgattgtcggtttgctcatcctgctgacagcacaatgattgacaccaatgacaacacagtcactgtgtgtatggattacatcaaagggagatgctctcgggaaaagtgcaaatactttcatccccctgcacatttgcaagccaagatcaaggctgcccaataccaggtcaaccaggctgcagctgcacaggctgcagccaccgcagctgccatgttcccatggtgcacggtgctacgccagccactgtgtccgcagcaacaacatctgccacaagtgttcccttcgctgcaacagccacagccaaccagccccatccttgatgcttctacactgttgggtgcaacatcctgtcctgcagcagcaggaaaaatgatacccataatatctgccgaacatctgactagccacaagtatgttacccagatgtagaattttcatcactaaacaatcatgctaaagaggaaaggacagtgtgcttggttagagtaaaggacgaggtcattagccatattgtatatatcgtcaagcaacacacacaaaagttcctcagccacaagacatccacatattgcatgttaaccagaagaaaagacaacattttccggaaatccactgcacactgttgcctatacactttgtacatttaattgatatttgtgctgaggtgatattcctgtctaaaagaacaacattgtctttcttttctagcacagagttatgcattcaaagatgcatacctagttagtttcctatatattcatgccatcttgaaaagacagactatggtgtaaccatgattctattatgtattggtacgtctgtagaccaagatataattttttaaaaataagtttatttctttcaaggtttacaaataacaaaggtgcaccttgtatttaaaattgccattatagatgagagcgtgcatgcacagtcatttttgtttaagagtaatatttttaatgtaatagattgtaagacgtggtgagggagggatctgacagagatgaatgtgccaagcaaaaccacaactgtgtatattttaaagcacatcatggctttaagtaccatgttgttaaggattctcatgaagtgccatagactgtacatcaaattagagtattatttcttcagtgttattgttttcagagccacattttgttgcatatttgctagtactaatcagtcaaagggcaccattctttttttttttttttgaaaccaaagctgtctcagaaatggccaatttaactttacagtaacaatagacagcacaacacaaactctctcaatacagataaactcacacatactggagatatatatataatagatatatataaaattattttaatgcattgtagtgtaatatttatgcatactatactgtataacatgttattcaaaagggattgccatttctgagacacagtaacaaaaaaatgaggaaattattttgcttctatttatagcctctgtcaaaagtcaaaagactataaatgctttgcaaaaatggtttcacgtttgcttaaatgcttcatcacagtcacattcaaaatagtgactctaaacaaagaagaaagcagcactgtcatcagatgcatgataaaccaaaatatgaaaatgggaaatgtttaattaacctagtaattgggtgggttaagtacatgggtgaattttatatgtgatttttgttttgttttgttttgttcagattaactgcttatagccttagaaagccttttacaaaattaaaaaaaaaatagatgtgcattcagtttttaagaatggaatcatccaaaggaattcctttttttgaggtttggatgttgcagctagtaaaggatatttttgctctgttcagcagttctaaaaattgctgaagtaggggccaggtcactggtagttatagtatggaatgggagaagtgaaagttcagttatagaactttccatacttccaagtttactgcaagtttttatgcttgagagagatgctttctaatataagactgatgtgttgattttactgattgtactgtacatctattaaagccttagattattacattacgggttggaacccataccaatgtaatttcaatcgtgttaagaaagtaatggtgacttcacatgttattgtagttagttacattatagaatattacttatttttcttgttaaaatgtagtttttcatttcctacatttattagattttcattttctattaacaattgaataccatttcagtttatagacttgttttattagattttaccaatgaatttttcaaaatacaaaaaaaagtagtttttccttcataacatactcagttttgaattacatgtagtgtcacatgaatattcgtattgttaactaaatgatttatattttactgatttaatattacagtgtaagaatgtcagtcattgttagttcttgtctagttttcattaaaagaacaaagatcttttatatggatatcttataaatatataatcattgctaagtaagaagttaagttgttgctatcgcaacaatcctggcagacaattgagtaatattttgatgatttattttgtttgtaattagttattataagaagatctagatcctagatattagaataaaatttattttctactgtatccatttcaaatgttaaaatattgtttaatatttttgaaatccctgagtatcaggccttgttataaataagctgcataatcaataaatagaacaagggactttttgttgataatccaaatactcaaagtttacgtaatgaaaattatagcgtgtgtgcaaactcttgagggttgattatgctgcaatttagcatgttggaacgtctagggagaaggttgactttttgcacttctgtatatagtcaaaagagagaaacctgtataatagtaagatcttattttgaataaaaacgtctataattacaaggagttttgttaaggctaatacaatgacagactgagcaaaattgcttgcaaaagtggcacagagttagcactccataccccttcaaacatgttgctttgctttcttgtggacagcttgtagtttgccaggattttttcagctggaaagatacgccatcctttcaaaccctcatgactgacaaaaactccatggggccaaatctgcctgaagatcattaccaaaaatagcaggtacttctaccattaaggtgaaatcatggatcagatattccttacatttttcaaaactactgcatgtttaaaacttcaacaaaaaaagagagaaagaactatactaagaacatatattattcagatcagtttctgccaatttcagtggtttattgttcacaaaaaaatcttcaaaacaagtattgactttcacaaaatttaaatcataaacaggcaaaccaaacagcacactgtagctatagttgttatgtgattgttttttaattgctgtaggatcctgttctttcagcaggtgaaaaataaaacgcagttcaaatttcatggttttaattttcaactcagaagcactcaaaaatgcaaaatgtgataatgggcacttgtttaaaagaattagtgtatccagccttcactccagctggttaaaaatgttgcacttatcagcaaccctaccactttcatctgctgaaaggacaaatgtgcttggttttactattatgtaatcacaacttactttctgcttgtagttgcttaaaattatgtattttgtcttgggctgcaatttgttttatgcttattttattattactgcagtagttgactttgctgtatggaaaaataaagtgaaattgccctaataaaacttctctttcttaagt

SEQ ID NO: 5575 - DNA, 1374 bp, Homo sapiens; identical to SEQ ID NO: 542

SEQ ID NO: 5576 - DNA, 4308 bp, Homo sapiens
agtcttcggggaggagctgcattacacacaggcttcggaggcttccgtggagaagcttggaggtaatggctgtcgtaaatgctagttattttcagagagttctcgaagatttggaataaagccgagccccagaaagacaggtcaaccacagaagtgctgagccaggtaaagaccctgctggacaagcagctggagtgagaatcaagacagctggaccacaggaccagacccagcagtatccatgtaacaggaaaggtccccttgctattcccatcactgggagggggcggagcctcgtcggagccgctcggaagggagctgtacccggccagtattgggggaggggcagcatttcaagaggctgcagctgacaagaagcttcaagcataggttaatatcagagaagcacatgacctgggcaatctgcatgtgatgccaaccaagccttggaaagacagtgcaaccacagaagtgccgagctgggtaaaggccctgctggacaagcagttggagtgagaatcaagacagccggaccacaggaccagacccaccaggatccacatgacagtggtatcttccggtatcatcctattcaaacaacgtgttcaagcatccttggaaaattgaggtggagaacaggccacacaagctgtaaaccctttgtagtcataagacgaaagaggatttgttaagagtattgttttgggtagaacttgcattagcagtgacaaagatagccacctcaacctttggtaataacccttggcacacaaatataaaccataatggagtctgagtatgtcctatgcaactggaaagaccagttgtggccagcaaaagttttgtccagatctgaaacttcatcaaacagtaagaggaaaaaggcattttctctagaagttcaaatactctcactagatgaaaaaattaaattggacagcacagaaacaaagatcctaaataaatctcaaattgaagccattgctgcctcattaggactacagtcagaggacagtgctccacctacagaggaaactgcctatggaagatcactaaaagtggcactgggtattctgaatgagagaacaaatttgagtcaagcaagcacttcagatgaagaggagatcactatgctgtctcaaaatgtaccacaaaaacagtccgattcaccccctcataaaaaataccggaaggatgaaggtgacttaccagggtgtcttgaggaaagggaaaactcagcatgcttgttagcatcttcagagagtgatgattccctgtatgatgataaatcacaagcacccacaatggtcgatactattccaagtgaagtggaaacaaagtcattacaaaactctagctggtgcgagactttcccttcactttcggaagataatgatgaaaaagagaacaagaataagattgatatctcagcagttatgtctgtgcattctgcagtcaaagaggaaagtgcatgtgttaaagatgaaaagtttgctccacctttgtcacctttgtcatcagatatgctcattatgcccaaagctttgaaagaagagagcgaggatacctgcctagagaccctggctgttccctctgaatgctctgctttctcagagaatattgaggatcctggagagggtccctcaaatccatgcttagataccagccagaatcaaccttccatggaatcagagatgggggctgcagcatgccctgggagttgttcaagggaatgcgaggtttcatttagtgcctctaaccctgtctgggattattcacatcttatgagtagtgaaagaaattttcagagactggattttgaagaacttgaggaagaaggtcaagcctctgacaagtcattgcttccaagtcgcattaatctttctctattagatgatgatgaggaagacgaagaacttccacgcttcattttacattatgagacacatccgtttgaaacaggaatgatagtctggtttaaatatcagaaatatccattttggccagcagtgataaaaagtatcagacgaaaagagaggaaagcaagtgtgctttttgttgaggcaaacatgaattctgaaaagaagggcattagagtaaattttagaagattaaagaaatttgattgtaaagagaaacaaatgctagtggacaaagccagggaggattatagtgagagtattgactggtgcatctcactaatttgtgactacagagttagaataggttgtggttctttcacgggctctttgcttgagtattatgctgctgatattagttacccagttaggaaagaaacaaaacaggatactttcaggaacaaatttccaaagctgcataatgaagatgccagggaaccgatggctgtaacttcccagaccaagaaaatgtccttccaaaaaattctccctgaccggatgaaggctgctcgggaccgagccaacaagaacctggtggacttcattgtgaatgcaaagggaacagagaaccatcttctggccattgtaaatggcacaaaaggatccagatggctgaaatcatttttgaatgcaaataggttcacaccctgtattgaaacatactttgaggatgaagatcagttggatgaagtggtgaaatatttacaagaagtctgcaatcaaatagatcaaataatgccaacttggataaaagatgataaaattaaatttatcctagaagttcttctgccagaagcaattatttgttcaatttctgctgttgatgggttagattacgaggcagctgaagcaaagtatctaaaaggaccatgtctaggctacagggaaagagaattatttgatgcaaaaataatatatgaaaagagacgaaaagcaccaacaaatgaagctcactaaatgtgctgaaagttgaaaccatgacagggagctctcatagatactagttgaaaaaagtctctgaacaattctctctaatacatattttctgcaaatgggagcatggataatgtgttcacttttttttgagatctctaggatctgtggttataattacatctttatttccttttcttgcgcttcttcaaagttaattttgtcaacatatttcagcagttctactttcccgtacattttttagaaagcataattcctaaatgattttgaagggaaagtactattttgttttatgacacttttgagtctatgctgtattgttaaatatattgtgcacaattattttaatgttaaaattgcactggtgttagatattaacgaagatgattggaaaaaagtctgaaagatacatcatttctatattccttgcttaatttttataaaatattgggttttcccttaagatagttgaagtatttttcttgccatgcctatttatttttgcaaaaaaattatctgctatatagaaccaaagatagattcgctttgctatatattataactatacttgcttttgcaataaaacaacttgtaattcaaaaatgaagattatctgcatatagtatttatgtgtgtgaataacatcttggcatgcagaaaataattttggctgctttgaacaggattgttcattctacacttccctgaaattccatttttgggagtgtctatccttcaatggctgaatagttccttaaatcagacaagctcctggctatcttcataaccagcagtgagtagatcttcttaatatagctgtctgaccacatgtggaaggcagctagacttattgtatttacagcctggccactctagacatatgaatccaggctgactgcttaagtgcccatctcgtttgatataaactgtagaaaaggcaagcactttgttctgagtcttttatctccaaatacatagttgtctcaaaccaagcaagctttatcaaaatggcttatttgcagaatagttccaatgatataaatgccaactggcaagtcattccaaactgcttgaaggagtagatgaaccagaatctgagaatttggaaataggtcacagaaaaagcctccatttggctaaatatgacaattatctgagtatggttaaatacatacaattaaatgtctgaagccaatgagttgtttattctaacttgaaatatatttttgtgagaataaatgttagaaaagttagtttattttggaaacctgccgtgaaaggaaattctaaaggcttaacatgaaactgtctgcatttctacctgttagacaatggttgctcttgggctcttgttatacagtcatatggctacacgtttatgtaaagtttgcaaaagtttggtgttttgatttataataaaactgttatattattc

SEQ ID NO: 5577 - DNA, 5543 bp, Homo sapiens
gtgagggaagccaaactttttcctatttaaggccaaagcaaaggaatctcagtggctgagttttatgacgggcccggtgctgaagggcagggaacaacttgatggtgctactttgaactgcttttcttttctcctttttgcacaaagagtctcatgtctgatatttagacatgatgagctttgtgcaaaaggggagctggctacttctcgctctgcttcatcccactattattttggcacaacaggaagctgttgaaggaggatgttcccatcttggtcagtcctatgcggatagagatgtctggaagccagaaccatgccaaatatgtgtctgtgactcaggatccgttctctgcgatgacataatatgtgacgatcaagaattagactgccccaacccagaaattccatttggagaatgttgtgcagtttgcccacagcctccaactgctcctactcgccctcctaatggtcaaggacctcaaggccccaagggagatccaggccctcctggtattcctgggagaaatggtgaccctggtattccaggacaaccagggtcccctggttctcctggcccccctggaatctgtgaatcatgccctactggtcctcagaactattctccccagtatgattcatatgatgtcaagtctggagtagcagtaggaggactcgcaggctatcctggaccagctggccccccaggccctcccggtccccctggtacatctggtcatcctggttcccctggatctccaggataccaaggaccccctggtgaacctgggcaagctggtccttcaggccctccaggacctcctggtgctataggtccatctggtcctgctggaaaagatggagaatcaggtagacccggacgacctggagagcgaggattgcctggacctccaggtatcaaaggtccagctgggatacctggattccctggtatgaaaggacacagaggcttcgatggacgaaatggagaaaagggtgaaacaggtgctcctggattaaagggtgaaaatggtcttccaggcgaaaatggagctcctggacccatgggtccaagaggggctcctggtgagcgaggacggccaggacttcctggggctgcaggtgctcggggtaatgacggtgctcgaggcagtgatggtcaaccaggccctcctggtcctcctggaactgccggattccctggatcccctggtgctaagggtgaagttggacctgcagggtctcctggttcaaatggtgcccctggacaaagaggagaacctggacctcagggacacgctggtgctcaaggtcctcctggccctcctgggattaatggtagtcctggtggtaaaggcgaaatgggtcccgctggcattcctggagctcctggactgatgggagcccggggtcctccaggaccagccggtgctaatggtgctcctggactgcgaggtggtgcaggtgagcctggtaagaatggtgccaaaggagagcccggaccacgtggtgaacgcggtgaggctggtattccaggtgttccaggagctaaaggcgaagatggcaaggatggatcacctggagaacctggtgcaaatgggcttccaggagctgcaggagaaaggggtgcccctgggttccgaggacctgctggaccaaatggcatcccaggagaaaagggtcctgctggagagcgtggtgctccaggccctgcagggcccagaggagctgctggagaacctggcagagatggcgtccctggaggtccaggaatgaggggcatgcccggaagtccaggaggaccaggaagtgatgggaaaccagggcctcccggaagtcaaggagaaagtggtcgaccaggtcctcctgggccatctggtccccgaggtcagcctggtgtcatgggcttccccggtcctaaaggaaatgatggtgctcctggtaagaatggagaacgaggtggccctggaggacctggccctcagggtcctcctggaaagaatggtgaaactggacctcagggacccccagggcctactgggcctggtggtgacaaaggagacacaggaccccctggtccacaaggattacaaggcttgcctggtacaggtggtcctccaggagaaaatggaaaacctggggaaccaggtccaaagggtgatgccggtgcacctggagctccaggaggcaagggtgatgctggtgcccctggtgaacgtggacctcctggattggcaggggccccaggacttagaggtggagctggtccccctggtcccgaaggaggaaagggtgctgctggtcctcctgggccacctggtgctgctggtactcctggtctgcaaggaatgcctggagaaagaggaggtcttggaagtcctggtccaaagggtgacaagggtgaaccaggcggtccaggtgctgatggtgtcccagggaaagatggcccaaggggtcctactggtcctattggtcctcctggcccagctggccagcctggagataagggtgaaggtggtgcccccggacttccaggtatagctggacctcgtggtagccctggtgagagaggtgaaactggccctccaggacctgctggtttccctggtgctcctggacagaatggtgaacctggtggtaaaggagaaagaggggctccgggtgagaaaggtgaaggaggccctcctggagttgcaggaccccctggaggttctggacctgctggtcctcctggtccccaaggtgtcaaaggtgaacgtggcagtcctggtggacctggtgctgctggcttccctggtgctcgtggtcttcctggtcctcctggtagtaatggtaacccaggacccccaggtcccagcggttctccaggcaaggatgggcccccaggtcctgcgggtaacactggtgctcctggcagccctggagtgtctggaccaaaaggtgatgctggccaaccaggagagaagggatcgcctggtgcccagggcccaccaggagctccaggcccacttgggattgctgggatcactggagcacggggtcttgcaggaccaccaggcatgccaggtcctaggggaagccctggccctcagggtgtcaagggtgaaagtgggaaaccaggagctaacggtctcagtggagaacgtggtccccctggaccccagggtcttcctggtctggctggtacagctggtgaacctggaagagatggaaaccctggatcagatggtcttccaggccgagatggatctcctggtggcaagggtgatcgtggtgaaaatggctctcctggtgcccctggcgctcctggtcatccaggcccacctggtcctgtcggtccagctggaaagagtggtgacagaggagaaagtggccctgctggccctgctggtgctcccggtcctgctggttcccgaggtgctcctggtcctcaaggcccacgtggtgacaaaggtgaaacaggtgaacgtggagctgctggcatcaaaggacatcgaggattccctggtaatccaggtgccccaggttctccaggccctgctggtcagcagggtgcaatcggcagtccaggacctgcaggccccagaggacctgttggacccagtggacctcctggcaaagatggaaccagtggacatccaggtcccattggaccaccagggcctcgaggtaacagaggtgaaagaggatctgagggctccccaggccacccagggcaaccaggccctcctggacctcctggtgcccctggtccttgctgtggtggtgttggagccgctgccattgctgggattggaggtgaaaaagctggcggttttgccccgtattatggagatgaaccaatggatttcaaaatcaacaccgatgagattatgacttcactcaagtctgttaatggacaaatagaaagcctcattagtcctgatggttctcgtaaaaaccccgctagaaactgcagagacctgaaattctgccatcctgaactcaagagtggagaatactgggttgaccctaaccaaggatgcaaattggatgctatcaaggtattctgtaatatggaaactggggaaacatgcataagtgccaatcctttgaatgttccacggaaacactggtggacagattctagtgctgagaagaaacacgtttggtttggagagtccatggatggtggttttcagtttagctacggcaatcctgaacttcctgaagatgtccttgatgtgcatctggcattccttcgacttctctccagccgagcttcccagaacatcacatatcactgcaaaaatagcattgcatacatggatcaggccagtggaaatgtaaagaaggccctgaagctgatggggtcaaatgaaggtgaattcaaggctgaaggaaatagcaaattcacctacacagttctggaggatggttgcacgaaacacactggggaatggagcaaaacagtctttgaatatcgaacacgcaaggctgtgagactacctattgtagatattgcaccctatgacattggtggtcctgatcaagaatttggtgtggacgttggccctgtttgctttttataaaccaaactctatctgaaatcccaacaaaaaaaatttaactccatatgtgttcctcttgttctaatcttgtcaaccagtgcaagtgaccgacaaaattccagttatttatttccaaaatgtttggaaacagtataatttgacaaagaaaaatgatacttctctttttttgctgttccaccaaatacaattcaaatgctttttgttttatttttttaccaattccaatttcaaaatgtctcaatggtgctataataaataaacttcaacactctttatgataacaacactgtgttatattctttgaatcctagcccatctgcagagcaatgactgtgctcaccagtaaaagataacctttctttctgaaatagtcaaatacgaaattagaaaagccctccctattttaactacctcaactggtcagaaacacagattgtattctatgagtcccagaagatgaaaaaaattttatacgttgataaaacttataaatttcattgattaatctcctggaagattggtttaaaaagaaaagtgtaatgcaagaatttaaagaaatatttttaaagccacaattattttaatattggatatcaactgcttgtaaaggtgctcctcttttttcttgtcattgctggtcaagattactaatatttgggaaggctttaaagacgcatgttatggtgctaatgtactttcacttttaaactctagatcagaattgttgacttgcattcagaacataaatgcacaaaatctgtacatgtctcccatcagaaagattcattggcatgccacaggggattctcctccttcatcctgtaaaggtcaacaataaaaaccaaattatggggctgcttttgtcacactagcatagagaatgtgttgaaatttaactttgtaagcttgtatgtggttgttgatcttttttttccttacagacacccataataaaatatcatattaaaattc

SEQ ID NO: 5578 - DNA, 5617 bp, Homo sapiens
atttcatttcttccactaaagcgtttgcggagacttcaaggtataatctatcccagatcctttcccagagagaaacttggcgatcacgttttcacatgatgctcacgctcagggcgcttcaattatccctccccacaaagataggtggcgcgtgtttcagggtctctcgtctctctcctacagaaaagaaaaagaaaaaaatgtcattagaagaggcgtaacacgtcagtccgtccccaggtttgtgtttcctggagtggccgaaagagatcagttctaacctgctctgcaggaataacggtcctgcctcccgacactcttggcgaggtttttgtacagtttgctccgggagctgtttcttcgcttccacctttttctcccccacacttcgcggcttcttcatgctttttcttctcaccatttctggccaaaactacaaacaagacttcgcagatcgagcctgcgtgctgccgaagcagggcgccgagtccatgcgaactgccatctgatccgctcttatcaatgaagcagccgatcatggcggatggcccccggtgcaagaggcgcaaacaagccaatcccaggaggaaaaacgtggtgaactatgacaatgtagtggacacaggttctgaaacagatgaggaagacaagcttcatattgctgaggatgacggtattgccaaccctctggaccaggagacgagtccagctagtgtgcccaaccatgagtcctccccacacgtgagccaagctctgttgccaagagaggaagaggaagatgaaataagggagggtggagtggaacacccctggcacaacaacgagattctacaagcctctgtagatggtccagaagaaatgaaggaagactatgacactatggggccagaagccacgatccagaccgcaattaacaatggtacagtgaagaatgcaaattgcacatcagattttgaggaatactttgccaaaagaaaactggaggaacgcgatggtcatgcagtcagcatcgaggagtaccttcagcgcagtgacacagccattatttacccagaagcccctgaggagctgtctcgccttggcacgccagaggccaatgggcaagaagaaaatgacctgccacctggaactccagatgcttttgcccaactgctgacctgcccctactgcgaccggggctacaagcgcttgacatcactgaaggagcacatcaagtaccgccacgagaagaatgaagagaacttttcctgccctctctgtagctacacgtttgcctaccgcacccagctcgagcggcatatggtgacacacaagccagggacagatcagcaccaaatgctaacccaaggagcaggtaatcgcaagttcaaatgcacagagtgtggcaaggccttcaaatataaacaccatctgaaagaacacctgcgaattcacagtggtgaaaaaccttacgagtgcccaaactgcaagaaacgtttctcccattctggttcctacagttcgcacatcagcagcaagaaatgtattggtttaatctctgtaaatggccgaatgagaaacaatatcaagacgggttcttcccctaattctgtttcttcttctcctactaattcagccattacccagttaagaaacaagttggagaatggaaaaccacttagtatgtctgaacagacaggcttacttaaaattaaaacagaaccactagacttcaatgactataaagttcttatggctacacacgggtttagtggcactagtccctttatgaatggtgggcttggagccaccagccctttaggagttcatccatctgctcagagtccaatgcagcacttaggtgtagggatggaagcccctttacttgggtttcccaccatgaatagtaatttaagtgaggtacaaaaggttctacagattgtggacaatactgtttccaggcaaaaaatggactgcaaggctgaagaaatttcaaagttgaaaggttatcacatgaaggatccatgctctcaacctgaggaacaaggagttacttctcctaatattccgcctgtcggtcttccggtagtgagtcataatggtgccactaaaagtattattgactatacgttggaaaaagtcaatgaagccaaagcttgcctccagagcttgactactgactcaaggagacagatcagtaatataaagaaagagaagctacgtactttaatagatttggtcactgatgacaaaatgattgagaaccacaacatatccactccattttcatgccagttctgtaaagaaagttttcctggccccatccctttgcatcagcatgaacgttacctttgtaagatgaatgaagagatcaaggcggtcctgcagcctcatgaaaacatagtccccaacaaagccggagtttttgttgataataaagccctcctcttgtcatctgtactttctgagaaaggaatgacaagccccatcaacccatacaaggaccacatgtctgtactcaaagcatactatgctatgaacatggagcccaactccgatgaactgctgaaaatttccattgctgtgggccttcctcaggaatttgtgaaggaatggtttgaacaacgaaaagtctaccagtactcaaattccaggtccccatccctggaaagaagctccaagccgttagctcccaacagtaaccctcccacaaaagactctttattacccaggtctcctgtaaaacctatggactccataacatcaccatctatagcagaactccacaacagtgttacgaattgtgatcctcctctcaggctaacaaaaccttcccattttaccaatattaaaccagttgaaaaattggaccactccaggagtaatactccttctcccttaaatctttcctccacatcttctaaaaactcccacagtagttcatacactccaaacagcttctcttctgaggagctccaggctgagcctttagacttgtcattaccaaaacaaatgaaagaacccaaaagtattatagccacaaagaacaaaacaaaagctagtagcatcagtttagatcataacagtgtttcttcctcatctgaaaactcagatgagcctctgaacttgacttttatcaagaaggaattttcaaattcaaataatctggacaacaaaagcactaacccagtgttcagcatgaacccatttagtgccaaacctttatacacagctcttccacctcaaagcgcatttccccctgctactttcatgccaccagtccagaccagtattcctgggctacgaccatacccaggactggatcagatgagcttcctaccacatatggcctacacctacccaactggagcagctacttttgctgatatgcagcaaaggagaaagtaccagcggaaacaaggatttcagggagaattgcttgatggagcacaagactacatgtcaggcctagatgatatgacagactccgactcctgtctgtctcgcaaaaagatcaagaagacagagagtggcatgtatgcatgtgacttatgtgacaagacattccagaaaagcagttcccttctgcgacataaatacgaacacacaggaaaaagaccacatcagtgtcagatttgtaagaaagcgtttaaacacaagcaccaccttatcgagcactcaaggcttcactcgggcgagaagccctatcagtgtgataaatgtggcaagcgcttctcacactcgggctcgtactcgcagcacatgaatcacaggtattcctactgcaagcgggaggcggaggagcgggaagcggcggagcgcgaggcgcgcgagaaagggcacttggaacccaccgagctgctgatgaaccgggcttacttgcagagcattacccctcaggggtactctgactcggaggagagggagagtatgccgagggatggcgagagcgagaaggagcacgagaaagaaggcgaggatggctacgggaagctgggcagacaggatggcgacgaggagttcgaggaggaagaggaagaaagtgaaaataaaagtatggatacggatcccgaaacgatacgagatgaagaagagactggagatcactccatggacgatagttcggaggatgggaaaatggaaaccaaatcagaccacgaggaagacaatatggaagatggcatgtaataaactactgcattttaagcttcctatttttttttccagtagtattgttacctgcttgaaaacactgctgtgttaagctgttcatgcacgtgcctgacgcttccaggaagctgtagagagggacagaaggggcggttcagccaagacagatgtagacggagttggagctgggtattgttaaaaactgcattatgcaaaaattttgtacagtgttaaggcctaaaaactgtgtggttcagagactaattcctgtgtttaatagcatttatactttaagcacaactagaaaattgtaagaattgcactctacttatgtatcactacaaactttaaaaaactatgtctaatttatattaatacattttaaaaaggtgcccgcactaccatacatcagtatttttattattattattgttattcctttttaatttaatgtgctcgcactacaatgcatcagtattatgattcctctgtactttcctttcgctattcatcaatttcccattttttttttcagcttaagtaaccacacaattttaggcctcaatttttttttttttctgtgaaggaacttgaagtgatgcatgtgtgaatttaagataccgaagtcttaaagtgacctggacgtgaaggaaaaagtaagatgagaaataaagaaagcctttgtaaggtggttttaaaagccttatatgcaaaccttttaatctgtgtttctgcaagtgccatccttgtacagtgttaagagggtaacatgggttacctttgcaccagcttcagtgttaagctcaccctgttctttgaagcacccatgtcagtattagaagaataggcagcagttccttagtttacatatgtttgtgcaattattttctgtacttttttgttcattaattttgtcagtattacaccaaactgtttttgcaacaaaaaaattttttttgcattcatttaattttaggtcaaataacattttatttatgtggctcattttatatttcctaattttatttatttcatactgtagtgtacagtattatagttcttcaatatatagatatattttagtaaaaaaggaacatgacgttgatcatttgggcaaattttacgtaaagagaagagcatttattgtgttttggaacattaattgtgagatgggatttttcaattttattattttatttttgtttttttccaattactggaaattccaaatttgggaacttttgatacgatcttgtgaaaacactgtattttcgactgaaaattccactttcttcatcttgttttttagctaaaaagagggactgttaaatacaatgtatgataccatgacaaaaatctttcctgaattgtctttgtaaaagtattattgaattttcaatttgtaatttcttttgaaaatgaccatgctcgaataaaaatgtagccaaactaagaatgtagttaatga

SEQ ID NO: 5579 - DNA, 2136 bp, Homo sapiens; identical to SEQ ID NO: 224

SEQ ID NO: 5580 - DNA, 1305 bp, Homo sapiens
tgcttccagtcccaggagcacaaacatcacatggtgtgtgggatacaagaggctgctgagaattacaggaagttattccaggaaatattgaacacatcgagggagaaacttgaagcagctaaaagcatattgactgatgagcaagaaagaatggcgatgattcaggaagaggaacaaaattttaaaaagatgattgagtctgagtatagtatgagactccggttgttgaatgaagagtgtgagcagaatctccagagacagcaggaatgcatatctgacttgaacctgagagaaacccttctgaatcaagcgatcaagcttgccaccgagctagaggagatgttccaggaaatgctacagagactgggccgtgtggggagagagaacatggagaaactgaaggagagtgaagccagggcttctgaacaggtccgcagcctcctaaagctcatcgtggagcttgagaaaaagtgtggggaaggcaccttggcattgctcaagtgccttgatcttgaaattcggcctccagaactgcgagaaatgaatttctgctgtgcagaagctactcagtctatgaatgcaaaatactctttagaaaggagcaagtcactgctgcttgagcatctggagcccgctcatatcacagacctgagtttatgccacataagaggactcagcagcatgttcagagtactccagagacatttaacattggatcctgaaacagctcatccctgcctggcactatctgaggacctgagaactatgagattgagacatgggcagcaggatggggctggcaacccagaaagattggatttcagtgccatggtgctggctgcggagagcttcacctcagggaggcactactgggaggtggacgtggaaaaggcaaccaggtggcaagtgggcatataccacggctctgcagacgcgaagggcagcacggccagagcttccggagagaaagtcttgctcacggggtcggtgatggggaccgagtggactctctgggtcttcccccctctgaaaaggctcttcctggaaaagaagttggacacagttggcgttttccttgactgcgaacacgggcagatatcattctacaatgtgaccgagatgtccctcatttacaatttctcccattgcgccttccaaggagctctcaggcctgtgttttccctctgtatcccaaatggagacacaagtccagactccctcaccatcttacaacatggtccttcttgtgatgctactgttagcccttaatcttctgtgtgtaaaatccaagaccacgagacacca

SEQ ID NO: 5581 - DNA, 3027 bp, Homo sapiens
gctttattgtttgcttgttttgttccggagtcggggccgggagggagtgcaggaggagggatccaagcttccaagcctctgctccgctctccttctatccagttggtctttagggcactgaaggaaactcttcttcagaaataaccttttaacttttcttctgtcagctgcctgccaatcacggagccagaggctgaggggaggctttgagccggtctgcgagtccggaaggcaaagatcgcgaagcttggcgctccagaacgctcagggggcaggtgacacagtcgtgggttccccggcgggcgctggcttgacagtttcctccccgcccactggcaggggagcgccccgccgggctgcacgcgcgcgcgcgcaggggggcataaaagccgcggccgcgcggagacgcggagctcgcccaccgcccgccccagcagtggctgcaccatgcacgtgaacggcaaagtggcgctggtgaccggcgcggctcagggcataggcagagcctttgcagaggcgctgctgcttaagggcgccaaggtagcgctggtggattggaatcttgaagcaggtgtacagtgtaaagctgccctggatgagcagtttgaacctcagaagactctgttcatccagtgcgatgtggctgaccagcaacaactgagagacacttttagaaaagttgtagaccactttggaagactggacattttggtcaataatgctggagtgaataatgagaaaaactgggaaaaaactctgcaaattaatttggtttctgttatcagtggaacctatcttggtttggattacatgagtaagcaaaatggaggtgaaggcggcatcattatcaatatgtcatctttagcaggactcatgcccgttgcacagcagccggtttattgtgcttcaaagcatggcatagttggattcacacgctcagcagcgttggctgctaatcttatgaacagtggtgtgagactgaatgccatttgtccaggctttgttaacacagccatccttgaatcaattgaaaaagaagaaaacatgggacaatatatagaatataaggatcatatcaaggatatgattaaatactatggaattttggacccaccattgattgccaatggattgataacactcattgaagatgatgctttaaatggtgctattatgaagatcacaacttctaagggaattcattttcaagactatgatacaactccatttcaagcaaaaacccaatgaacagcttatgtgttagccatagctgaaaataagcacaaatagcttatattcagatcctatcttcatttgaatatagcttttaaatgaaatgttacagtttgaagttttccttcatgcacttggtgataaacgttttctaaatttttagttaagtatatggataaaaagttatgaactattaaaaatgtgatgtggaccaaaggctaggttgtaatcttgatagtctaaaaaatgatcaaaacaaatgattttcaaggaatattcaatattctgcctttcagaaagtgtatttatatctgtgcttcataaatattaatgttcttcagaacatcattttaaaggagatacttgaattgttatttaaatcaaaccagatgtaaaacactcacatacaagttcatactttaaaagaggaaagctacttaacaatgacaaatatttcacaataataatttttacttatataccatctttcaactgaacatttcagttcttccaagagcttcttagagtagtatattttgggggcagtcaaggaataaactacagtgtaaacatatcccagatgaaaactgctgtatggaaaaatgacagaaagtaactgattgacactgttgattcacagttcagcctcctatctgggaaagacatttctttcctctgctcactttaagaacttttaccgactccaaaaatctcaggaattaaacttttaacagttacagcaataaagaatagttagtactccaaaaatattatatttaagatgctcaacaagaaaaaaatgcaaatgtaatatttttttcaaattacttctttattgacttgtccaaatttcaaaagtgcctacccttcaataaaacttttttattctgatctccataaattacttagtcttctatgtatagctatcaaggaaataaaaccaattttgccacagccacaactgtaaatgtttttgtacccatgctgaaactcataacaacacagacataaaaatagctgtgaggttttgctttttttgttgtcagctatcttaagaatcattaaatacacctgctttgggtaaaactctttgcaagcagtaattaacactagtaacagtgaaagcacaagatttccaaatcagtcgttttctcaaaaaaatatcgtataagtgactcatcctgtctgctaactccagacctcccagcttgaagccaaatctttccatgtgagattgatatggatttcctagaagtactggaatgttgtcatatcttgccctattttaattctgctatagaaaacaattgccttcacttttaaggagtaatttgaatattaataactctggtctagattttcatataatgtattaaagacaaagtagtgaacatcaatgaacatctgatagagataaactgtaatcaggcataagcttgtttgtatgttctggcagtgactaatcagtaaatgatgtcggtttgcccagtatcacttatcttctgtatttttcctctgtcgtgtaaatagtataaccttttcatttatggacaattttttggactagtagccttcaatatacattctgctttgaattaattttttcaaatcaataaattatgtagacatttaaaatcaaatatcaagtagaattgaaaaatgtgagttacataagttaaaaacttactttaaatcttaccttctataggtagctctaaataaattcatatggttatatggcatctctggtgtatactgattgagaaaataattaaactgaagttaggggagggg

SEQ ID NO: 5582 - DNA, 1181 bp, Homo sapiens
cccggggccgcgcggctgcctgggaggctccgggccagccgcggtccagagcgcgcgaggttcggggagctcggccaggctgctggtacctgcgtccgcccggcgagcaggacaggctgctttggtttgtgacctccaggcaggacggccatcctctccagaatgaagatcttcttgccagtgctgctggctgcccttctgggtgtggagcgagccagctcgctgatgtgcttctcctgcttgaaccagaagagcaatctgtactgcctgaagccgaccatctgctccgaccaggacaactactgcgtgactgtgtctgctagtgccggcattgggaatctcgtgacatttggccacagcctgagcaagacctgttccccggcctgccccatcccagaaggcgtcaatgttggtgtggcttccatgggcatcagctgctgccagagctttctgtgcaatttcagtgcggccgatggcgggctgcgggcaagcgtcaccctgctgggtgccgggctgctgctgagcctgctgccggccctgctgcggtttggcccctgaccgcccagaccctgtcccccgatcccccagctcaggaaggaaagcccagccctttctggatcccacagtgtatgggagcccctgactcctcacgtgcctgatctgtgcccttggtcccaggtcaggcccaccccctgcacctccacctgccccagcccctgcctctgccccaagtggggccagctgccctcacttctggggtggatgatgtgaccttccttgggggaccgcggaagggacgagggttccctggagtcttacggtccaacatcaggaccaagtcccatggacatgctgacagggtccccagggagaccgtgtcagtagggatgtgtgcctggctgtgtacgtgggtgtgcagtgcacgtgagagcacgtggcggcttctgggggccatgtttggggagggaggtgtgccagcagcctggagagcctcagtccctgtagccccctgccctggcacagctgcatgcacttcaagggcagcctttgggggttggggtttctgccacttccgggtctaggccctgccccaaatccagccagtcctgccccagcccacccccacattggagccctcctgctgctttggtgcctcaaataaatacagatgtcccccagct

SEQ ID NO: 5583 - DNA, 6265 bp, Homo sapiens
ttagattaaattaacaccatttgaaagagaacattgttttcatcatgaatgctaataaagatgaaagacttaaagccagaagccaagattttcacctttttcctgctttgatgatgctaagcatgaccatgttgtttcttccagtcactggcactttgaagcaaaatattccaagactcaagctaacctacaaagacttgctgctttcaaatagctgtattccctttttgggttcatcagaaggactggattttcaaactcttctcttagatgaggaaagaggcaggctgctcttgggagccaaagaccacatctttctactcagtctggttgacttaaacaaaaattttaagaagatttattggcctgctgcaaaggaacgggtggaattatgtaaattagctgggaaagatgccaatacagaatgtgcaaatttcatcagagtacttcagccctataacaaaactcacatatatgtgtgtggaactggagcatttcatccaatatgtgggtatattgatcttggagtctacaaggaggatattatattcaaactagacacacataatttggagtctggcagactgaaatgtcctttcgatcctcagcagccttttgcttcagtaatgacagatgagtacctctactctggaacagcttctgatttccttggcaaagatactgcattcactcgatcccttgggcctactcatgaccaccactacatcagaactgacatttcagagcactactggctcaatggagcaaaatttattggaactttcttcataccagacacctacaatccagatgatgataaaatatatttcttctttcgtgaatcatctcaagaaggcagtacctccgataaaaccatcctttctcgagttggaagagtttgtaagaatgatgtaggaggacaacgcagcctgataaacaagtggacgacttttcttaaggccagactgatttgctcaattcctggaagtgatggggcagatacttactttgatgagcttcaagatatttatttactccccacaagagatgaaagaaatcctgtagtatatggagtctttactacaaccagctccatcttcaaaggctctgctgtttgtgtgtatagcatggctgacatcagagcagtttttaatggtccatatgctcataaggaaagtgcagaccatcgttgggtgcagtatgatgggagaattccttatccacggcctggtacatgtccaagcaaaacctatgacccactgattaagtccacccgagattttccagatgatgtcatcagtttcataaagcggcactctgtgatgtataagtccgtatacccagttgcaggaggaccaacgttcaagagaatcaatgtggattacagactgacacagatagtggtggatcatgtcattgcagaagatggccagtacgatgtaatgtttcttggaacagacattggaactgtcctcaaagttgtcagcatttcaaaggaaaagtggaatatggaagaggtagtgctggaggagttgcagatattcaagcactcatcaatcatcttgaacatggaattgtctctgaagcagcaacaattgtacattggttcccgagatggattggttcagctctccttgcacagatgcgacacttatgggaaagcttgcgcagactgttgtcttgccagagacccctactgtgcctgggatggaaatgcatgctctcgatatgctcctacttctaaaaggagagctagacgccaagatgtaaaatatggcgacccaatcacccagtgctgggacatcgaagacagcattagtcatgaaactgctgatgaaaaggtgatttttggcattgaatttaactcaacctttctggaatgtatacctaaatcccaacaagcaactattaaatggtatatccagaggtcaggggatgagcatcgagaggagttgaagcccgatgaaagaatcatcaaaacggaatatgggctactgattcgaagtttgcagaagaaggattctgggatgtattactgcaaagcccaggagcacactttcatccacaccatagtgaagctgactttgaatgtcattgagaatgaacagatggaaaatacccagagggcagagcatgaggaggggaaggtcaaggatctattggctgagtcacggttgagatacaaagactacatccaaatccttagcagcccaaacttcagcctcgaccagtactgcgaacagatgtggcacagggagaagcggagacagagaaacaaggggggcccaaagtggaagcacatgcaggaaatgaagaagaaacgaaatcgaagacatcacagagacctggatgagctccctagagctgtagccacgtagttttctacttaatttaaagaaaagaattccttacctataaaaacattgccttctgttttgtatatcccttatagtaattcataaatgcttcccatggagttttgctaaggcacaagacaataatctgaataagacaatatgtgatgaatataagaaagggcaaaaaattcatttgaaccagttttccaagaacaaatcttgcacaagcaaagtataagaattatcctaaaaatagggggtttacagttgtaaatgttttatgttttgagttttggaatttattgtcatgtaaatagttgagctaagcaagccccgaatttgatagtgtataaggtgctttattccctcgaatgtccattaagcatggaatttaccatgcagttgtgctatgttcttatgaacagatatatcattcctattgagaaccagctaccttgtggtagggaataagaggtcagacacaaattaagacaactcccattatcaacaggaactttctcagtgagccattcactcctggagaatggtataggaatttggagaggtgcattatttctttctggccactggggttaaatttagtgtactacaacattgatttactgaagggcactaatgtttcccccaggatttctattgactagtcaggagtaacaggttcacagagagaagttggtgcttagttatgtgttttttagagtatatactaagctctacagggacagaatgcttaataaatactttaataagatatgggaaaatattttaataaaacaaggaaaacataatgatgtataatgcatcctgatgggaaggcatgcagatgggatttgttagaagacagaaggaaagacagccataaattctggctttggggaaaactcatatccccatgaaaaggaagaacaatcacaaataaagtgagagtaatgtaatggagctcttttcactagggtataagtagctgccaatttgtaattcatctgttaaaaaaaatctagattataacaaactgctagcaaaatctgaggaaacataaattcttctgaagaatcataggaagagtagacattttatttataaccaatgatatttcagtatatattttctctcttttaaaaaatatttatcatactctgtatattatttctttttactgcctttattctctcctgtatattggattttgtgattatatttgagtgaataggagaaaacaatatataacacacagagaattaagaaaatgacatttctggggagtggggatatatatttgttgaataacagaacgagtgtaaaattttaacaacggaaagggttaaattaactctttgacatcttcactcaaccttttctcattgctgagttaatctgttgtaattgtagtattgtttttgtaatttaacaataaataagcctgctacatgtaaaaagaaccaaactcacaatattaacataaacatctttcatattttgttagtactttcaaatgttttcaatttgactttccctctgaatatgcatggtgtgtttcctgtctgtttaagcagaactcacctttccttcttgtaacacagaacccttagccttcttctgttttgccttttcacgccctttatagtgtgaaatgaaaaattagtcacttcctcacatggaaggcagcttttcagaaaataacagacattgctcgtttctcatgcattctacatatcttgaaagaaaagtctgtgagaaaaccctgtgattagagggcaacttaatgcaagatctgtggctctatgttgagagcattctctctctgttatttttattttatttgcattgcttacctatctcaaagtagtcaaactgatatatgagattgagtactcccttttgatattatactgatgaatatttgtaggtgtttcactataaggaacagctaaggaataattttaataaaagtgaaccagaacaaatcactcatttaaaaagtaattcagaagaacagtgtggcatgatcagacttctaattgaatagcgtaacaacagtgtttgtaattatagatttgcttggacaaaatattccaggaactcatagcgagctcaaagcaattaagtgggaacatttttaatttaaaaaaaatttccaaatatttgtgggtccgacagtaatgatcaaaatatgaatgactttggaaaatttacatgaagctcaagtgttaggattgacttatgaaaataaattttatttctatccaaatttgaatgtccaaaccattttttagttacttctttctaatcctagttattcagacaaaatttggaaacttattttatgaccacatctaatattctggctgctttggatacaatactcttgatttatgataattagttaaaatatattaaaaatattattagtaaaataaaatttcacacaataaaaaacaacatagagtacacatatttatatgtatttttaaagataaagaatatctaaaatgtgtttttttcttagctttttagttgtctagaacatttagagaaagagtatgaatatattaaatccacaaacacactatatacttcctcaccactgactattttatcaaatttgccttaaaataatgaaaaagaaaagtatagttaatggtttcaaatatgctaagaaattgactctgcggaggggatcttaaaatgcctgtttactcatgttttcgtatttttcttgtctctaatacttttgtctttgtctgccttgtgtgttcttttctgaatttcatttcagcaatttatgctgctaaatagaatcccgcatgtctgcattcatttacattcaacttattgtaaattttgagattttatttagaaatgaattgtctaattaatttatgtagagtccttttttccaaagagctcaaaacactacatccacattattgacttttggaaaccaaccaaattacttaagaaatggaaaagtagtcacagagaaatttagtaatttgcaaaagccacaacagtagtggaagaattaaaattcataaagtctcatcattctgttggctaaaataatgctctttacaatatgctggctacaaaatggtcttactcttgaattttgcttttggttcatattttggttcttcatattctagtatgttttgttcctgctgaattttacagactcagctaaacaataagttattagtagtcacttgttttcattatcataattgaatttccaagaacaacttgatatcattcagctgtccaaaaaataataagagcattcattaaatactgattttcttaaacttaaatgttgtatttcatatttatttatataatacaaatggaaatcaaaactgaaatagcctccctttagaatgtcacatttttcttagaaaacattttggaattggttaaccttattgggaatggataatttagaaacaaaccaaaaaaaaaaaaagatatttgaagtgtttttataggagatgtatttttatcatagtaaatgatcacaattttaaataattcatcttacaagtcaggtaaaataaaatcgattcccagattccatacattaggagtgcaaagacaggatcatacacatgacttatacctctcatttaaatattttatagtataaagtatttatggaaagggtttgagatagatgatttttgggaaagggcaaaatgtgtcagatgccctagttaatcatgtaatttaattctggtattgtgagtggttagcaatcaattttgaatttataattctgctattttaaaagaaatgtagtcttgtagtatgaaataattaaaaattgttaaatgtatattttggttgtattataataaaatgcaaacatgactgttctatgattataaaaa

SEQ ID NO: 5584 - DNA, 5543 bp, Homo sapiens
agtgtgccaccgccatctttaccggctgtggctcagcatggtcagtgccgtttaacctttattgtggtggagtccaccccgctgtgggcctcagataaccctgtacaaaggggaatggagattgcctgtatccacctagattcataagctgccctgaggcgatcttggcatcaagaaagacagcattgaggcacatctcaccatcagcttcagaggatgtcagcctttgatatgtcccatgatttctttttctgcttaacttcagaatgggaaatacaacctagaaccaaacggtcatcacttcagcagggttttttgaagaatcaaatattcactgggatacaaatgcagacaagaagctacagtggatggaaactctgtgagaattgtggagaggtcttcagtgaacagttttgccttaagacacacatgagagctcagaatggagggaacacttttgagggtaattgttatggaaaagacagcatcagtgtgcacaaggaagcctctattggacaagaactttccaaatttaatccatgtggaaaagtcttcaccttaactccaggccttgctgtgcatcttgaaattctcaatggaagacaaccctacaaatgtaaggaatgtggaaaaggctttaagtattttgcaagccttgataatcacatgggaatccacattggagagaaactctgtgaatttcaggaatgtgagagagccatcacaacttcctcacacttaaagcagtgtgtagcagttcatactggaaagaaatccgaaaagactaagaactgtgggaaatccttcactaatttttctcaactttctgcacatgcaaaaactcataaaggagagaagtcctttgaatgtaaagaatgtggaagatcctttagaaattcctcatcctttaatgttcacattcaaattcacactggaataaaaccacacaaatgtacggaatgtgggaaagccttcactagatcaactcaccttactcaacatgtaagaactcacactggaataaaaccctatgaatgtaaggaatgtggccaagccttcactcagtacacgggccttgctatacacatacgaaatcacactggagagaaaccctatcagtgtaaggaatgtgggaaagccttcaatagatcttcaacgcttactcaacatagaagaattcacacaggagagaagccttatgaatgtgttgaatgtgggaagaccttcattacttcttcccatcgtagtaaacatttgaaaactcacagtggagaaaggtaaatgcaagatatgtgggaaagaatttctgtattcctcaccccacctgtgaactcctaccagagagaaaccttttgtatgtaaagaatttgggaaagcatttgctctttcctcatgcctaagtatgcatgaaagaattcacactggggagaaatactatgaatgtaaggatatgagtgttgttaccatttagcccattggttgccatctttaattattggcagtgcaaagatcatcagattagtcctaaatgccttttggaggttgtaatggctcacagattggccttagatgcatcccgagggtctgaaattaaacctacaggttctgaatacaacatcatggttacctgagtctgggcatctgtgaagaagggtcatggatggtgaggtcagtactgcaggctgcctcaccttggtgattagattcctaagatcatagcattaacaagttctgtacgagataaatcatgcagattgatcccagcccctgttggttagtggctgccagtgtggcacattcatgtcaaaatttaccagaagccaagatgatgtaggccccagaggtggattgttaaaaagatgctcctccaaggttctcttctgttcccatggatcctgcagagcatgtcaggagtgaaaccatccataactgccagtgccctttcacagctgattatttctatgtccccttcttgtaaaataagaagtgtgacaaccttgactgttctgttctgtcttctctgtccattttaggtggcacaatgtaagtggcagtgtctcttatagtataatccagtctctcttctcacttctgttaagatggctgatatagtccatgaatcccactcatgatctctttatcaaatgattgttcagccacactttgaggattctcttcagtacaagttttctaatttttgcagtatggataggctgagaattttccaaatctccaagttctggttcctttttccttaacaatttcttctgcaattcaggtctccttttgcatttttgccgagaccagctgggtcgtggagaccctaacccagtggctctagaggaattaagacaaagacacagaaatatagtgcagagtgggaatcggggctcacagccttcagagctgagcttgaacagagtttgacccacatatttattgacagtaagcctgtgataaacattattcctatagattgtagatcagctataagtattccttatgagaaagaaagggacaggctctggcttgttatctgcaacaggaatatgtccttaaggcacaaatcactcatgctattgtttgtggtttaggaatgccttgagcagttttccagttttctgccctgggtgggccaggtgttgcttgccctcattctggtaaaccagcagcctccagcatgggcgtcatagccatcacgagcatgtcacagtgctgcagagattttgtttatggccagtttctcattgcctgtttatggccagatttggggggcctgttcccagcacattttcctgtaagcactcaggaataatgaagcttcctgtgtcctttaacactttaattacagatcttagtgatacataccattttatctgtctcaagctctaccttccgtaaaatgctagaatacagttctgccaagttcttcaccactttatatcaagggttgtcttttcttcatttcccaatagcatgttcctcattccccaatgacacctcaccagaataacccttaccaaccttatttccagcttgcacatcagaatttttccagcctctactcatttgtcagtttcaaagctgcttcacatttttagtttttttgtttgtttttaattgcagtacctcacttctcagtaccaatatctgccttagtcagctcagacaaccataagagaataccgcagaccaaatggcttagaaattaatttaattttaaatcaatgaggttaaaaacacaggattttttttttttttttttttttttttttgagatggagttttgctcttgttgcccaggctggagtgcaatggtatgatcttggctcaccgcaacctccacctcctgagttccagtgattctcctgcctcaccctcagtagctgggattattggcatgcaccacaaaccttagctaagtttgtatttttagtagagacagggtttctccatgttggttaggctgatctccatgttggtcagatctgacctttggtgatccacctgccttggcctcccaaagtgctgggattacaggcctgagccaccgtatctggcccaaaacacaaatttatattctcacatatctggaggctggaagtctgagatcagagtgccagcatggtcaacctctagtgagagctctcttcctggcatgtaagtgcccacttcctcatgttttcacacgatggagaccaacaaataggtcggtcggtctcccccctccccgcccccttctcttttcacatacagtcacattgaggtttggaacttcatatgaaatttggggggtcactgtgtgtgtgtgtgtgtgtgtgtgtatgtgtatatatatatacatatatatacacatatgtatgtatacctaactcctaaagtggaacagtaagagtcattatttatagattatctgattctctatgtggaaagagaaaagaatcatattaagtactttggactgaacaatgacccccaaaattcgtatgatgatgaagctctctctaaatattttcttgctttactggactgattttaacccgctgcacaacaccaactaaaagtagtaataccagcatacttgtctttgcagttctggtgagatatgcactctattttgttggtttggctgtaggcttttatttcttttttattttttgaagaggttatgtcctgtcagggaaccagccccgatattcacataggttcttttctattttccctaagtgtcagccaacttgagaaataaagggacagagtacaaaagagagaaattttaaagctgggtgtccggggcagacatcacatgtcggtaggttccgtgatgccccacaagccgcaaaaaccagcaagtttttattagggattttcaaaaggggagggagtgtgcaaataggtgtgggtcacagacatcaagtactttacaaggtaatagaatatcacaaggcaagtggaggcagggcgagatcacaggaccaaggtgaaattaaaattgctaatgaagttttgggcaccattgtcattgataacatcttatcaggagacggttttgagatcaactggtctgactaaaatttattaggtgggaatttcctcttcctaataagcctgggagtgctatgggagactggggtctatttcacccctgcagtctcgaccataagagatggctacacccaggggggccagttcagagacccactcccaggtgtgcattctctttctcaaggatgttccttgctgagaaaaagaattcagtgatatttctcccatttgcttgtgaaagaagagaaatgtggctttgttccacctggctcaccggcggtcagaatttaaggttatctctcttgtttcctaaacattgctgttatcctgttcttttttcaaggtgcccagatttcatattgctcaaacacacatgctgtataatttgtgcagttaatgcaattattacagggtcctgaggtaatatacatcctcctcagctgacaggattgagagattaaagtaaagacaggcataggaaatcacaagggtattgactggggaagtgataagtgtccatgaaatctttacaatttatgtttagagattgcagtaaagacaggcataagaaattataaaagtattaatttggggaactaataaatgtccatgaaaccttcacaatccatgtttttctgccatggcttcagccagtccccccgtttggggtccctgacttcctgcaacaatgtcctgcaggaaaagttttttctttatatccagtttttacatgatgaattatttcccaatatttcatagtttatgaggctgaattcctcttgaatttattaaatgcttccttcacatcctctgtgatgatcatgtttatttactgataaaactcaatacctagaactgcacctagctcatgatggtacctaataaatacttcaatgaaatgatgtggtgatgcatgcctatagttttagctacttgggagggtggcctgagcccaggggttctagaccagcttaggcaacatagcaagaccccatctc

SEQ ID NO: 5585 - DNA, 3970 bp, Homo sapiens
acaagggcgaggggcggggcctgcgtcgcgctgcgggcacgtcgccgcgcgtcttcagtatttaatgtctctgtgttccacccgcctgggctagcacgtgggggagctgcggaagcgcggcgctgcgggccgggccgcggggcacagccgggggccggcggcggcgcgcggactccgcatcccgcaccccgatggtagccgaggagctggtgtaattacttcaagcctccaggatggcaatccagttccgttcgctcttccccttggcattgcctgggatgctggcgctcctcggctggtggtggtttttctctcgtaaaaaaggccatgtcagcagccatgatgagcagcaggtggaggctggtgctgtgcagctgagggctgaccctgccatcaaggaacctctccccgtggaagacgtctgtcccaaagtagtgtccacaccccccagtgtcacagagcctccagaaaaggaactgtccaccgtgagcaagctgcctgcagagcccccagcattgctccagacacacccaccttgccgaagatcagagtcctcgggcattcttcctaacaccacagacatgagattgcgaccaggaacacgcagagatgacagtacaaagctggagctagccctgacaggtggtgaagccaaatcgattcctctagagtgccccctttcatccccaaagggtgtactattctccagcaaatcagctgaggtgtgtaagcaagattcccccttcagcagggtgccaaggaaggtccagccaggctaccccgtagtccccgcagagaagcgtagctctggggagagggcaagagagacaggtggggccgaagggactggtgatgccgtgttgggggaaaaggtgcttgaagaagctctgttgtctcgggagcatgtcttggaattggagaacagcaagggccccagcctggcctctttagagggggaagaagataaggggaagagcagctcatcccaggtggtggggccagtgcaggaggaagagtatgtagcagagaagttgccaagtaggttcatcgagtcggctcacacagagctggcaaaggacgatgcggcgccagcacccccagtcgcagacgccaaagcccaggatagaggtgtcgagggagaactgggcaatgaggagagcttggatagaaatgaggagggcttggatagaaatgaggagggcttggatagaaatgaggagagcttggatagaaatgaggagggcttggatagaaatgaggagattaagcgggctgccttccagataatctcccaagtgatctcagaagcaaccgaacaggtgctggccaccacggttggcaaggttgcaggtcgtgtgtgtcaggccagtcagctccaagggcagaaggaagagagctgtgtcccagttcaccagaaaactgtcttgggcccagacactgcggagcctgccacagcagaggcagctgttgccccgccggatgctggcctccccttgccaggcctaccagcagagggctcaccaccaccaaagacctacgtgagctgcctgaagagccttctgtccagccccaccaaggacagtaagccaaatatctctgcacaccacatctccctggcctcctgcctggcactgaccacccccagtgaagagttgccggaccgggcaggcatcctggtggaagatgccacctgtgtcacctgcatgtcagacagcagccaaagtgtccctttggtggcttctccaggacactgctcagattctttcagcacttcagggcttgaagactcttgcacagagaccagctcgagccccagggacaaggccatcaccccgccactgccagaaagtactgtgcccttcagcaatggggtgctgaagggggagttgtcagacttgggggctgaggatggatggaccatggatgcggaagcagatcattcaggaggttctgacaggaacagcatggattccgtggatagctgttgcagtctcaagaagactgagagcttccaaaatgcccaggcaggctccaaccctaagaaggtcgacctcatcatctgggagatcgaggtgccaaagcacttagtcggtcggctaattggcaagcaggggcgctatgtgagttttctgaagcaaacatctggtgccaagatctacatttcaaccctgccttacacccagagcgtccagatctgccacatagaaggctctcaacatcatgtagacaaagcgctgaacttgattgggaagaagttcaaagagctgaacctcaccaatatctacgctcccccattgccttcactggcactgccttctctgccgatgacatcctggctcatgctgcctgatggcatcaccgtggaggtcattgtggtcaaccaggtcaatgccgggcacctgttcgtgcagcagcacacacaccctaccttccacgcgctgcgcagcctcgaccagcagatgtacctctgttactctcagcctggaatccccaccttgcccaccccagtggaaataacggtcatctgtgccgcccctggtgcggacggggcctggtggcgagcccaagtggttgcctcctacgaggagaccaacgaagtggagattcgatacgtggactacggcggatataagagggtgaaagtagacgtgctccggcaaatcaggtctgactttgtcaccctgccgtttcagggagcagaagtccttctggacagtgtgatgcccctgtcagacgatgaccagttttcaccggaagcagatgccgccatgagcgagatgacggggaatacagcactgcttgctcaggtgacaagttacagtccaactggtcttcctctgattcagctgtggagtgtggttggagatgaagtggtgttgataaaccggtccctggtggagcgaggccttgcccagtgggtagacagctactacacaagcctttgacccccatgctgcttcctgagagtctttttttgcactgttgaaattgggcttggcactcaagtcaaagatgaacatcggaataacaaacattgtcctctccagaaagtcctttctttctccatactgtagtcctattgagaagacatttcgtctctgagaaaaaaggatggaactatgggttctcttcgcaaagccaaaggatagtgtttaacaagccagctggcttatgctggttctcagctgtttaaaaaaaaaaaaaaaaaggaatagaaacagtttcaaccagattgtcctattccccctgttccattcccctcttcttccttctatctccttccccggcaaaaaccaaacaaactggcagacaggccagggatgtatgttgcttgcttgagagggtttcttttacttcaaaatctttcttcagggagcaagacatgaactgactaattggtatccactacttgtacagcttacataaatgagttgatgatatttaaccagtttttataaacttcatttaggtctctaaacacagactttttaaattgcaactgtaaatatgaaatggtcatcacatctgaccttggtcagtggggaggggaactggtatcctgccaagcctggttgtaatttgtaaccattttctatttgtgcaaactctgtaaatatgtgtttaaacaaatgtaatattttgtacaagatacactggagaacaaagggaactcaagattcttccagccacatgtcacctgtaggtagaagtaaactctgcagtgcagcttctgctcttggcccctctggccagggcccctgtggcttcctgcacactggacaggtgactgtatggtagagactgtgatctgggaactttttgctgtacaaatctgtttaaaaaaaaaaaaaagtaactcattgaattaacttgcagtggtgtgtttgattcttttttagactggcttcagcattgtgcagtttaaaaataagtaagtaacttacataaatcttcaattgtatgaactgca

SEQ ID NO: 5586 - DNA, 5822 bp, Homo sapiens
gctttgcccagtagttggaaagtgaactcgactcgtgatggttctcctgtcactttggttgatagcagccgctctggtagaggttaggacttcagctgatggacaagctggtaatgaagaaatggtgcaaatagatttaccaataaagagatatagagagtatgagctggtgactccagtcagcacaaatctagaaggacgctatctctcccatactctttctgcgagtcacaaaaagaggtcagcgagggacgtgtcttccaaccctgagcagttgttctttaacatcacggcatttggaaaagattttcatctgcgactaaagcccaacactcaactagtagctcctggggctgttgtggagtggcatgagacatctctggtgcctgggaatataaccgatcccattaacaaccatcaaccaggaagtgctacgtatagaatccggagaacagagcctttgcagactaactgtgcttatgttggtgacatcgtggacattccaggaacctctgttgccatcagcaactgtgatggtctggctggaatgataaaaagtgataatgaagagtatttcattgaacccttggaaagaggtaaacagatggaggaagaaaaaggaaggattcatgttgtctacaagagatcagctgtagaacaggctcccatagacatgtccaaagacttccactacagagagtcggacctggaaggccttgatgatctaggtactgtttatggcaacatccaccagcagctgaatgaaacaatgagacgccgcagacacgcgggagaaaacgattacaatatcgaggtactgctgggagtggatgactctgtggtccgtttccatggcaaagagcacgtccaaaactacctcctgaccctaatgaacattgtgaatgaaatttaccatgatgagtccctcggagtgcatataaatgtggtcctggtgcgcatgataatgctgggatatgcaaagtccatcagcctcatagaaaggggaaacccatccagaagcttggagaatgtgtgtcgctgggcgtcccaacagcaaagatctgatctcaaccactctgaacaccatgaccatgcaatttttttaaccaggcaagactttggacctgctggaatgcaaggatatgctccagtcaccggcatgtgtcatccagtgagaagttgtaccctgaatcatgaggatggtttttcatctgcttttgtagtagcccatgaaacgggccatgtgttgggaatggagcatgatggacaaggcaacaggtgtggtgatgagactgctatgggaagtgtcatggctcccttggtacaagcagcattccatcgttaccactggtcccgatgcagtggtcaagaactgaaaagatatatccattcctatgactgtctccttgatgacccttttgatcatgattggcctaaactcccagaacttcctggaatcaattattctatggatgagcaatgtcgttttgattttggtgttggctataaaatgtgcaccgcgttccgaacctttgacccatgtaaacagctgtggtgtagccatcctgataatccctacttttgtaagactaaaaagggacctccacttgatgggactgaatgtgctgctggaaaatggtgctataagggtcattgcatgtggaagaatgctaatcagcaaaaacaagatggcaattgggggtcatggactaaatttggctcctgttctcggacatgtggaactggtgttcgtttcagaacacgccagtgcaataatcccatgcccatcaatggtggtcaggattgtcctggtgttaattttgagtaccagctttgtaacacagaagaatgccaaaaacactttgaggacttcagagcacagcagtgtcagcagcgaaactcccactttgaataccagaataccaaacaccactggttgccatatgaacatcctgaccccaagaaaagatgccacctttactgtcagtccaaggagactggagatgttgcttacatgaaacaactggtgcatgatggaacgcactgttcttacaaagatccatatagcatatgtgtgcgaggagagtgtgtgaaagtgggctgtgataaagaaattggttctaataaggttgaggataagtgtggtgtctgtggaggagataattcccactgccgaaccgtgaaggggacatttaccagaactcccaggaagcttgggtaccttaagatgtttgatataccccctggggctagacatgtgttaatccaagaagacgaggcttctcctcatattcttgctattaagaaccaggctacaggccattatattttaaatggcaaaggggaggaagccaagtcgcggaccttcatagatcttggtgtggagtgggattataacattgaagatgacattgaaagtcttcacaccgatggacctttacatgatcctgttattgttttgattatacctcaagaaaatgatacccgctctagcctgacatataagtacatcatccatgaagactctgtacctacaatcaacagcaacaatgtcatccaggaagaattagatacttttgagtgggctttgaagagctggtctcagtgttccaaaccctgtggtggaggtttccagtacactaaatatggatgccgtaggaaaagtgataataaaatggtccatcgcagcttctgtgaggccaacaaaaagccgaaacctattagacgaatgtgcaatattcaagagtgtacacatccactctgggtagcagaagaatgggaacactgcaccaaaacctgtggaagttctggctatcagcttcgcactgtacgctgccttcagccactccttgatggcaccaaccgctctgtgcacagcaaatactgcatgggtgaccgtcccgagagccgccggccctgtaacagagtgccctgccctgcacagtggaaaacaggaccctggagtgagtgttcagtgacctgcggtgaaggaacggaggtgaggcaggtcctctgcagggctggggaccactgtgatggtgaaaagcctgagtcggtcagagcctgtcaactgcctccttgtaatgatgaaccatgtttgggagacaagtccatattctgtcaaatggaagtgttggcacgatactgctccataccaggttataacaagttatgttgtgagtcctgcagcaagcgcagtagcaccctgccaccaccataccttctagaagctgctgaaactcatgatgatgtcatctctaaccctagtgacctccctagatctctagtgatgcctacatctttggttccttatcattcagagacccctgcaaagaagatgtctttgagtagcatctcttcagtgggaggtccaaatgcatatgctgctttcaggccaaacagtaaacctgatggtgctaatttacgccagaggagtgctcagcaagcaggaagtaagactgtgagactggtcaccgtaccatcctccccacccaccaagagggtccacctcagttcagcttcacaaatggctgctgcttccttctttgcagccagtgattcaataggtgcttcttctcaggcaagaacctcaaagaaagatggaaagatcattgacaacagacgtccgacaagatcatccaccttagaaagatgagaaagtgaaccaaaaaggctagaaaccagaggaaaacctggacaacctctctcttcccatggtgcatatgcttgtttaaagtggaaatctctatagatcgtcagctcattttatctgtaattggaagaacagaaagtgctggctcactttctagttgctttcatcctccttttgttctgcattgactcatttaccagaattcattggaagaaatcaccaaagattattacaaaagaaaaatatgttgctaagattgtgttggtcgctctctgaagcagaaaagggactggaaccaattgtgcatatcagctgactttttgtttgttttagaaaagttacagtaaaaattaaaaagagataccaatggtttacactttaacaagaaattttggatatggaacaaagaattcttagacttgtattcctatttatctatattagaaatattgtatgagcaaatttgcagctgttgtgtaaatactgtatattgcaaaaatcagtattattttaagagatgtgttctcaaatgattgtttactatattacatttctggatgttctaggtgcctgtcgttgagtattgccttgtttgacattctataggttaattttcaaagcagagtattacaaaagagaagttagaattacagctactgacaatataaagggttttgttgaatcaacaatgtgatacgtaaattatagaaaaagaaaagaaacacaaaagctatagatatacagatatcagcttacctattgccttctatacttataatttaaaggattggtgtcttagtacacttgtggtcacagggatcaacgaatagtaaataatgaactcgtgcaagacaaaactgaaaccctctttccaggacctcagtaggcaccgttgaggtgtcctttgtttttgtgtgtgtgtgttcttttttaattttcgcattgttgacagatacaaacagttatactcaatgtactgtaataatcgcaaaggaaaaagttttgggataacttatttgtatgttggtagctgagaaaaatatcatcagtctagaattgatatttgagtatagtagagctttggggctttgaaggcaggttcaagaaagcatatgtcgatggttgagatatttattttccatatggttcatgttcaaatgttcacaaccacaatgcatctgactgcaataatgtgctaataatttatgtcagtagtcaccttgctcacagcaaagccagaaatgctctctccagggagtagatgtaaagtacttgtacatagaattcagaactgaagatatttattaaaagttgattttttttcttgatagtatttttatgtactaaatatttacactaatatcaattacatattttggtaaactagagagacataattagagatgcatgctttgttctgtgcatagagacctttaagcaaactactacagccaactcaaaagctaaaactgaacaaatttgatgttatgcaaacatcttgcatttttagtagttgatattaagttgatgacttgtttcccttcaaggaaacattaaattgtatggactcagctagctgttcaatgaaattgtgaattagaaacatttttaaaagtttttgaaagagataagtgcatcatgaattacatgtacatgagaggagatagtgatatcagcataatgattttgaggtcagtacctgagctgtctaaaaatatattatacaaactaaaatgtagatgaattaacctctcaaagcacagaatgtgcaagaacttttgcattttaatcgttgtaaactaacagcttaaactattgactctatacctctaaagaattgctgctactttgtgcaagaactttgaaggtcaaattaggcaaattccagatagtaaaacaatccctaagccttaagtcttttttttttcctaaaaattcccatagaataaaattctctctagtttacttgtgtgtgcatacatctcatccacaggggaagataaagatggtcacacaaacagtttccataaagatgtacatattcattatacttctgacctttgggctttcttttctactaagctaaaaattcctttttatcaaagtgtacactactgatgctgtttgttgtactgagagcacgtaccaataaaaatgttaacaaaatata

SEQ ID NO: 5587 - DNA, 2019 bp, Homo sapiens
atgtctcccgcccggctccggccccgactgcacttctgcctggtcctgttgctgctgctggtggtgccggcggcatggggctgcgggccgggtcgggtggtgggcagccgccggcgaccgccacgcaaactcgtgccgctcgcctacaagcagttcagccccaatgtgcccgagaagaccctgggcgccagcggacgctatgaaggcaagatcgctcgcagctccgagcgcttcaaggagctcacccccaattacaatccagacatcatcttcaaggacgaggagaacacaggcgccgaccgcctcatgacccagcgctgcaaggaccgcctgaactcgctggctatctcggtgatgaaccagtggcccggtgtgaagctgcgggtgaccgagggctgggacgaggacggccaccactcagaggagtccctgcattatgagggccgcgcggtggacatcaccacatcagaccgcgaccgcaataagtatggactgctggcgcgcttggcagtggaggccggctttgactgggtgtattacgagtcaaaggcccacgtgcattgctccgtcaagtccgagcactcggccgcagccaagacgggcggctgcttccctgccggagcccaggtacgcctggagagtggggcgcgtgtggccttgtcagccgtgaggccgggagaccgtgtgctggccatgggggaggatgggagccccaccttcagcgatgtgctcattttcctggaccgcgagcctcacaggctgagagccttccaggtcatcgagactcaggaccccccacgccgcctggcactcacacccgctcacctgctctttacggctgacaatcacacggagccggcagcccgcttccgggccacatttgccagccacgtgcagcctggccagtacgtgctggtggctggggtgccaggcctgcagcctgcccgcgtggcagctgtctctacacacgtggccctcggggcctacgccccgctcacaaagcatgggacactggtggtggaggatgtggtggcatcctgcttcgcggccgtggctgaccaccacctggctcagttggccttctggcccctgagactctttcacagcttggcatggggcagctggactccgggggagggtgtgcattggtacccccagctgctctaccgcctggggcgtctcctgctagaagagggcagcttccacccactgggcatgtccggggcagggagctgaaaggactccaccgctgccctcctggaactgctgtactgggtccagaagcctctcagccaggagggagctggccctggaagggacctgagctgggggacactggctcctgccatctcctctgccatgaagatacaccattgagacttgactgggcaacaccagcgtcccccacccccgtcgtggtgtagtcatagagctgcaagctgagctggcgaggggatggttgttgacccctctctcctagagaccttgaggctggcacggcgactcccaactcagcctgctctcactacgagttttcatactctgcctcccccattggggagggcccattccatccatcttaggcccctttgggtgggcttgcgcctcagttgatgctgctaaattccctgggagccagcatggatctggctggacccgatgctgtccagaactgggaaggccacaggggtggggcagccatcccggccattctgaggtatgacattcctccccggccacactcctcaagacacatccagagactgttgctgtctgtgggcagagttctgtgttctggccaatgtgaccgtagtgccggggactgggggaggtgggttggatgtgcttgccacccccccggctaagctcccccttctgctgaaccatgatccccaccccctccgccggtcagtctcccataccttatttattggagtggagggggaagcccatgggagaattttggggatgttttggtcttttcttccttttgtaataaaaattatttaagttgttaga

SEQ ID NO: 5588 - DNA, 2889 bp, Homo sapiens; identical to SEQ ID NO: 246

SEQ ID NO: 5589 - DNA, 5031 bp, Homo sapiens; identical to SEQ ID NO: 2139

SEQ ID NO: 5590 - DNA, 3275 bp, Homo sapiens
agaagaaatgaggtggggagaaagagagagagagagagagatcgagattgagatcttaagaaagagagcaaggaggaagagcccggtggggagcaggtccttctcccccacccccctacccccaactcccactggagccgcattgagactgtaggcaccaccgggcgccgaatggctgttttctaactgggatcctcggtgacgtatggctgcctgccccttggcagctgtctttatggaccagtaggcagagcgaaattgacgctgacaagacttttgcatcttggaagggactgtaatctactgtagtgaagaacagagcctctcaatcagacgggtgtaaataagagacggaggggagtccaaaagaaaaggaagaggaggaaaaacaagtgtgtgttggggggaacagggggaaaagcatttttggtggatggtatgaagccagccatggaaactgcagccgaggaaaatactgaacaaagccaagagagaaaagtgaacagcagagctgaaatggaaattggcaggtaccactggatgtacccaggctcaaagaaccaccagtaccatcccgtgccaaccctgggggacagggctagccccttgagcagtccaggctgctttgaatgctgcatcaagtgtctgggaggagtcccctacgcctccctggtggccaccatcctctgcttctccggggtggccttattctgcggctgtgggcatgtggctctcgcaggcaccgtggcgattcttgagcaacacttctccaccaacgccagtgaccatgccttgctgagcgaggtgatacaactgatgcagtatgtcatctatggaattgcgtcctttttcttcttgtatgggatcattctgttggcagaaggcttttacaccacaagtgcagtgaaagaactgcacggtgagtttaaaacaaccgcttgtggccgatgcatcagtggaatgttcgttttcctcacctatgtgcttggagtggcctggctgggtgtgtttggtttctcagcggtgcccgtgtttatgttctacaacatatggtcaacttgtgaagtcatcaagtcaccgcagaccaacgggaccacgggtgtggagcagatctgtgtggatatccgacaatacggtatcattccttggaatgctttccccggaaaaatatgtggctctgccctggagaacatctgcaacacaaacgagttctacatgtcctatcacctgttcattgtggcctgtgcaggagctggtgccaccgtcattgccctgatccacttcctcatgatactgtcttctaactgggcttacttaaaggatgcgagcaaaatgcaggcttaccaggatatcaaagcaaaggaagaacaggaactgcaagatatccagtctcggtcaaaagaacaactcaattcttacacataaatgtttgccagagtgtttcggccgacgtatttacagctctgacaaatcatcagacagctgctctgcagtacagatgtgtatcccaccaaactaatgtagatgtacaaacacttcactgtctgtctcaagctgctgggatgtatctctaggaaaaccttccagtgggtaaatctttttctttagaacaaatattggaggtttcatgttagccattttaaaaggcaacactttgacaaaatgatcgttcatactttgggaatttgtggcatgttcacatttattgctagggcaattctaccaagacactcaatggaatatgtcacactccttaatagggacctgtgactccttaataaggacctgtgacatgcccagcatcaagggataagaccgtaaattcacatatatgccatctgtcctcaagtgttatctacataggaaataaaatggaattgatgtaaagttccatttctgacagctgacatttattaaactttggatcaaagataatgtgattcttatgattgatttctcaaactagcttttccctcccaagtccaggacccattaatttcctgagccaatcagaaatatatttttcaataatgctaaaattagctacaattctgctgaccctactattaaagaatctggatgctggactcactgacaagctttccagaagcaattttataacagatttcattttaacaaaatactgatccaattttcattattcttgagaaatgtcagctttgccttaatgagtatttgctttaaatttctaagaatttatatcataactagagacccaaatatctttcacagaattttgttccataaatgtttttcttaattattaagaagtgttaccttattaaaatgaccaccattctaaaccatttttcagtggtctggatacgaagtttacagtttcataccaactatctaaaacctaattgcaaattgaccacagacctctaacctcctacttttatagacttgaatacttaagtaatttaaattagggttggtatttcatttttttcttatctaaatcttagtttcctggaataataaagtttgatgttcagcaagagaactgcttgagtttaagccattttcaaaagaaacttgccttttacattattgtgttccagaacattaagtgactgtaggtactgggtattagtgatggtaaactttgtgttgctctttatgaaatgatccatataactgttgggtgcatcagtgcttttcaaaggggctgcttactatagggttaactatgtatattcattgttaagagttaacttgtggtttggctgtttcctggattttataacatacatgtgcagaaatgtattcaaatgaaaggaagcatacctttatcaagatgctattaaaattgaacatcaagtataatatttcatttggattctcttttttggttaatgcctaaaaatgcctatttgggatttttttttttttttaaattaagagaagctctcttctgtgtagaacagttgttccaaaatagcttagtgttttgttttcctgttgcatgacagatttaactattctttccagcagtggaggtgctgtcagagtccagtgttctagaagaggcagtgtctaaagcctaattttacttttctaattctggtagctattaccaggaatttttgaaagttttgtttaagtagtctaatattttttatgtaaagagcattaaattttgctatgtataaatttttgtaacctaacagtgaatcaatattttctatcagtgccaagggcttcctgtagttctattcaagtgttacaataaatatttgtagataatagtc

SEQ ID NO: 5591 - DNA, 4135 bp, Homo sapiens
gtgctttttagtggccgcgtcccaggatagctggaaggttaggacgctcttgcggtcccagagtggagtggaaggtctggagctttgggaggagacggggaggacagactggaggcgtgttcctccggagttttctttttcgtgcgagccctcgcgcgcgcgtacagtcatcccgctggtctgacgattgtggagaggcggtggagaggcttcatccatcccacccggtcgtcgccggggattggggtcccagcgagacctccccgggagaagcagtgcccaggaggttttctgaagccggggaagctgtgcagccgaagccgccgccgcgccggagcccgggacaccggccaccctccgcgccacccaccctcgccggctccggcttcctctggcccaggcgccgcgcggacccggcagctgtctgcgcacgccgagctccacggtgaaaaaaaagtgaaggtgtaaaagcagcacaagtgcaataagagatatttcctcaaatttgcctcaagatggaaaccctttgcctcagggcatccttttggctggcactggttggatgtgtaatcagtgataatcctgagagatacagcacaaatctaagcaatcatgtggatgatttcaccacttttcgtggcacagagctcagcttcctggttaccactcatcaacccactaatttggtcctacccagcaatggctcaatgcacaactattgcccacagcagactaaaattacttcagctttcaaatacattaacactgtgatatcttgtactattttcatcgtgggaatggtggggaatgcaactctgctcaggatcatttaccagaacaaatgtatgaggaatggccccaacgcgctgatagccagtcttgcccttggagaccttatctatgtggtcattgatctccctatcaatgtatttaagctgctggctgggcgctggccttttgatcacaatgactttggcgtatttctttgcaagctgttcccctttttgcagaagtcctcggtggggatcaccgtcctcaacctctgcgctcttagtgttgacaggtacagagcagttgcctcctggagtcgtgttcagggaattgggattcctttggtaactgccattgaaattgtctccatctggatcctgtcctttatcctggccattcctgaagcgattggcttcgtcatggtaccctttgaatataggggtgaacagcataaaacctgtatgctcaatgccacatcaaaattcatggagttctaccaagatgtaaaggactggtggctcttcgggttctatttctgtatgcccttggtgtgcactgcgatcttctacaccctcatgacttgtgagatgttgaacagaaggaatggcagcttgagaattgccctcagtgaacatcttaagcagcgtcgagaagtggcaaaaacagttttctgcttggttgtaatttttgctctttgctggttccctcttcatttaagccgtatattgaagaaaactgtgtataacgagatggacaagaaccgatgtgaattacttagtttcttactgctcatggattacatcggtattaacttggcaaccatgaattcatgtataaaccccatagctctgtattttgtgagcaagaaatttaaaaattgtttccagtcatgcctctgctgctgctgttaccagtccaaaagtctgatgacctcggtccccatgaacggaacaagcatccagtggaagaaccacgatcaaaacaaccacaacacagaccggagcagccataaggacagcatgaactgaccacccttagaagcactcctcggtactcccataatcctctcggagaaaaaaatcacaaggcaactgtgagtccgggaatctcttctctgatccttcttccttaattcactcccacacccaagaagaaatgctttccaaaaccgcaagggtagactggtttatccacccacaacatctacgaatcgtacttctttaattgatctaatttacatattctgcgtgttgtattcagcactaaaaaatggtgggagctgggggagaatgaagactgttaaatgaaaccagaaggatatttactacttttgcatgaaaatagagctttcaagtacatggctagcttttatggcagttctggtgaatgttcaatgggaactggtcaccatgaaactttagagattaacgacaagattttctactttttttaagtgatttttttgtccttcagccaaacacaatatgggctcaagtcacttttatttgaaatgtcatttggtgccagtattttttaactgcataatagcctaacatgattatttgaacttatttacacatagtttgaaaaaaaaaagacaaaaatagtattcaggtgagcaattagattagtattttccacgtcactgtttatttttttaaaacacaaattctaaagctacaacaaatactacaggcccttaaagcacagtctgatgacacatttggcagtttaatagatgttactcaaagaattttttaagaactgtattttattttttaaatggtgttttattacaagggaccttgaacatgttttgtatgttaaattcaaaagtaatgcttcaatcagatagttctttttcacaagttcaatctgtttttcatgtaaattttgtatgaaaaatcaatgtcaagtaccaaaatgttaatgtatgtgtcatttaactctgcctgagactttcagtgcactgtatatagaagtctaaaacacacctaagagaaaaagatcgaatttttcagatgattcagaaattttcattcaggtatttgtaatagtgacatatatatgtatatacatatcacctcctattctcttaatttttcttaaaatgttaactggcagtaagtcttttttgatcattcccttttccatataggaaacataattttgaagtggccagatgagtttatcatgtcagtgaaaaataattacccacaaatgccaccagaacttacgattcttcacttcttggggttttcagtatgaacctaactccccaccccaacatctccctcccacattgtcaccatttcaaagggcccacagtgacttttgctgggcattttcccagatgtttacagactgtgagtacagcagaaaatcttttactagtgtgtgtgtgtatatatataaacaattgtaaatttcttttagcccatttttctagactgtctctgtggaatatatttgtgtgtgtgatatatgcatgtgtgtgatggtatgtatggatttaatctaatctaataattgtgccccgcagttgtgccaaagtgcatagtctgagtaaaatctaggtgattgttcatcatgacaacctgcctcagtccattttaacctgtagcaaccttctgcattcataaatcttgtaatcatgttaccattacaaatgggatataagaggcagcgtgaaagcagatgagctgtggactagcaatatagggttttgtttggttggttggtttgataaagcagtatttggggtcatattgtttcctgtgctggagcaaaagtcattacactttgaagtattatattgttcttatcctcaattcaatgtggtgatgaaattgccaggttgtctgatatttctttcagacttcgccagacagattgctgataataaattaggtaagataatttgttgggccatattttaggacaggtaaaataacatcaggttccagttgcttgaattgcaaggctaagaagtactgcccttttgtgtgttagcagtcaaatctattattccactggcgcatcatatgcagtgatatatgcctataatataagccataggttcacaccattttgtttagacaattgtctttttttcaagatgctttgtttctttcatatgaaaaaaatgcattttataaattcagaaagtcatagatttctgaaggcgtcaacgtgcattttatttatggactggtaagtaactgtggtttactagcaggaatatttccaatttctacctttactacatcttttcaacaagtaactttgtagaaatgagccagaagccaaggccctgagttggcagtggcccataagtgtaaaataaaagtttacagaaaccttg

SEQ ID NO: 5592 - DNA, 2180 bp, Homo sapiens
gggtgattggcttggctggacctgaatgatgcggctgtgattgctgaattgtctgggcaggtttggagtctctggcaagctcccctgactgtgcatccctctggagacgaagaggagggggaggcctgtcctctctgggatccattggtcacatccccctgaggattcccgaatgcctacctccagtgtcgtcaacatggagttctgaagtccatgtggctcttcacagtgaatcaggtgttaaggaagatgcagagacgccacagcagcaacacggataacattccacctgaaagaaaccgcagccaggcgctcagctccgaggcgagtgtggatgaaggtggcgtctttgagagtctgaaggcagaggcagcctccccaccagcgctcttctcgggcttatcaggcagcctccccaccagctcgttcccctccagcctggtgctgggctcctcggctggcggcggggacgtgttcatccagatgcccgcgtccagggaggaaggagggggccggggcgaggggggcgcctaccaccaccgccagccccaccaccatttccaccatggcggccaccgcgggggctccctgctgcagcacgtgggtggggaccaccgggggcactcggaggagggaggcgacgagcagcctgggacgcccgcccccgccctgtccgagctgaaggctgtgatctgctggctccagaaaggactccccttcatcctgatcctcctggccaaactgtgctttcagcataagctcggcattgctgtgtgcatcgggatggccagcaccttcgcctatgccaactccacgcttcgagaacaggtctcactgaaggagaagaggtcagtgctggtcatcttgtggatcctggcctttctggcggggaacaccctctatgtgctttatacattcagctccgagattgcaccacagcactccaacctgggtgacagagtgagtgagactctgtctaaaaaaaaaaagaaagaaagaagggagggagggaggaaggaaggaaggaaggaaagaaagaaaggtcagctttggcccagatgtggttaccccttggtctcctgtctttatgtctttctcctcttcctattctgtcatctccctcacttaagtctcaggcctgtcagcagctcctgtggacattgccatcccctctggtagccttcagagcaaacaggacaacctatgttatggatgtttccaccaaccagggtagtggcatggagcaccgtaaccatctgtgcttctgtgatctctatgacagagccacttctccacctctgaaatgttccctgctctgaaatctggcatgagatggcacaggtgaccacgcagaagccaccagaatcttgcctgccctattcctcctcccaagtctgttctcttattgtcaacctcagcacaacaggctggcgccaatggcattacagagaaagcaatctgtgtggctagtgggcagattaccatgcaagccccaggagaaatggaggagctttgtagccacctcgctgtcagccagtattaacatgtccccttccccctgccccgccgtagattcaggacatttgcccctgtgtgccaccaaaccaggactttccccttggcttggcatccctggctctctcctggtacccagcaagacgtctgttccagggcagtgtagcatctttcaagctccgttactatggcgatggccatgatgttacaatcccacttgcctgaataatcaagtgggaaggggaagcagagggaaatggggccatgtgaatgcagctgctctgttctccctaccctgaggaaaaaccaaagggaagcaacaggaacttctgcaactggtttttatcggaaagatcatcctgcctgcagatgctgttgaaggggcacaagaaattggagctggagaagattgatgaaagtgcaggtgtgtaaggaaatagaacagtctgctgggagtcagacctggaattctgattccaaactctttattactttgggaagtcactcagcctccctgtagccatctccagggtgacggaacccagtgtattacctgctggaaccaaggaaactaacaatgtaggttactagtgaataccccaatggtttctccaattatgcccatgccaccaaaacaataaaacaaaattctctaacactgcaaa

SEQ ID NO: 5593 - DNA, 2446 bp, Homo sapiens
acaaaaaccctgactatcacctgatagattgcttgtgctgcctgataattactcgcacttttcccaggctagtgcaaatcttcaggggccgtccaggactacagagctgtttcaccctaccttggcttcaatctcttcccccatgctcgaaggtgcggagctgtacttcaacgtggaccatggctacctggagggcctggttcgaggatgcaaggccagcctcctgacccagcaagactatatcaacctggtccagtgtgagaccctagaagacctgaaaattcatctccagactactgattatggtaactttttggctaatcacacaaatcctcttactgtttccaaaattgacactgagatgaggaaaagactatgtggagaatttgagtatttccggaatcattccctggagcccctcagcacatttctcacctatatgacgtgcagttatatgatagacaatgtgattctgctgatgaatggtgcattgcagaaaaaatctgtgaaagaaattctggggaagtgccaccccttgggccgtttcacagaaatggaagctgtcaacattgcagagacaccttcagatctctttaatgccattctgatcgaaacgccattagctccattcttccaagactgcatgtctgaaaatgctctagatgaactgaatattgaattgctacgcaataaactatacaagtcttaccttgaggcattctataaattctgtaagaatcatggtgatgtcacagcagaagttatgtgtcccattcttgagtttgaggccgacagacgtgcttttatcatcactcttaactcctttggcactgaattgagcaaagaagaccgagagaccctctatccaaccttcggcaaactctatcctgaggggttgcggctgttggctcaagcagaagactttgaccagatgaagaacgtagcggatcattacggagtatacaaacctttatttgaagctgtaggtggcagtgggggaaagacattggaggacgtgttttacgagcgtgaggtacaaatgaatgtgctggcattcaacagacagttccactacggtgtgttttatgcatatgtaaagctgaaggaacaggaaattagaaatattgtgtggatagcagaatgtatttcacagaggcatcgaactaaaatcaacagttacattccaattttataacccaagtaaggttctcaaatgtagaaaattataaatgttaaaaggaagttattgaagaaaataaaagaaattatgttatattatctagactacacaaaagtaagccacactatatcttcatgagttgcaaatccatggaaacacagtaaaccagccctgaaacaaagcatttccttgttttcagtggtattagatcttgtttccacatgtctgtctcattcttcactgggccttacaggttagttttaattaactctatggtatttttcttattcttgtttgatcatgttaaaaattggacctaataaaagtattttattcttgcttttccatgcttctctacaggtccaaatactgaatgtctcctttactttttctcttttaaatttttttctagacagggtctcactctgtcacctaggctacagtgcagtggtgtgatcacagctcactgcagcctcgacttcccaggctcaagtgatcctcccagctctcagcctccaaagtagctggcactacaagtgtacacccccacacaaggctaagttttgtattttttgtagagacagggtttcaacatattatccaggctggtgtcgaattcctgggctccagggatccacagtcccccttggcctcccaaagtgttgggattacatgcatgagccactgtgctgggcttcatttacattttaactgtctgttccttgcctagattcacagaaatccaaagctgtatgtagtcaacatggttcacaagtgttggaaaatgtgttttttgttttgttttgttttgtttcgttttgttttgagacagagtttccctctgtcgcccaggctagagtgcaatggcgtgatctcggctcactgcaacctccacctcccagattcaagcaactctctgcctcagcctcccgagtagctgggattacaagcacccaccactacactcagctaattttttgtatttttagtagagccggggtttcaccatcttggccaggctgatcttgaactcctgagctcatgatccacccgcctcagcctcccaaagtgctgggattacaggccccttgttcagccactgcacctggccccttattttgtttttgttttctaatatactttgatgtaatcagcttgagaaagcaacacaatttcaaatcctatcttctagatgcaagcagtgttaaatttgttaataaatttgcttttcacacctttctttaaataaaaggtatatctctcttt

SEQ ID NO: 5594 - DNA, 5021 bp, Homo sapiens
caggcaggtaaaggcagcttcttaggcagccagcgagttggcaggtgggttgggactcgcttgtcaactcattaattttaagcagtcagtttgggggtactgcaggataatcaggagggccgtggggagtcaagaggtgacccgggatgccggtggtggggaaagaaaagaggagcctctggaagcttggaggcaaaattgcgcttgggttcctgttccttgcatccctcctggcttgagtgcgggagaacactttttaaagactcaccttggaaagaaggcctccgtcccaggggagaaggagaggcgtctgcagggggcagagaccgcagctacctgccgggtgcgccccccacccaggagcgctcgcttcgccccctttcctcccccgcccccacctccttattggtgctagtttgcagcgcccagctcctgcgccttcgcttcgcgtttgaatctggctcgccccttcgtattatgtctgcactccgaaggaaatttggggacgattatcaggtagtgaccacatcgtccagcggctcgggcttgcagccccaggggccaggccaggaccctcagcagcagcttgtgcccaagaagaagcggcagcggttcgtggacaagaacggccggtgcaatgtacagcacggcaacctgggcagcgagacaagccgctacctctcggacctcttcaccacgctggtggacctcaagtggcgctggaacctcttcatcttcattctcacctacaccgtggcctggcttttcatggcgtccatgtggtgggtgatcgcctacactcggggcgacctgaacaaagcccacgtcggtaactacacgccttgcgtggccaatgtctataacttcccttctgccttcctcttcttcatcgagacggaggccaccatcggctatggctaccgatacatcacagacaagtgccccgagggcatcatcctcttcctcttccagtccatcctgggctccatcgtggacgccttcctcatcggctgcatgttcatcaagatgtcccagcccaagaagcgcgccgagaccctcatgttcagcgagcacgcggtgatctccatgagggacggaaaactcacgcttatgttccgggtgggcaacctgcgcaacagccacatggtctccgcgcagattcgctgcaagctgctcaaatctcggcagacacctgagggtgagttccttccccttgaccaacttgaactggatgtaggttttagtacaggggcagatcaactttttcttgtgtcccccctcacaatttgccacgtgatcgatgccaaaagccccttttatgacctatcccagcgaagcatgcaaactgaacagttcgagattgtcgtcatcctagaaggcattgtggaaacaactgggatgacttgtcaagctcgaacatcatatactgaagatgaagttctttggggtcatcgtttttttcctgtaatttccttagaagagggattctttaaagttgattactcccagttccatgcaacatttgaagtccccaccccaccttacagtgtgaaagagcaggaggaaatgcttctcatgtcgtcccctttaatagcaccagccataactaacagcaaagaaagacataattctgtggaatgcttagatggactagatgatattactacaaaactaccatctaagctgcagaaaattactggaagagaagactttcccaaaaaactcttgaggatgagttctacaacttcagaaaaagcctacagcttgggagacttgcccatgaaacttcaacgaataagttcagttccgggcaactcagaagaaaaactggtatctaaaaccaccaagatgttatctgatcccatgagccagtctgtggctgatttgccaccaaagcttcaaaagatggctggaggagcagctaggatggaagggaaccttccagccaaattaagaaaaatgaactctgatcgcttcacataacaaagcactcccttaggcattatttaatgtttgatttagtaatagtccaatatttggcgatgaggtaattctccctaaggaatctgaaagtatattttcctcccagttctacaagcatatttgagaacccttcctttcccaagtattgcgaatgtgcagaaagcaacagttacggagggaggacatcataaggaagttattaacgggcatgtattatcacatcaagcatgcaataatgtgcaaattttgcatttagttttatggcatgatttatatatggcatatttatattgtatattctggaaaaaaaatatatatatatatttaaaggggagatactctccctgacatttctaacatatgtattaagccaaacatgagtgaatagctttcagggcgataaaactaaatatatgtctgtgtgtgtgtgtgtatgtatacacacatatacatatatatatacacatacatacacatacatacatacatacatatatatctgataaaattgtgatgttttgttcaaagttgtagttcttgtgcatgtttactttattagagtaggaaggctactggcattaattattaataccaaatattttagccttaaatttttgtcattttaaaatctgatttaatgttttctgctgtttaaggtcttgggaggctttcaattgtattttatatgagagaatcacacaagtttgtgctatctatggccctgcaaaaatataaccattacatgtttaaattgtaaattttagagcataccagtactcagtatagcattgaacatttcttatgatttttaaaagttgctagtactggggagaaataattgttgattaatttgagaattattcctttcctagactaattaaaatctggaaatctgttttgtatatgatctaatacaaagatgagctctgaacaaacactgaatcatgttaatagacagtagccaagttatattgaatatatcagaatctgtgtgaagttacacaattaattgtccctgtttcaaactgagtaaattggaaacattttctttctttttctggaaattttgtccattttaaaaaccaatcattttaagaagacatgacaatgcaatgaaacagatgataaatatttatgcttaaaatatgtatgtctaattgagtctcttttttattctgttttcttgtttatggcatttgttgtaacaggatagactttttcctcacctaggaaacctatcccatgcctgtcacttatagttcaggaggaagtttttgcacagaccagagagaaattaaaattagatgataaattgaagatatcttacacacagttttttggtgaacactgattttattggtgtcttagatccctagtctacccaaataattttaacagtactgttttttctaatcctgaagtctgatatttatgactcattagcaggaatcaaaactagtgatcagtagaacactttcaaaataaaaatttggaatgcagacttttatgaaaatttaaaagtgctccttaacagaatatcatgggttttcctataaaacttctttaagtattgtaattccagtctgccccaactttaaaaaaaattcttattaatatgtcagtcattaattgctagtttgggctctcattatttcctgttttttaacaattttgtgataattttattattggcaaattaatacatcaacacttaaatcattgactataataataccttctggctacctctgtatcaaccaaattctgtaggtgcaaacatataccagggaattcttactggcaaaatgatcaatctggagtgtgcatccactgtgaatggagcaaattgccctatacccattgataacctagctttcttagtttgtagatgtaggaaacaaaatagtgacagagagagaagggggtccacagggcatggtatatttatcagcagtggaaaaaaagtgcatagatcatttagtccaagaacttaaaactaaatagagccataatttactttggagagtcattttaatttgtctttggtaccaaggagaagacggaaccaaaaacaaactctccaagtatattcacacattcaacaaaatttttgcatgccttctatgtcgtaggcatttttagttcctggggatttggacatggctaagtcagagaaggccattgctcaccatgaacactgtataccagaaggagagtggggaggagacaaaaaacaaataagaccacttcagacaatcaaagtatcagttaagagaatgaaaacaggcctgactcagtggctcacgcctgtaatcccagtactttgggaggcggaggttgggggatcacctgaggtcaggagatcgagaccagcctggacaacatggtgaaaacccgtctctactaaaaatacaaaaattaactgggcatggtggcaggcacctgtaatcccagctactggggaagctgaggcaggagaatcgtttgaacctgggaggcggaggttgcagtgagccaagattctgccactgcactccagcctgggtgacagtgcgagactccatctcaacatcaaaaaaaaaaaaaaaaaaaaaaaaaaaaaaaaaaaaaaaaagaataaaaacagggtaacataatgcaaagtaactgtgtggaataaaaattgattattttagaaaatgtgactggcttaggacggggataatatgtgaacagaaatctatctcatgagaaagtgctactgttgtcaaaattaccttatctgagtgaatggtattttttttatcttttccacacatgcgtgggaaaggtatgatttctgcatgtaattgcagtttaacccttatttctaggttgatcataggtcccagtttacccaggaaaattccagtttatacctgttgtacctgtgtaattattggtagcactccctttcactcttacaatgtcttggtttggatgatatatggtgaagtttttgttgaaactaaattatgaagtctgatatatttggataaaaataaagaattgcttttctt

SEQ ID NO: 5595 - DNA, 3994 bp, Homo sapiens
ggccggcggccacgtgacccaccgcggcggggccggcggcccagaaatagcagcggcggcggttccgcccgcgggcggcgcgagcgaggggcagaggcgagagacgccggcggggcgcgggcgcggcggccccggaggatgctgctgagccccggcactgcctggctgcgagcacatgatggcgatacgggagctcaaagtgtgccttctcggggacactggggttgggaaatcaagcatcgtgtgtcgatttgtccaggatcactttgaccacaacatcagccctactattggggcatcttttatgaccaaaactgtgccttgtggaaatgaacttcacaagttcctcatctgggacactgctggtcaggaacggtttcattcattggctcccatgtactatcgaggctcagctgcagctgttatcgtgtatgatattaccaagcaggattcattttataccttgaagaaatgggtcaaggagctgaaagaacatggtccagaaaacattgtaatggccatcgctggaaacaagtgcgacctctcagatattagggaggttcccctgaaggatgctaaggaatacgctgaatccataggtgccatcgtggttgagacaagtgcaaaaaatgctattaatatcgaagagctctttcaaggaatcagccgccagatcccacccttggacccccatgaaaatggaaacaatggaacaatcaaagttgagaagccaaccatgcaagccagccgccggtgctgttgacccaagggccgtggtccacggtacttgaagaagccagagcccacatcctgtgcactgctgaaggaccctacgctcggtggcctggcacctcactttgagaagagtgagcacactggctttgcatcctggaagacctgcagggggcggggcaggaaatgtacctgaaaaggattttagaaaaccctgggaaaacccaccacaccaccacaaaatggcctttagtgtatgaaatgcacatggaggggatgtagttgcatttttgctaaaaaaaaaaaaaaacctttaaaaattgttggatgtgtacaaaagtcttactgccttattatgtgtatgggattctaaagtggcattccacttggatttcctgtgctacctatccaaattccagtaactacttcagtgtcattgcctttgttacctaaccaaccttcactgaaaggcaaatttagttcaggaggttagtttttagctagctttggaagtaagcctttatttattactttttggaggaaatcagagaagtgtcaatggaccgtcactcagactgagacttgagttattacagaagccaggaaaagtgtattagaaactgttgtctacaccacttttaattggtgaacaatttttctaagttatggtcatatatacccaaacaaaccaaatcaaactaaattactgcatataattttgggattgggtggcctagtttgaaagagtgatttaagtaatcactatgtaagtggtgagagatgcaggacatacacattattcaagagaccacctgacatgcatctcctccgcaggaatacattcgtcctctcttagagaagtttaacgcacatagtattattttactaagagaatatctcttggtgtcatatctaggggaagagaattaactagaattaaatttaatgtttgaatctaaatcattgggcaaacttctaataataacaattaataataggttacaggaaagccagccagaggaagtgtcagcactttaaaattctagaccccaaaaaactacaaaatcagaaaaagtatttttatgtttctagcttgaggagaagggctttagggctaaccagaggtctgaccctagaatgccaaggaactgagaatgggctccgatgaaaaccttccttttcagattccctgtctgctcaattaaagatgtttgaatccaaaggaagtcaaggaagaaaaagcatggaaaggaagagaactgattcctactgaaaattcaaattctattaccattctaactttcataaaaagttgggatcaagaagcagctgatttcctgccagggcttatattagggggtgattcttaaaggacattaggattggtgctcagaaatggttaatcatgctgtgtgctagccagggccagctggtaccttctttgccatgagcattcaagggacggctaacctttattgacaatctatatcgcaaaagtcaggaaagaggttgtgagctgattggattaaagacctggcacttcagtaactcagcacgcttccacttcactcaacttaagagagttcattgacagtgttaggatgtgaaggctgggaaacacttattttgcttcaagagttccacttggctctcccaaataggtacctcaaaaactgttagcaagcggcatttggatgtcttgacaggggctttgcagggatttttagggttttttccacattgtccacattaatggttggcatgattgtgcttgcaggccaagaaatgatcataccccttgccaaaggtaaaaaaaaaaaaaaaaaaatgagttgaaaattgaagtgacctctttccagctgagttgcaggcttattttgtaacctttcctcatccagttttccctgagaacctgggtttatctctagatagctgttcaggttttttagctgaggggtaagtatcctagctgagagttttgcatctttgggctgggtttgcagtggttgtgttttgcataaaatgtctagtctttgccacagatagtgagctacccactaatgagcccatggttttatttcagaagcacatgagggtgtgaaaccactctgttacctttctgtattgtcttagctattcaagccagtcagaggataatatatatattctcatcagcactcagagtagtcagtgaagagagtagatcacacttgggcacaccaggattcacataaacattgtatcttctctgtggatgctcaggccttgtctacaatgaggctttacaaccttcctttgttttggctcgggattacttcctggctgtctaataattgaaccataaccatgtaatattatgtaaaggcctggaaattactgttgctaaaaaaagtcatgtagtttcatgtagtgtagcatccttggcatcgttttccaaaatttgttccttctcccttttttttttctttcgtgtgtggcatgagtgtgtatctgtgtaaatatgattgtatatgtgttactccgatatgtaatccatttcactggctgagtttggcccctagccatgtgttaatataaagtaggcatggcttcccaatggaaatctctgagaatgacagtggagttgtgcaagcattttacattgccacataattgacttgccattttatggttaaaaacggcacattaggcagttgaatatgacgttaccttgcagactaaaaggttgaaggcccgaaactaacttttagctaacaataagggctgtgccccaatggaaactgagttcattttctgagaaaggtttggatgactgaaatatttcctctacagtcaaggactttggcatgtggtggctgaaactgagcttttttgtgtgggctccagttctcactgttctgcaatgctcatggcaagttgaatggtgagctagcttataaattaaagagctctgaactgtattcagaccgactgggtatctagcttactgttttaacatcattgttgaaaccagaccctgtagtccagtggtgctgccctgttgtgcaaactgctcctttttctcgtgtttttgtaaagagcttccatctgggctggacccagttcttgcacatacaagacaccgctgcagtcagctaggacctttccgccatgtattctattctgtagtaaagcatttccatcaacaatgcctaattgtatctgttatttttggtttaacacacactgattcatactaataaatattttcagttttaccgtt

SEQ ID NO: 5596 - DNA, 8290 bp, Homo sapiens
atgccgctgtccccgccagcccagggcgaccccggggagcccagcccgtgcaggccccctaagaagcacaccaccttccacctctggcgctccaaaaagaagcagcagccggcgccgcctgactgtggggtgttcgttccgcacccgctcccggcgcctgccggagaggccagagctttggatgtagtcgatggaaaatatgtggttcgagactcccaggaatttccactgcactgtggggaatcccagttcttccacaccaccagtgaggcgcttggttccttacttctagagtctggaatatttaaaaagtccagagcacaacctccagaagacaacagaaggaagccagttttggggaaacttggcactctattcactgcaggaaggagaagaaacagtagaaacgggttagagagtcccaccagatcaaatgccaaaccactctctcccaaagatgtggtagcctctcctaagctcccagagagagagagtgagaggagcagatctcagagcagccaactgaagcaaacggacacaagcgaggagggctccccgcgggagaatccccgagaggcagagggcgagctccccgagagcggtggccccgcagccccccctgacgccgagctgtcacctcgctggagcagcagtgcagcggctgtggctgtgcagcagtgccatgaaaatgattcaccccaattagaacctctggaggcagagggagagcctttcccagatgccaccaccactgccaagcagctgcattcctcgccgggaaattcctccaggcaagagaacgcagagacgcccgcccgcagtccgggggaggacgcttcaccaggtgctggccacgaacaggaggctttcctgggtgtgaggggtgcgccagggtcgcccacccaggagcggcccgcgggaggactaggcgaggcccctaacggagcccccagtgtgtgtgccgaagaaggctccctggggccccgcaacgcccgcagccagccccccaagggcgcgtctgatttgccaggtgagcctccggccgagggcgcagcgcacacggccagctccgcgcaggcagactgcacagcccgccccaagggtcacgcccaccctgctaaggtgctaactttggacatctacttgagtaagactgagggggcacaagtggacgagccggtcgtgattactcccagagcggaagattgcggtgactgggacgacatggagaagaggtccagcggccgtaggtcggggaggcggagggggtcgcagaaatccaccgactcccccggcgcggacgccgagctccctgagagcgctgccagggacgacgcggtgttcgacgacgaggtggcgccaaacgcggccagcgataacgcctcggcggaaaagaaagtgaaatctccgcgggcagccctcgacgggggcgttgcctccgctgcgagcccagagtccaagcccagccccggtaccaaagggcagctccgaggggagtcggaccggagcaaacagccacccccggcttcgtcccccacgaagaggaagggcaggagccgtgccctcgaggccgtgcccgccccgcccgccagcggcccccgggctcccgccaaggagtccccacccaagagggtgcccgatcccagcccagtcaccaagggcactgcggccgagagcggggaggaggcggcgcgggccatcccccgcgagctcccggtcaagagcagctcgctgctgccggagatcaagcccgagcacaagaggggcccgctccccaaccacttcaacggccgggcagagggaggtcgaagcagagagctgggcagagcggccggagcgcctggagcttctgacgccgacggcttgaagcccaggaaccatttcggcgtgggcaggtcgacagtgaccactaaagtgaccctccctgccaagcccaaacatgtggaactaaatcttaaaacccctaagaatcttgacagtttgggaaatgagcacaatccatttagccagccagttcacaaaggcaacactgccaccaaaatctccttatttgaaaacaaacggacaaacagtagcccaagacacactgacattcgaggccaaaggaatactcctgcctctagtaaaacgtttgttgggagggcaaagctgaatttagccaaaaaagccaaagaaatggagcaacctgaaaagaaagtaatgccaaacagtccccagaatggtgtgctggttaaggaaactgctatagaaaccaaagttaccgtctcggaagaagagattctgccagcaaccagaggaatgaatggagactcttctgagaatcaagctcttggtcctcagcctaaccaagatgataaagcagatgtacaaacagatgctggctgcctttcagaaccagtggcttctgctctgattcctgtcaaggatcataagctcttagagaaggaggactcagaggctgcagacagcaaaagccttgtacttgaaaatgtaaccgatacagcacaagacatccccaccactgtggataccaaagatttacctccaacggccatgccaaagccacagcatacattttctgactcacagtcccctgctgagtcatctcctgggccttctctttcactgtctgcacccgctcctggggatgttcccaaagacacatgtgttcaatcacccataagcagtttcccatgcactgatctaaaagtgtcagaaaaccataaaggatgtgttttgcctgtgtctcgtcagaacaatgagaaaatgccacttttagaacttggaggagaaacaacccctcctttgtccacagagcgtagtccagaagctgtgggaagtgagtgtccatccagagtcctcgtccaggtcaggtccttcgtgctccccgtggagagcacccaggatgtgagctcccaggtcatcccagagagctctgaagttagagaagtgcagttgccaacttgtcacagtaatgaacctgaagtggtttccgttgcaagttgtgctcccccacaagaggaagtactgggcaatgaacactctcattgcacagcagagctcgcggcaaaatctggcccacaagtcataccgccagcatcagagaaaactctgcctattcaggctcaaagtcagggcagcagaacacccctgatggctgaatccagtcccaccaactctcccagcagcggaaatcacttagccactcctcaaaggccagatcagactgttacaaatggccaggatagccctgccagccttttgaacatttctgctggtagtgatgatagtgtatttgattcttcttctgatatggaaaaattcactgaaattataaaacagatggatagcgcagtttgtatgcccatgaaaagaaagaaggccaggatgccaaactctcctgctcctcactttgccatgcctcctattcacgaagaccatttagaaaaggtgtttgatcccaaagtgtttacctttggtttggggaagaagaaggaaagtcagccagaaatgtcaccggctttacatttgatgcagaaccttgacacaaaatccaaactgagacccaaacgtgcatctgctgaacagagcgtcctcttcaagtccctgcacaccaacactaatgggaacagtgagcctctggtgatgccggaaatcaatgacaaagagaacagggacgtcacaaatggtggcattaagagatcgagactagaaaaaagtgcacttttctcaagcttgttatcttctttaccacaagacaaaatcttttctccttctgtgacatcagtcaacactatgaccacggctttcagtacttctcagaacggttccctatctcagtcttcagtgtcacagcccacgactgagggtgccccgccctgtggtttgaacaaagaacagtcaaatcttctgcccgacaactccttaaaggtcttcaatttcaactcgtcaagtacatcacactccagtttgaaaagtccaagccacatggaaaaatacccgcaaaaagagaaaaccaaagaagatctggattcacgaagcaacctacacttgccagaaactaaattttctgaattgtcaaaactgaagaatgatgatatggaaaaggctaatcatattgaaagtgttattaaatcaaacttgccaaactgtgcaaacagtgacaccgacttcatgggtcttttcaaatcaagccggtatgacccaagcatttctttttctggaatgtcattatcagacacaatgacacttagaggaagtgtccaaaataaactcaatccccgacctggaaaggtagtgatatatagtgaacccgacgtctctgagaagtgcattgaagttttcagtgacattcaggattgcagttcttggagcctctctccagtgatactcataaaagttgttagaggatgttggattttgtatgagcaaccaaattttgaagggcactccatccccttagaagaaggagaattggaactctctggtctctggggtatagaagacattttggaaaggcacgaagaagcagagtctgataagccagtggtgattggttccatcagacatgtggttcaggattacagagttagtcacattgacttatttactgaaccagaagggttaggaatcctaagttcctactttgatgatactgaagaaatgcagggatttggtgtaatgcagaagacttgttccatgaaagtacattggggcacgtggctgatttatgaagaacctggatttcagggtgttcctttcatcctggaacctggtgaataccctgacttgtccttctgggatacagaagaagcgtacattggatccatgcggcctctgaaaatgggtggccgtaaagttgaattccctacagatccaaaggtagttgtttatgaaaagcctttctttgaaggaaaatgtgtggaactagaaacaggaatgtgtagttttgtcatggagggaggtgaaacagaagaggcgactggagacgatcatttgccgtttacgtcagtggggtctatgaaagttctaagaggcatttgggttgcatatgagaaacctggatttaccggtcatcagtatttgctagaagaaggagaatacagggactggaaagcctggggaggttacaatggagagcttcagtctttacgacctatattaggtgatttttcaaatgctcacatgataatgtacagtgaaaaaaactttggatccaaaggttccagtattgatgtattgggaattgttgctaatttaaaggagactggatatggagtgaagacacagtctattaatgtactgagtggagtatgggtagcctatgaaaatcctgacttcacaggagaacagtatatactggataaaggattttataccagttttgaggactggggaggcaaaaattgtaagatctcttctgttcaacctatatgtttggattctttcactggcccaaggagacgaaatcagattcacttgttttcagaaccacagtttcaaggtcacagtcaaagttttgaagaaacaacaagtcaaattgatgattcattttctaccaagtcttgcagagtttcaggaggcagctgggttgtatatgatggagaaaatttcactggtaatcaatacgtgttggaagaaggccattatccttgtctgtctgcaatgggatgcccgcctggagcaactttcaagtctcttcgttttatagatgttgaattttctgaaccaacaattattctctttgaaagagaagacttcaaaggaaaaaagattgaacttaatgcagaaactgtcaatctccgatccctgggattcaacacacaaatacgctctgttcaggttattggtggcatatgggttacttatgaatatggcagttacagagggcgacagttcctattgtcacctgcagaagtacctaattggtatgaattcagtggctgtcgccaaataggttctctacgaccttttgttcagaagcgaatttatttcagacttcgaaacaaagcaacagggttattcatgtcaaccaatggaaacttagaggatctgaagcttctgaggatacaggtcatggaggatgtcggggccgatgatcagatttggatctatcaagaaggatgtatcaaatgcaggatagcagaagactgctgcctgacgattgtgggcagcctggtaacatctggctccaagctaggcctggccctggaccagaatgctgacagccagttctggagcttgaagtccgatggcaggatttacagcaagttgaagccaaatttagttttagacattaaagggggcacacagtatgatcaaaatcacattatcctcaacactgtcagcaaagagaagtttacacaagtgtgggaagccatggtcctatatacctgaacaaagaaggaagaagaatcttctggaggtccttccagccaccttatttcttaaaaaggacaatgctgatggaagaccagactggaaagtggatcgactcctccttcattgattctaaattcaaccttaaatcatgctgccatgactcagagaacttactcatcgtttcaaaagactatcatagctttaaaccaataatttgtcctcctttcatttcttgcctttcatttttggtagctgcttaaacaggttgcctaattagcagcttttgggtgattttgtaaaatgttatatcaagatttcaagactgtgtacattttaaattatttccaaagatagtgacaggagagaactggaacaaatttaccaactttgtggacctacaaagcccttacactttaaagggtaagacaaaggcttaagtttgaaaggtagagaactgtttagcatctgagaagaaatactttattaggcctgtaattttggttcttggccttaaacactttctggaacctttaaatatgctgcatagcacaatgggaaagccttaggtattcacacatttaaggaactctaaacaaaatactattttcctttagttcatattaaaaattaatacattttaaaaatttaatgtcaaagtctggtaacatttgttagtaggatttgagttattattttttgagacaggatctcaggctggagtgcagtggcacaatcacggctcactgcagcctctacctccccaggctcaggtgatcctcccacctcagcctcccaagtagctgggactataggcacacatcaccaagcccagccaaattttgttttttttttgtagagatggggtttcatcacgttgcccaggctgatctcgaacctctgggctcaagcaattcactcgcctcggcctcccaaaatgctgggattacaggcctgagccactgcgcccagccaggatttgaattattttaactcatccatgggctgccctagaatgtcacaaatgagggttgtttaatgcctttcttatagctgctactggaacactattatgacctaatttatgagccatccttactcatctacaagtgctgaagcaatgttacatacttttttgctaaactcagattttttagcctaatttcttgtcctcctatccacctgcatccacacatggcctgcatggggctgccttccctgcagtgttctgcagccatgcttcagggtatagctgttggtggacagcctcaggtcttgggggcactatagccactaaacgaggtgtgaaaggctcaagaggatgaccagcaattaattatccccagaaagtgaaggaaaagagacctttagggatgttgctggtcaagtcttgatttgaccggagtcaaatcaatcttcaagcaatcttggaatcctcaactgcagtaagcatttcaaaatgcaaacaaactgcttaacaactgacaagacaccagcccatacgctgctcttccaacagtgggttctagctttgaacaaaagtgctaaacatttccttgaatatattcttcctctttttgtcctcatcactcaatactggtgctcttgtcacaggtagaacagcttgtttcttttccatctattcaagtgtgtttctaattctaaaatgctgatcttctctggagtctatggtaggcaattatggtcactggaatagtttgtcttgttttaaaatattattggtgcatgtacaacagcatccaacatatctgtcttgttcctagatatatagctctgattttaggccttttgtgcataccattacaatatggtggggtaagacattctacagtagcctgtgctgaactgatctcttaaataaacttgcttctggttaactatgttgatgaaa

SEQ ID NO: 5597 - DNA, 4277 bp, Homo sapiens
atcaggaaggagtttcgacccgcgctggcgagtcatgagcgccaagtttcccactggcgcgcaaacttgagttacttttgagcgtggatactggcgaagaggctgcgggcggtattagcgtttgcagcgacttggctcgggcagctgacccaagtgtcctgtcttccttcctctgcttgtctctaggctctgaaactgcggagcggccaccggacgccttctggagcaggtagcagcatgcagccgcctccaagtctgtgcggacgcgccctggttgcgctggttcttgcctgcggcctgtcgcggatctggggagaggagagaggcttcccgcctgacagggccactccgcttttgcaaaccgcagagataatgacgccacccactaagaccttatggcccaagggttccaacgccagtctggcgcggtcgttggcacctgcggaggtgcctaaaggagacaggacggcaggatctccgccacgcaccatctcccctcccccgtgccaaggacccatcgagatcaaggagactttcaaatacatcaacacggttgtgtcctgccttgtgttcgtgctggggatcatcgggaactccacacttctgagaattatctacaagaacaagtgcatgcgaaacggtcccaatatcttgatcgccagcttggctctgggagacctgctgcacatcgtcattgacatccctatcaatgtctacaagctgctggcagaggactggccatttggagctgagatgtgtaagctggtgcctttcatacagaaagcctctgtgggaatcactgtgctgagtctatgtgctctgagtattgacagatatcgagctgttgcttcttggagtagaattaaaggaattggggttccaaaatggacagcagtagaaattgttttgatttgggtggtctctgtggttctggctgtccctgaagccataggttttgatataattacgatggactacaaaggaagttatctgcgaatctgcttgcttcatcccgttcagaagacagctttcatgcagttttacaagacagcaaaagattggtggctattcagtttctatttctgcttgccattggccatcactgcatttttttatacactaatgacctgtgaaatgttgagaaagaaaagtggcatgcagattgctttaaatgatcacctaaagcagagacgggaagtggccaaaaccgtcttttgcctggtccttgtctttgccctctgctggcttccccttcacctcagcaggattctgaagctcactctttataatcagaatgatcccaatagatgtgaacttttgagctttctgttggtattggactatattggtatcaacatggcttcactgaattcctgcattaacccaattgctctgtatttggtgagcaaaagattcaaaaactgctttaagtcatgcttatgctgctggtgccagtcatttgaagaaaaacagtccttggaggaaaagcagtcgtgcttaaagttcaaagctaatgatcacggatatgacaacttccgttccagtaataaatacagctcatcttgaaagaagaactattcactgtatttcattttctttatattggaccgaagtcattaaaacaaaatgaaacatttgccaaaacaaaacaaaaaactatgtatttgcacagcacactattaaaatattaagtgtaattattttaacactcacagctacatatgacattttatgagctgtttacggcatggaaagaaaatcagtgggaattaagaaagcctcgtcgtgaaagcacttaattttttacagttagcacttcaacatagctcttaacaacttccaggatattcacacaacacttaggcttaaaaatgagctcactcagaatttctattctttctaaaaagagatttatttttaaatcaatgggactctgatataaaggaagaataagtcactgtaaaacagaacttttaaatgaagcttaaattactcaatttaaaattttaaaatcctttaaaacaacttttcaattaatattatcacactattatcagattgtaattagatgcaaatgagagagcagtttagttgttgcatttttcggacactggaaacatttaaatgatcaggagggagtaacagaaagagcaaggctgtttttgaaaatcattacactttcactagaagcccaaacctcagcattctgcaatatgtaaccaacatgtcacaaacaagcagcatgtaacagactggcacatgtgccagctgaatttaaaatataatacttttaaaaagaaaattattacatcctttacattcagttaagatcaaacctcacaaagagaaatagaatgtttgaaaggctatcccaaaagacttttttgaatctgtcattcacataccctgtgaagacaatactatctacaattttttcaggattattaaaatcttcttctttcactatcgtagcttaaactctgtttggttttgtcatctgtaaatacttacctacatacactgcatgtagatgattaaatgagggcaggccctgtgctcatagctttacgatggagagatgccagtgacctcataataaagactgtgaactgcctggtgcagtgtccacatgacaaaggggcaggtagcaccctctctcacccatgctgtggttaaaatggtttctagcatatgtataatgctatagttaaaatactatttttcaaaatcatacagattagtacatttaacagctacctgtaaagcttattactaatttttgtattatttttgtaaatagccaatagaaaagtttgcttgacatggtgcttttctttcatctagaggcaaaactgctttttgagaccgtaagaacctcttagctttgtgcgttcctgcctaatttttatatcttctaagcaaagtgccttaggatagcttgggatgagatgtgtgtgaaagtatgtacaagagaaaacggaagagagaggaaatgaggtggggttggaggaaacccatggggacagattcccattcttagcctaacgttcgtcattgcctcgtcacatcaatgcaaaaggtcctgattttgttccagcaaaacacagtgcaatgttctcagagtgactttcgaaataaattgggcccaagagctttaactcggtcttaaaatatgcccaaatttttactttgtttttcttttaataggctgggccacatgttggaaataagctagtaatgttgttttctgtcaatattgaatgtgatggtacagtaaaccaaaacccaacaatgtggccagaaagaaagagcaataataattaattcacacaccatatggattctatttataaatcacccacaaacttgttctttaatttcatcccaatcactttttcagaggcctgttatcatagaagtcattttagactctcaattttaaattaattttgaatcactaatattttcacagtttattaatatatttaatttctatttaaattttagattatttttattaccatgtactgaatttttacatcctgataccttttccttctccatgtcagtatcatgttctctaattatcttgccaaattttgaaactacacacaaaaagcatacttgcattatttataataaaattgcattcagtggctttttaaaaaaatgtttgattcaaaactttaacatactgataagtaagaaacaattataatttctttacatactcaaaaccaagatagaaaaaggtgctatcgttcaacttcaaaacatgtttcctagtattaaggactttaatatagcaacagacaaaattattgttaacatggatgttacagctcaaaagatttataaaagattttaacctattttctcccttattatccactgctaatgtggatgtatgttcaaacaccttttagtattgatagcttacatatggccaaaggaatacagtttatagcaaaacatgggtatgctgtagctaactttataaaagtgtaatataacaatgtaaaaaattatatatctgggaggattttttggttgcctaaagtggctatagttactgattttttattatgtaagcaaaaccaataaaaatttaagtttttttaacaactaccttatttttcactgtacagacactaattcattaaatactaattgattgtttaaaagaaatataaatgtgacaagtggacattatttatgttaaatatacaattatcaagcaagtatgaagttattcaattaaaatgccacatttctgg

SEQ ID NO: 5598 - DNA, 1426 bp, Homo sapiens
acaaatgaggtgtatgctgactaacagccacccctggtgtggatgtgattggcagttccgagagaaatatggggacgtcttcacggtacacctgggaccgaggcccgtggtcatgctgtgtggagtagaggccatacgggaggcccttgtggacaaggctgaggccttctctggccggggaaaaatcgccatggtcgacccattcttccggggatatggtgtgatctttgccaatggaaaccgctggaaggtgcttcggcgattctctgtgaccactatgagggacttcgggatgggaaagcggagtgtggaggagcggattcaggaggaggctcagtgtctgatagaggagcttcggaaatccaaggagagagtctacagggagattgaacaggtgattggcccacatcgccctccagagcttcatgaccgagccaaaatgccatacacagaggcagtcatctatgagattcagagattttccgaccttctccccatgggtgtgccccacattgtcacccaacacaccagcttccgagggtacatcatccccaaggacacagaagtatttctcatcctgagcactgctctccatgacccacactactttgaaaaaccagacgccttcaatcctgaccactttctggatgccaatggggcactgaaaaagactgaagcttttatccccttctccttagggaagcggatttgtcttggtgaaggcatcgcccgtgcggaattgttcctcttcttcaccaccatcctccagaacttctccatggccagccccgtggccccagaagacatcgatctgacaccccaggagtgtggtgtgggcaaaatacccccaacataccagatccgcttcctgccccgctgaaggggctgagggaagggggtcaaaggattccagggtcattcagtgtccccgcctctgtagacaatggctctgactccccgcaacttcctgcctctgagagacctgctacaagccagcttccttcccctccatggcaccagttgtctgaggtcacattgcaagtgagtgcaggagtgagattatcgaaaattataatatacaaaatcatatatatatatatgttcttgttttttgagacagagtctcacactgttgcccaggctggagtgcagtggcgtgatctcggctcactgcaacctccacccccggggatcaagcaactctcctgcctcagcctccctagtagctgggattacaggcatgcactaccacgcttggctaatttttgtatttttagtagagatggggtttcactgtgtaggccaggctggtctcgaactcctgaactcaagtgattcacccaccttagcctcccaaagtgctgggattacaggcgtgagtcaccgtgcccagccatgtatatatataattttaaaaattaagctg

SEQ ID NO: 5599 - DNA, 3251 bp, Homo sapiens
gagggaaaacagaaaaagaattgtgtgccactatgtctgaatatatcttctacttgtagataattacatccaagttgcccttttgcctttttatttccgtttttggacacctctttttatcatccagccaactggaatagacaaagcaccgctggtgccctgagcgacagaactctggtagggggctggctgtaaattgacgtggcatggaaattctccgctaagttgtagcagcttgcatgtttctctaagatcaagcccagcctcctggagctgtagcttaatcatgggttcaatgactttacagaaaaatggatagaaaaattcttcaactcctttctttggacccagatggttttttttgggttttttttttttttttggtttttgcttttttttttttttttggttatctatagtttagctgaaaacaaaatcaaagcagttaagtctgtaactttctttttgcagcttaaacaacagaatttgctgctctccctcccctttcctgcaatttaattccttacagattttgccatggggtgcggacttagaaagctagaagaccctgatgatagcagccctggaaaaatattttctaccctgaagagaccgcaagtggaaacaaagacagaatttgcttacgaatatgtattgctggattttactctacaagcttcatcaaacccagaagtcatcaagataaattcaattctggatatagtaacaaaagtggaaaactattatcttaaaggatatattgtcggggctattcatcctgttatacaacctgtggggcagcgaaaacacctacctgcaagttacctatacagagtggtgctattgcgcttgaaattaagcccaaagaattcggcagcacccagtggacaaagacgcccaaggctcgtgattgaggaatgtcccctaacttctgaggcacaaacaaatgacgcagcaaaagaactgatagaaaagattaatgtcgctgctaaaagaggaatgaaatttgttggattcatatcacagcattattctccatctaaattctgcaatggaaccaaccatgatggagatatagaatcgatgctacatgtgagacacggttcagatgaaaactgtagaagttggaatgaagggacgttaagtgggcagtcatctgaaagcggaattgaggaagaacttcatcatgaaagtggacagtatcaaatggaacaaaatggcagccctacttcctctaaatcaagaaagggagaagcctcagataacaaattgtatacagtcttcaatgcttttgatgatgattcaacctcctgggcctatcaggaaggcatcctgtcaatgaaagtaacaagaaaaggatcagtcattagtacacttgatgctgattggctggagttaactaccttttattataaacaaggcttgtctttaattgattcttttgtattctgggaaacatctaaaggggaacatttgcctaaatctttggaaggattttttatctatgaagaagaaggttctggagttccaggttctagtaggaaaggaaatgatgccatcgtagtagaacaatggactgttattgagggatgtgaaatcaaaacagattatggccctctgctgcacactctggctgaattcggatggcttctgacaagcgtgttgcccacacctgtattgagacatgacagtgaagggaatttggctacaaagcagatcgtattccttcagaggccagttatgtggaattcagctgctcaaacaccagataagaaagccagccgccacataaaaggtgaagacaagaataaagccactagtagaagcatcggattagacacaacctcgtcacaacctgcagagagcagacacctgcctgaggagtgccgcctttctccctcccgggaatgctggacaaaggagggaaggctggcacagcacaacagcttctctgggttcagcagcagtgacaacgtcctccgggaattagacgacggacagtttgatcaggaagatggagtgactcaggtcacttgtatgtgagccatgaggtgaagcaaaggaaggccctgtaaataattgttaaaatcattgccaactgaccttattgtattactttctctgcatttatgtaatatttttgaatttttccagacccagcctttcctctaatctatgtaaactttggcacaacctcccagacaaggaagaataaccaacatatttatacatttagaatcatgtttacacttctctcaactaaaacatctggttaaacagatgttccattcggttattacacaataatctatttcagcttctcatgaatgtacaaagtagactttcttacaattcctggtaaggagactgaatatctcaatcagtattttacccaattagagagagttctcaggaagttacagtcttatttaagctgaaaaataacctctctctctctttttttttctctctctctcatacacacacacagctaattagtgcaaataaatatctatttcccaaatataataattaatccacattttgtctttaactatagcatgtatatacaaagcaagcccctatgtgttaaaatattttttgaaaaaaatcttttttatgtatctttgcttttaaagggtcatgtcaccaaccctgtactgattcattgtacataaatgttgttgctcctaaaagcctaaaaatgcagacagcaaagcagcatctcttaaaattcaatatgaaaagaacccataatctcaatacataaataccttagtagagagtaagatttaatttttttttattttaaagtccaaatactatgaagaggaaaaatatcaacttcaatttgaaactgaagtcttttacatctgtctagatttgaattctgcttttattttgacttgttaaatcctgaagaatgttgaaacctagaattttcaatctggcaggagtagaaagatgctcatagcacacgcgatatgtatgataacatattttgtttcatcttgcttttctttccccttctaatagaggtggctttgccttgacccagcctttaacaatctttaaaattctacaaaataaaggattttcatttatctatgaaaggcttactttgaaagatggaacctccaagtgaattacaacttattctatcattgatgaattcagcctattatatatttttattaacattgatgttgacattgtaagatcattttaataataaaacatcatttttattg

SEQ ID NO: 5600 - DNA, 1403 bp, Homo sapiens
ataggctcagacacaaggagaggcttggagagagcagacgccttctggattcaagaagacgaggctcacctgttactcggcctcccagaaagatggataggagaaatgactacggatatagggtgcctctatttcagtccaagcatctgaatggggatgagagaagtggcagtaattacaggcggatcccatggggccggaggcctgcaccaccgcgagatgtggccattttacaagaaagggctaataagttggtgaaatacctgttggttaaggaccagacaaagatccccatcaaacgctcagacatgctgagggatgtcatccaagaatatgatgaatatttcccagaaatcattgaacgagcaagctacactctggagaagatgtttcgagtcaatctgaaagaaattgataagcaaagtagcttgtatattctcatcagcactcaggaatcctctgcaggcatactgggaacgaccaaggacacacccaagctgggtctcctcatggtgattctgagtgtcatttttatgaatggcaacaaggccagtgaggctgtcatctgggaggtgctgcgcaagttggggctgcgccctggggtgaggcattcactctttggggaagtgaggaagctcatcacagacgagtttgtgaagcagaagtacctggagtacaagagggtccctaacagcagaccacctgaatatgagttcttctggggcttgcgctcctaccacgagactagcaagatgaaagtcctcaagtttgcatgcagggtgcagaagaaagaccccaaggactgggctgtgcagtaccgcgaggcagtggagatggaagtccaactgcagctgtggctgtggctgaggctgaagccagggctgagtggttccaacaccagcactggctttactggcgaacccagcaccagcacgggcttcagtagtggacccagttctattgttggcttcagcggtggaccaagcactggtgttggcttctgcagtggaccaagcaccagtggcttcagcggtggaccgagcacaggagctggcttcggcggtggaccaaacactggtgctggctttggtggtggaccgagcaccagtgctggctttggcagtggagccgccagtcttggtgcctgtggcttctcgtatggctagtgaggtttcagatttattccccatgtttacagataccgctaataaattgcagtagtccttcccatggagccaaagtacatccttggaatctttgtccacacagcagtcaaggcagttatggccaatcagctgagggtgtcatgtgatggaaaaatctgtttgctgttcctgctttattgtttgctttctgtgtgctgtcatattttggtatcagagttacattaaatttgcaaaatg

SEQ ID NO: 5601 - DNA, 3933 bp, Homo sapiens
atggacttgttgtccgggacgtacattttcgcggtcctgctagcatgcgtggtgttccactctggcgcccaggagaaaaactacaccatccgagaagaaatgccagaaaacgtcctgataggcgacttgttgaaagaccttaacttgtcgctgattccaaacaagtccttgacaactgctatgcagttcaagctagtgtacaagaccggagatgtgccactgattcgaattgaagaggatactggtgagatcttcactactggcgctcgcattgatcgtgagaaattatgtgctggtatcccaagggatgagcattgcttttatgaagtggaggttgccattttgccggatgaaatatttagactggttaagatacgttttctgatagaagatataaatgataatgcaccattgttcccagcaacagttatcaacatatcaattccagagaactcggctataaactctaaatatactctcccagcggctgttgatcctgacgtaggaataaacggagttcaaaactacgaactaattaagagtcaaaacatttttggcctcgatgtcattgaaacaccagaaggagacaagatgccacaactgattgttcaaaaggagttagatagggaagagaaggatacctacgtgatgaaagtaaaggttgaagatggtggctttcctcaaagatccagtactgctattttgcaagtgagtgttactgatacaaatgacaaccacccagtctttaaggagacagagattgaagtcagtataccagaaaatgctcctgtaggcacttcagtgacacagctccatgccacagatgctgacataggtgaaaatgccaagatccacttctctttcagcaatctagtctccaacattgccaggagattatttcacctcaatgccaccactggacttatcacaatcaaagaaccactggatagggaagaaacaccaaaccacaagttactggttttggcaagtgatggtggattgatgccagcaagagcaatggtgctggtaaatgttacagatgtcaatgataatgtcccatccattgacataagatacatcgtcaatcctgtcaatgacacagttgttctttcagaaaatattccactcaacaccaaaattgctctcataactgtgacggataaggatgcggaccataatggcagggtgacatgcttcacagatcatgaaatccctttcagattaaggccagtattcagtaatcagttcctcctggagactgcagcatatcttgactatgagtccacaaaagaatatgccattaaattactggctgcagatgctggcaaacctcctttgaatcagtcagcaatgctcttcatcaaagtgaaagatgaaaatgacaatgctccagttttcacccagtctttcgtaactgtttctattcctgagaataactctcctggcatccagttgacgaaagtaagtgcaatggatgcagacagtgggcctaatgctaagatcaattacctgctaggccctgatgctccacctgaattcagcctggattgtcgtacaggcatgctgactgtagtgaagaaactagatagagaaaaagaggataaatatttattcacaattctggcaaaagataacggggtaccacccttaaccagcaatgtcacagtctttgtaagcattattgatcagaatgacaatagcccagttttcactcacaatgaatacaacttctatgtcccagaaaaccttccaaggcatggtacagtaggactaatcactgtaactgatcctgattatggagacaattctgcagttacgctctccattttagatgagaatgatgacttcaccattgattcacaaactggtgtcatccgaccaaatatttcatttgatagagaaaaacaagaatcttacactttctatgtaaaggctgaggatggtggtagagtatcacgttcttcaagtgccaaagtaaccataaatgtggttgatgtcaatgacaacaaaccagttttcattgtccctccttccaactgttcttatgaattggttctaccgtccactaatccaggcacagtggtctttcaggtaattgctgttgacaatgacactggcatgaatgcagaggttcgttacagcattgtaggaggaaacacaagagatctgtttgcaatcgaccaagaaacaggcaacataacattgatggagaaatgtgatgttacagaccttggtttacacagagtgttggtcaaagctaatgacttaggacagcctgattctctcttcagtgttgtaattgtcaatctgttcgtgaatgagtcggtgaccaatgctacactgattaatgaactggtgcgcaaaagcactgaagcaccagtgaccccaaatactgagatagctgatgtatcctcaccaactagtgactatgtcaagatcctggttgcagctgttgctggcaccataactgtcgttgtagttattttcatcactgctgtagtaagatgtcgccaggcaccacaccttaaggctgctcagaaaaacaagcagaattctgaatgggctaccccaaacccagaaaacaggcagatgataatgatgaagaaaaagaaaaagaagaagaagcattcccctaagaacttgctgcttaattttgtcactattgaagaaactaaggcagatgatgttgacagtgatggaaacagagtcacactagaccttcctattgatctagaagagcaaacaatgggaaagtacaattgggtaactacacctactactttcaagcccgacagccctgatttggcccgacactacaaatctgcctctccacagcctgccttccaaattcagcctgaaactcccctgaattcgaagcaccacatcatccaagaactgcctctcgataacacctttgtggcctgtgactctatctccaagtgttcctcaagcagttcagatccctacagcgtttctgactgtggctatccagtgacgaccttcgaggtacctgtgtccgtacacaccagaccgtcccagcggcgtgtcacatttcacctgccagaaggctctcaggaaagcagcagtgatggtggactgggagaccatgatgcaggcagccttaccagcacatctcatggcctgccccttggctatcctcaggaggagtactttgatcgtgctacacccagcaatcgcactgaaggggatggcaactccgatcctgaatctaccttcatcccaaggagcccaacagctgcagaaataactgttcaaccaactgtggaagaggcctctgacaactgcactcaagaatgtctcatctatggccattctgatgcctgctggatgccggcatctctggatcattccagctcttcgcaagcacaggcctctgctctatgccacagcccaccactgtcacaggcctctactcagcaccacagcccacgagtgacacagaccattgctctctgccacagccctccagtgacacagaccatcgcattgtgccacagcccaccaccgatacaggtgtctgctctccaccacagtcctcctctagtgcaggctactgcacttcaccacagcccaccatcagcacaggcctcagccctctgctacagccctcctttagcacaggctgctgcaatcagccacagctctcctctgccacaggttattgccctccatcgtagtcaggcccaatcatcagtcagtttgcagcaaggttgggtgcaaggtgctgatgggctatgctctgttgatcagggagtgcaaggtagtgcaacatctcagttttacaccatgtctgaaagacttcatcccagtgatgattcaattaaagtcattcctttgacaaccttcactccacgccaacaggccagaccgtccagaggtgattcccccattatggaagaacatcccttgtaa

SEQ ID NO: 5602 - DNA, 2913 bp, Homo sapiens
atgctggaggttcgctagccgaagcggctgcatctggcgccgcgtctgccccgcgtgctcggagcggattctgcccgccgtccccggagccctcggcgccccgctgagcccgcgatcacttcctccctgtgaccaaccggcgctgcaggttagagcctggcaatgccgtttgggtgtgtgactctgggcgacaagaagaactataaccagccatcggaggtgactgacagatatgatttgggacaggtcatcaagactgaggagttttgtgaaatcttccgggccaaggacaagacgacaggcaagctgcacacctgcaagaagttccagaagcgggacggccgcaaggtgcggaaagctgccaagaacgagataggcatcctcaagatggtgaagcatcccaacatcctacagctggtggatgtgtttgtgacccgcaaggagtactttatcttcctggagctggccacggggagggaggtgtttgactggatcctggaccagggctactactcggagcgagacacaagcaacgtggtacggcaagtcctggaggccgtggcctatttgcactcactcaagatcgtgcacaggaatctcaagctggagaacctggtttactacaaccggctgaagaactcgaagattgtcatcagtgacttccatctggctaagctagaaaatggcctcatcaaggagccctgtgggacccccgagtatctgggcaatccacctttctatgaggaggtggaagaagatgattatgagaaccatgataagaatctcttccgcaagatcctggctggtgactatgagtttgactctccatattgggatgatatttcgcaggcagccaaagacctggtcacaaggctgatggaggtggagcaagaccagcggatcactgcagaagaggccatctcccatgagtggatttctggcaatgctgcttctgataagaacatcaaggatggtgtctgtgcccagattgaaaagaactttgccagggccaagtggaagaaggctgtccgagtgaccaccctcatgaaacggctccgggcaccagagcagtccagcacggctgcagcccagtcggcctcagccacagacactgccacccccggggctgcaggtggggccacagctgcagctgcgagtggagctacctcagcccctgagggtgatgctgctcgtgctgcaaagagtgataatgtggcccccgcagaccgtagtgccaccccagccacagatggaagtgccaccccagccactgatggcagtgtcaccccagccaccgatggaagcatcactccagccactgatgggagtgtcaccccagccactgacaggagcgctactccagccactgatgggagagccacaccagccacagaagagagcactgtgcccaccacccaaagcagtgccatgctggccaccaaggcagctgccacccctgagccggctatggcccagccggacagcacagccccagagggcgccacaggccaggctccaccctctagtaaaggggaagaggctgctggttatgcccaggagtctcaaagggaggaggccagctgagtaggcagcctggtgagggggggcaggggatgggcaggagggtgggagagtggatgaggggcttctcactgtacatagagtcactggcatgatgccctcgctcccccatgcccccacatcccagtggggcataactaggggtcacgggagagcagtctcgtctcctgtgtgtatgtgtgtgagtggtgggcaggccagtggcagggccggccccagcccctgcatggattccttgtggcttttctgtcttttgctagcttcaccagtttctgttccttgtgggatgctgctctagggatactcagggggctcctgctctccttccccttcccttcttgcctcaccattcccctaggcaggccctgcaggtcccacactctcccaggccctaaacttgggcggccttgccctgagagctggtcctccagcgaggccctgtcagcggtcttaggctcctgcacatgaaggtgtgtgcctgtggtgtgtgggctgctctaggagcagatacaggctggtatagaggatgcagaaaggtagggcagtatgtttaagtccagacttggcacatggctagggatactgctcactagctgtggaggtcctcaggagtggagagaatgagtaggagggcagaagcttccatttttgtccttcctaagaccctgttatttgtgttatttcctgcctttccgagtcctgcagtgggctgccctgtaccctgaacctcatgagcctctaagggaaaggaggaacaattaggacgtggcaatgagacctggcagggcagagtacaagcccagcacccagtgtcccagccttactgggtccttaccctgggccaaacagggagggctgatacctccttgctcttcctagatgcccacctcctacaatctcagcccacaagtcctctccaccctagggggcttgctgcatggcaataactcataatctgatttggaggtttgccctttacaggggcagattttctgctcagttcaacaatgaaatgaagaggaactccctctttctacagctcacttctatcagaggcccaggtgcctcagagccacattgagttgctttttctgggatgaggaagtagggttaaactccccagtttcctgagggaggctcctgacaggtgccctttgtcagaccctaccacagcctggataggcagccacattggtcctcgcccttgctcggcactccgtggtggtcctgcccttctccctgcatgcctgtgggtctgctctggtgtgtgaaggtcggtgggttaactgtgtgcctactgaacctggcaaataaacatcaccctgcaaagcc

SEQ ID NO: 5603 - DNA, 4059 bp, Homo sapiens
atggcgagcgactccccggctcgaagcctggatgaaatagatctctcggctctgagggaccccgcagggatctttgaattggtggaacttgttggaaatggaacatacgggcaagtttataagggtcgtcatgtcaaaacgggccagcttgcagccatcaaggttatggatgtcacaggggatgaagaggaagaaatcaaacaagaaattaacatgttgaagaaatattctcatcaccggaatattgctacatactatggtgcttttatcaaaaagaacccaccaggcatggatgaccaactttggttggtgatggagttttgtggtgctggctctgtcaccgacctgatcaagaacacaaaaggtaacacgttgaaagaggagtggattgcatacatctgcagggaaatcttacgggggctgagtcacctgcaccagcataaagtgattcatcgagatattaaagggcaaaatgtcttgctgactgaaaatgcagaagttaaactagtggactttggagtcagtgctcagcttgatcgaacagtgggcaggaggaatactttcattggaactccctactggatggcaccagaagttattgcctgtgatgaaaacccagatgccacatatgatttcaagagtgacttgtggtctttgggtatcaccgccattgaaatggcagaaggtgctccccctctctgtgacatgcaccccatgagagctctcttcctcatcccccggaacccagcgcctcggctgaagtctaagaagtggtcaaaaaaattccagtcatttattgagagctgcttggtaaagaatcacagccagcgaccagcaacagaacaattgatgaagcatccatttatacgagaccaacctaatgagcgacaggtccgcattcaactcaaggaccatattgatagaacaaagaagaagcgaggagaaaaagatgagacagagtatgagtacagtggaagtgaggaagaagaggaggagaatgactcaggagagcccagctccatcctgaatctgccaggggagtcgacgctgcggagggactttctgaggctgcagctggccaacaaggagcgttctgaggccctacggaggcagcagctggagcagcagcagcgggagaatgaggagcacaagcggcagctgctggccgagcgtcagaagcgcatcgaggagcagaaagagcagaggcggcggctggaggagcaacaaaggcgagagaaggagctgcggaagcagcaggagagggagcagcgccggcactatgaggagcagatgcgccgggaggaggagaggaggcgtgcggagcatgaacaggaatacatcaggcgacagttagaggaggagcagagacagttagagatcttgcagcagcagctactgcatgaacaagctctacttctggaatataagcgcaaacaattggaagaacagagacaagcagaaagactgcagaggcagctaaagcaagaaagagactacttagtttcccttcagcatcagcggcaggagcagaggcctgtggagaagaagccactgtaccattacaaagaaggaatgagtcctagtgagaagccagcatgggccaaggaggtagaagaacggtcaaggctcaaccggcaaagttcccctgccatgcctcacaaggttgccaacaggatatctgaccccaacctgcccccaaggtcggagtccttcagcattagtggagttcagcctgctcgaacaccccccatgctcagaccagtcgatccccagatcccacatctggtagctgtaaaatcccagggacctgccttgaccgcctcccagtcagtgcacgagcagcccacaaagggcctctctgggtttcaggaggctctgaacgtgacctcccaccgcgtggagatgccacgccagaactcagatcccacctcggaaaatcctcctctccccactcgcattgaaaagtttgaccgaagctcttggttacgacaggaagaagacattccaccaaaggtgcctcaaagaacaacttctatatccccagcattagccagaaagaattctcctgggaatggtagtgctctgggacccagactaggatctcaacccatcagagcaagcaaccctgatctccggagaactgagcccatcttggagagccccttgcagaggaccagcagtggcagttcctccagctccagcacccctagctcccagcccagctcccaaggaggctcccagcctggatcacaagcaggatccagtgaacgcaccagagttcgagccaacagtaagtcagaaggatcacctgtgctcccccatgagcctgcgaaggtgaaaccagaagaatccagggacattacccggcccagtcgaccagctgatctgacggcattagccaaagaactaagagaactccggattgaagaaacaaaccgcccaatgaagaaggtgactgattactcctcctccagtgaggagtcagaaagtagcgaggaagaggaggaagatggagagagcgagacccatgatgggacagtggctgtcagcgacatacccagactgataccaacaggagctccaggcagcaacgagcagtacaatgtgggaatggtggggacgcatgggctggagacctctcatgcggacagtttcagcggcagtatttcaagagaaggaaccttgatgattagagagacgtctggagagaagaagcgatctggccacagtgacagcaatggctttgctggccacatcaacctccctgacctggtgcagcagagccattctccagctggaaccccgactgagggactggggcgcgtctcaacccattcccaggagatggactctgggactgaatatggcatggggagcagcaccaaagcctccttcaccccctttgtggaccccagagtataccagacgtctcccactgatgaagatgaagaggatgaggaatcatcagccgcagctctgtttactagcgaacttcttaggcaagaacaggccaaactcaatgaagcaagaaagatttcggtggtaaatgtaaacccaaccaacattcggcctcatagcgacacaccagaaatcagaaaatacaagaaacgattcaactcagaaatactttgtgcagctctgtggggtgtaaaccttctggtggggactgaaaatggcctgatgcttttggaccgaagtgggcaaggcaaagtctataatctgatcaaccggaggcgatttcagcagatggatgtgctagagggactgaatgtccttgtgacaatttcaggaaagaagaataagctacgagtttactatctttcatggttaagaaacagaatactacataatgacccagaagtagaaaagaaacaaggctggatcactgttggggacttggaaggctgtatacattataaagttgttaaatatgaaaggatcaaatttttggtgattgccttaaagaatgctgtggaaatatatgcttgggctcctaaaccgtatcataaattcatggcatttaagtcttttgcagatctccagcacaagcctctgctagttgatctcacggtagaagaaggtcaaagattaaaggttatttttggttcacacactggtttccatgtaattgatgttgattcaggaaactcttatgatatctacataccatctcatattcagggcaatatcactcctcatgctattgtcatcttgcctaaaacagatggaatggaaatgcttgtttgctatgaggatgagggggtgtatgtaaacacctatggccggataactaaggatgtggtgctccaatggggagaaatgcccacgtctgtggcctacattcattccaatcagataatgggctggggcgagaaagctattgagatccggtcagtggaaacaggacatttggatggagtatttatgcataagcgagctcaaaggttaaagtttctatgtgaaagaaatgataaggtattttttgcatccgtgcgatctggaggaagtagccaagtgtttttcatgaccctcaacagaaattccatgatgaactggtaa

SEQ ID NO: 5604 - DNA, 5331 bp, Homo sapiens
cggctgctcgcgagctgctttctctcctcttccctttccgggtgcacggcgaggagaaagtctctatgcaactaagccccggcgcgcacttggccaggtatgtaccgcgggagcggcgcgttctgcgcggaagcagatgctgctgccgccacggcggcggcggctgccagctcctgagctctgtaactgtcacactgcacctgagctgaacttgaaaagagagtgaaggggcgattgggcgaacgcttttggcagacacagagggtgtttgtagacgtgggggaggagaatctctattaacgccccccaccgtaaccactgcacatcacctccatctctgcaaatacagcccgaggagtagaggcagcagcagctggacccccaaagagagacgtggggcagcggctgtgaccgcatctcctgagctacaacaacaggtcgcctttttgagactcctttggcgggaagggctacttggaaaggaaggtttgaaagagtgagaagggtaggtgtaagggttccctaattcgtcgaaagaattctattgggtgactctcgttcgtcttctctatcctacactccacatactgaccctatattatccagactgtgccggggagaaatcaaaaacacctgtttgaagaaacggctgcacctgtgtgcttatttgtgccagagggtggcctagcccacctgcaggaagagatttggctgggttctgttgagggtgattgttaggacgttgtattttgttgccattattccaaatacctgtcttggagggaaagttgcccttctgagaactgtgactttaccaggagccctatcttggaataagagttacacctctggaccacgtttctcactagtactttgcttgactggaggaagtgggtgacttttggctgcttcggtgacccattgtagacgcctcgttacccttcttccttccgcttcaagtaatcatggcggcgggggtggcagcgtggctgccttttgcaagggcagcggctatcgggtggatgcctgtggcctcggggcctatgccggctcccccgaggcaggagaggaaaaggacccaagatgctctcattgtgctgaatgtgagtggcacccgcttccagacgtggcaggacaccctggaacgttacccagacactctactgggcagttctgagagggactttttctaccacccagaaactcagcagtatttctttgaccgtgacccagacatcttccgccacatcctgaatttctaccgcactgggaagctccactatcctcgccacgagtgcatctctgcttacgatgaagaactggccttctttggcctcatcccggaaatcatcggcgactgctgttatgaggagtacaaggatcgcaggcgagagaacgccgagcgcctgcaggacgacgcggataccgacaccgctggggagagcgccttgcccaccatgactgcaaggcagagggtctggagggccttcgagaacccccacaccagcacgatggccctggtgttctactatgtcacggggtttttcattgccgtctctgtcatcgcgaatgtggtggaaacagtgccgtgcggatcaagcccaggtcacattaaagaactgccctgtggagagcggtatgctgtggccttcttctgcttggacacggcctgcgtcatgatcttcacagttgagtatttgcttcgcctggctgcagcgcctagtcgttaccgttttgtgcgtagtgtcatgagtatcatcgacgtggtggccatcctgccttattacattgggctggtgatgacagacaatgaggacgtcagcggagcctttgtcacactccgagtcttccgggtcttcaggatctttaagttttcccgccactctcaaggcctgcgcatcctggggtacacactgaagagttgtgcctcagaattgggcttcttgcttttctcgctcaccatggctatcatcatcttcgctacagttatgttctacgcagagaaggggtcttcggctagcaagttcaccagcatccctgcagccttctggtataccatcgtcaccatgacaacactagggtatggtgacatggtgccaaaaaccatagcagggaagatttttggttctatctgttcgctgagtggggtcttggtcattgctctacctgttccggtgattgtatccaacttcagtcgcatctaccaccagaatcaacgagcagacaaacgaagggcacaaaagaaagctagactggccaggatccgggcagccaaaagcggaagcgcaaatgcttacatgcagagcaaacggaatggtttactcagtaatcagctgcagtcctcagaggatgagcaggcttttgttagcaaatccggctccagctttgaaacccagcaccaccacctgcttcactgcctggaaaaaaccacgaatcacgagtttgtggacgaacaagtctttgaagaaagctgcatggaagttgcaactgttaatcgtccttcaagtcacagtccttcactgtcttcacaacaaggagtcaccagcacctgctgttcacgacgacacaaaaaaacttttcgcatcccaaatgccaatgtatcaggaagccatcaaggtagtatacaagaactcagcacgattcagatcagatgtgtggagagaacacctctgtctaacagccgatccagtttaaatgccaaaatggaagagtgtgttaaactaaactgtgaacaaccttatgtgactacagcaataataagcatcccaacacctccagtaaccacaccagaaggagacgataggccagaatcccctgagtactcaggaggaaatattgtcagagtttctgctttgtaagacaattggaataaggtctaagagaattcgagccctggctgtgaaaagaatctcaacatagaagaaagaagaaacaataaatattctgcagattaatgcagcaaagaaagaaggttggtagtgaaacacaaagcttccaatcttaaggatgtgaataaaaccaccaaatggcatttctagacagtttgacctgttatacagagtaatattctgtggccctttgactttgtgaatgagcacaatgaaatgccgcctactgatgcttcttatgatcagaactcttttttaataaaataaataacataaatcgttgaacataatgttccagttgaatgcaaaacaaaaaaaatatggaaaacattttgataaaattttttcctgttaaaaccatgaacattggctatgatgaagattattacatatgaaaaaaaaactcacacaacatatttgtattgactgaaggaaaccatcataatgcatgctagaattctttgaagcagtgatctcagtttccttatgttgtcttcagaataggcatgataaactataattgtagaaaggggtaatttctgtgcacttacaacaagctgagtgttcatgttccatggtgggctgtgcaaataaactccttttagacctgcagtatttctcatggggatgctcattagtaaatctaaagtgttcagatagttcagtattcattatcgtttaactttgcacctagatactgttacaactgcaataatttgttgtacaactgttgtatcaggaatcaggatttttttgttgttgtactttccagatccttatagatacggtaagagccacattcgtagaaaaacttctggtgtggccaggttttaggtaactttttaatccaaaactattgtgccataaatgtttttcagtaatattttttggtccactgtattcctgtgacacagtgcattatctgttcttgtatttctatagcacctctctattgggtttatcatcatcaacaagactactgtttactgtagttcaagtgactttcctacttttgtatttccaaaaaaaattatcttgtaagtagcttgtcatcaatccccttgtcgaaaactagaaaaaaaggagttgacccatataaattatctctaacgtctttgttgtttatggaaaagcccagatactggatatatcactatgtattttatgaacagaattgactgggactaatatcacaggatcaatcatctcagaatcttacttgatgcattatttattttgctttagatcttgaatacattttgagaataactaatgtggattgaaatgtagagatacactggagtgctttatttagcaatatttgatgaaagcatgctttctacgccattcaggaaggcagcacaaatttatctcagaaaggttcctgtgtattgcaaggtacaattttctccaataaatcaggagaacaggagtttgatgatgcaaagttgatctctgtacatttaagtgaaaagtctttataacttttcacccttaaaatatttcagcagacatgtctgcacatgacagtgtaaaaaagtttaatgtcaaatgcaaagtttttattcattccaagccaccactgtaaggaataaagcttagcttctgtacatggaaagagctaataattatccctctgtcagagatgagatttttaaatgcttatgatatttaatcataaaaagggattaatccaaccattttctagtaaagccagaaattcttgcttcccatttctagaatagtttctagaacagtgctatgcacatattagatcttaataaacatttgctgagtgaaagtaagataaactcaactatctcttgggaagaactggcttcattcctagtacatcttttaaaaagttactaattttccagcagtacaaatattaacaattatattaacacctgcctcatgtcagtttatgcttctagagcaatgtctagtgaaacttatctgatggcatttattgaaaaccttctaaaaagtagactaaggaaaccataatcagaattactatgtcttttgattcccaatgagaagttctattttcatgttcttaatattacatacaagaaaatgcagttaggttatttcaattgacaattctgcctcctcttttgatttatcacttacccaaaattattaattttattaggcttttggaaaagaaaaaaaactttttgatgttttaggtgatttaaaaatataccgtgttggtggtgaatgactattgatgactgtgttaagtgcatctgtattgtaagtgaaatgtaattatttctgtgtaccatatggagtaactaaggtcattgtttttgacaattttgtttgaaattcatatatcttatttcaaaggatagcataatatctgcattatgctggaaaaaaatagacctttggagaatacttaaataaaacatgtgcatgcttgaacagg

SEQ ID NO: 5605 - DNA, 9501 bp, Homo sapiens
gtgcacgtgcgcgcgcgcccgccccagttgcgcccccggcccgcacacaccccggctcatcttctcccggtccccttgtctcgcgccttctccagccctagaagttgccccagggcccctcccgggattagagagcgctgtgaagggccagatgttgggggtcttttgtgcagacacacgcgcctggggcgcttgctcctggaaggacagcggcaggacaaagccagctggactcgtggggcgctgctcgggaagcggcggtccccaatcccgcctggggtcggggcatggcttggggagcgctgcctgggtctggagagagtagagaaatcgccaaagcagagtgacggtgacttgatgaggtgacggtgacttgatgaggtggcggtgacttgatgaggtggcggacaggggcaaacgaaagaaagatgctcgggattgccgcgctgtgtgcctgtctgcgcggctgactaggcgccccgcattcccatatgaccgggttacctggtagattttgccagtgtgtctttgccccaagatgttattccccacctgctccgatttctttctttcctagggcttactgttgctagtaggcgctctgccaccagaggggaactcgtgggcgggggagactgcggaggaggggggaggtggttatttatcctgtagagacaattaggagccgtgacgcccccttctcggccgccagccctccacacctcatctgccttgctccacctccctagtgcacccgctccagccccgtctgcccaggagggcgcttggatttccttctccgcggcgcgtatctaacccttcctgcatgtatttcactgcaggctgaagaaagctcagtctcaattgtgtttcctgcctgtcagcctcttgcctcctaaacgtgtaccatttccacttgatgtcatcacgcagaaggggtgaaagagactcggtgacagatacagaaatgaacacacctgtgagtactggatgcctgtgagcttgccattacctgcactgcaaagacacagggcggtggcctctgagaagcagctccttccccttcaccttggccttgcccttcctgctcacggtccaccatggagacgctgtcccaggactctctgctggaatgtcagatctgtttcaattactacagcccccggcgcaggcccaagttgctggactgcaagcacacctgctgttcagtgtgcctgcagcagatgaggaccagccagaaggatgtgcggtgcccctggtgccgcggtgtcaccaagctgcctcccggcttctccgtgtcgcagctcccggacgacccggaggtcctggctgtcatcgccattccacacacttccgaacacaccccggtcttcatcaaacttcccagcaatgggtgctacatgctgcccctgcccatctccaaggagcgtgcgctgctgcccggagacatgggctgccgcctgctgcccgggagccagcagaagtccgtcaccgtggtgaccatccctgctgaacagcagcctctgcaaggtggggctccccaggaggcggtggaggaggagcaggacaggcggggcgtggtgaaaagctccacctggtcgggggtgtgcactgtcatcttggtggcttgcgtcttggtcttcctcctcggcatcgtgcttcacaacatgtcttgcatttctaagcgcttcactgtgatatcctgtggctgaagagggctgcagggaagtctcttgtgggtgccaacttaggggttgagcaggttgatgatgagatcccagtgagaagatggggggcaacactgaccatttggtgctgagcgctggcctctgggttgcctcttgattaccccaagacagacacaaagggcagaaggtgcggtctcaacaagataccaggtgaattgttctgagtgttgatggcaacagcttggaagatgattgcatgcatcctcataatcatgtattcaatggactgtaatttatgatttttcaaaatcatgttacaagatagacatattctacttagacgttaaactgtacaagtgcgtacaatgtgaccttctctaaatgcggtagattcaaacaaagatgctctgtagacaagtagaattaaacctgcgaatccgtgtaaaaattcagtgaagacatgcactgctggcttctttattttttttttctttttattgaaacccagtcttcatttagttgctaaggcttttaatacattttgaatggcaccaaaacaaaataagtcaaaatggacagtcattttatttggaggaaatatttgaacaagtgtctccaatgtgttgtgttttgtcatgaaccttcattttcttcacttgtaattagagcttgctacgtgtttatggaactgaaagctcaacaggggagcaataaaccgagaaatcatgagaaatgtctaatcccatgggaaaacctgtatgccgattttcctcaagccatctcacaaaataagaatttcaaatgtaaatattgtgtatttgtgtgtgtatgtgtgtgtgtctaatttgatttacctcaggtgtttgagtctttgctgaagaatcctgggatgaagacttcattgggcatgaatgagtcaagtctctgaagcggtggccacttcttggacatcttgacccagcgagtggtctcctacacgtcacctgcaacactcgctcctcttctgtgtatttaagtcctgcattttgtaagaggcaaatggagagtaacagaagagtgtcttttctcctggttttggagtcttgcactggccatgagtgttgtgactgatggtcaacccaggcgggcattttaataaatggcctgtgattcttttttgaaagatgctcttccacaagagttaagccagttagaattcctgtttcctcttgttgatatgagagaagatctcctgtattttaacacgtttttaccaagaaaggtggcaaggtaaactaacagctcaaattcccaatataagtggaccagttcctcataaactgtcaaatgttcttaaatgtgtaatgatctatagatgctcatgaagaaagatctgctacaagtacgtgataaattcctatccctgggtgcatgtgcattcagaaatagctgtgagctttacagctctcatctaacttcttttatggaattcatgaagcaagtggtatgtgacaaggactccacttataaatataactgtttttatgttccactgaatccctgaaaatggtgaggagggtggggggaagtgaaggaaagacaagcagggctaattccaaaaagcaaggctagaaaatagccctgtgaggtcaagacaatttaatttatttacatgctgtctgttatcttcaagcagcacaaaatatgcatataaaagtgatggaattaatgtgaaataaaacaaaaatataatggctagaatacaaagctaatactgctaattggcatgagaattcaacataaaattgtgagctctgatttttcaaattgatcataaaacctttaggaaatgtatttgaaagctcaaaatagaaattaggttaaaatgccattttattgtgtaagctcttgggcattatacaacaaataatctaggatttatttggtattaataatttaggtgtcatattagctgaatactatcctctattacataacataatatactgttgggttagtgtcaatttctcaaactctcccaggctgccataatgcatgtctgacctaatttctatttctcttggaggaaaatacacacacacacacaccacagaagtgttgcattaagaatgctacatttcgaatagactttgcccttgcaattttaagctatgccatattcagattaattttgtgagtgatatctgcatatgtttctgtacagtgtgaaatgactgaccctgtagtatagtacgtgatagagttctacttgttaaagtaggttagatatagacactaatgtgtgtgatgatagtgtcctgtgtttcttagtgcaaatctgtagagtaaaaatgtccatagaacttttacttaaaaacaatcccatgctagagttgccattaagcagtgcaaaattaatcggctgtatggtagattcttgaccttaaatttaacaacaacaaccaaaatcagattttttttgtgagtcttactgacctaagaaacattgtttaaattgtttaaatggatctgcttgcagttatttgtgtacctgtttgttggggtgtgcattcttgtgtatgtgtgtgtgtgtgtgtgtgtgtgtgtgtgtgtgtgtgagagagagagagagagagagaatctcagtctcccagatagaattttataggcttaatgatgttttaatgttgcttggcatcccattgctctggcctcttctggcatttaccaatgacccttaacaaacacatctacccatgtgaccaaagtccactgacacaagaggccaggattcatacttgcacattaatgaaaagtcacaactggaaagcacagaaagagctgaaagcagcctccggtggcttcattttgtagatgagtccgttttgtaattctgcagaaagggggggatatgaacttcgcactgcagtgtcttcttgctccatcctaggtctgtctatatctctatctggctatgatcctttctagggttgatgaataccctttactgagtcaactattgctttaaagaattttttttgtaggtttatgtactcattttagttagcatctacctctctgggaaaatgaaaggagggttgacttagggatgagtatagatgttgaaagacaactatcaaaccatgtggtttgaatttttaaaattgtaaaacattggtgtccaaacctcccaccccacttgtatgtaaaggacagtgagtgttgtataaatagtaaactataagaagcatgaattttcatctttattaatgatcttgaaataaggaagagaatgcttaatatgttaagtagagccaagaatgctactaagaagcattgtctttggaaaaattttgtataatgacttggggcataagttgtgatgaaaaggcaacttggtttttggttccagtcatacttaatgatcagaaagctctaagatgttttctttaaaaatagaattaagtttaattttttgcatggcttacagattgggtcccttgaaggttaaaccatgtgatggtataacctgtgagatcttctagattggcactgttcaatagggctttctgtgatgatggaaatgctcgaaaacctgtgccgtctggtacggtagccaccaggcacattgacttttaggcagttaaaatggggttactacaagggaagaactggatttcaaattttatttaattttaattagcttaaatttaaatagccctatgtgtctagtggctgccatattgaacgatgcagttctgggtgatagcgcttggggatccagcatcaaggtattaatggagtaacagtgaggctaaggtgagagtttgtgggctagtgacatgcagttggcaaaaggcaaaacattcctttctgggcttaaaaagtatgtgatctcaagtatgacagtaaaaattcattgttgccctttggaactgttgcttatagattttaggccaaggaatgatcagtgaagcttaaagaatgctttattaagccccttttctgggatcattagctgcatgttaacctattgtccaaaaatagtagttagacagtacctgtaaaacgtttgacttgcaagctatgcatgatctgtactgtgaaattgtgtctagggtcttgtggccaaaaagtaaatgttacaggaaaaaaaaagcctaatgaaatccctgttcacttccagtatcctatccaaacttcattgctgtattagtaaggtgcaaatataagagcaagcatgttttgcagtgttcagactggttttgtttgcccttgaagttggccagcttgtcgttgtatttggtgtgggcatatgtgggcatcatttttcagatgccaaactaaaatgtaggtagtatttttagaatgagatttgacattgttttagtgtctttcttttttaagcaaaaatttcagttatccctgaaagagttgaagatttgaagctttgcacaaaagcactttttttaacagtaaaaaatactgcccatgaaatttaaagacttgaagtttactaaagctacaataattactttttagctaaataaaaggaagcagaaaattcagtttgagatatatttcctataaagaccagattcttactgataatctggtatttattccagtctagattttgattttaagagttcccatccctttatttgaaaacttatgttgtttcaaaattggttagtctgcttttcattgttttccaaatggaatatatacaaaatacatttacttcattttagcagaaatgggttgattttttttttctagaactcatcaatgtgcaagactttccttcttagcttgcctttaaaaatcatttaatttttttttttttgccaagatactaatctttctttagccttaataggaagatagaagttcaaaagttatcggtgcaaaaggagtgatacacaaaagacttcaatttctatcttttctcagaaaagtgatgctgcccaccagtcagcattttgtttccacataagaagtgtcaggtagtcagtctgtcatccctgacttagatagagaagctgttccttgacatttccatcattctcagtaaattgtcacctacaaggtaattcttaccaaaacagaaactattgagaataataagatagtcgagataattcagtagctgttttgaaagtagtagtctatttaaaaagcaacgatgttcagttgctggattttgttcaacatgagacacttatttatttatttatttatttatgagatggagttttgctcttggtgcccaggccagagtgcaatggcatgatctcagctcactgcaacctccgcctcccaggttcaagctattctcctgcctcagcctcctgagtagctgggattataggcatgcgcctccatgcccagctaattttgtattttttaaagtagagacggggtttctccatgttggtcaggctggtctccaacttctgacttcaggcgatccacccgcctcggcctcccaaagtgctgggattacaggcatgggccactgcacccagccaacatgaaacacttctaaaagataagtggaaattcaagccattgatttttctgacacaactgacttactacacacacacacacacacacaccacgatttagctgtaattggagttaaaattcagtaaaaaactgttattagtcatgttttccaatttgtgagttatacaatattggattagatgctaatttcttaactgttgctatgggctgcatacattatgtcaaactaactacctttgggagtgtctatataaacacttgaaacttttcaaatatatgaagaggtaggttctactgtatacattttattggaaagccattaatcattgaagaacttaagcaggtggggcatttaatttcttccaaataccttattttttggatctgctcaagtggttagggcgagtgcaccattattcccgaatccctgcaatttggttcccatttttctgcacaaattttcttgctcagtcgagccaatgactttttttttttttttttttttcaggattcactgcctggggtatcccactatatatatctcacctatgatgtagtggtgcttgaaatactcatctcattagctcgattttattattctaatctaaggttttttatattattcatactatgatatttttagggacaatcagtaatatttggggcagagtactgagggacctcttgaagtctgcaacagcatgcattttctttgtttttgtgggagtgcttccctgtagctgtctttgttctagaacactgctccaaatttatttccatgggatgtagggctagtagcccatgtgaaagtcttctgtaatctccttggggtgtgagttattgggttattctaacaggagttttccaaagggatggcccatttttaattcaacatttgctttttgaaaatccagaagtagacagttggatataatagtggtggaagagcatgggctgtaagcagaaggaaatagagatgacaaatgcctcttaaaggggatctagttgatacctctgttaaatagtgggagaacacagtagctggtaccttacactgtgctttaggaaaatcctatgaggatttcatttacaaatcctcataggattttctgggttgagggacaatgcaactattaagtagagggagagggagagggaaagggagacatgaagcactgggtctatgtgaagggacaggcagatatacccaaagagggagaaaatacttaataaaggaagagtatagctgcaaaacaagacatataggagctgaaggccagatatggcagaaaccagctggagaaagaagcacaggacaactaggacaacttagtcaagcacaatctgtcattccagtacggactaccaagttcaattcaggatgcttcagttgaagacatgtggggtaatgtgctcagctcatgagggtccaaggagtccccattttccctatcaccctatcctatgctcgtggtttggattgttagcacactaggcaatttcagagtccgctctagagttggttgccacgtcagtgcagacagactctagaatcctcttaaccatggaatgcaaggcctgttcctgtggatctatcctgacttgagtatgtcagtactgttgggaaaatgagttcaagaatatttcagtttatatatcctggttgccgtcatatattttttcatttcaccacttgtttgtgtttgcctcactcaacagtcatgggtgtagaagctggtttcagcttggggctgttacaaactccctacataagccatgtagctgcaatccagggttcctcccaccctacggctttagcggtgggttctctggccctcttgataacaaatactccagtctaatggctatattaatgctgctcagaggctattaactcaaatccttgatgtgtttcatttacaattatgtggattatttattttaggagctttttttttttttttttttttttttaagggccaaatagccctacagataaatgagctgctgggctgtgtagaaaatattgtccaaatgttgccaaatattgacttcgtaaaggggatatcaagctgctgtttataaatctgaatgtcttaaaagcattcttgcttgctctctctgttatagatggtgtcttagccagtcctgagttttccaatgaacccaattttaatatatggtatttttgtatgccaaactggtgtcttgtcctttgtatatgtggtaatgttgattttatgactaccgtaaaaacacatttgctatgattaaagttcataaaatgatttcaaataga

SEQ ID NO: 5606 - DNA, 2394 bp, Homo sapiens
gatctcagttttatcatgaatgacttctccattgtgattcttgatttccttcatgggttaatttagaggttatgtatgtatgtctgtgtgtgtctgttgctaaggtcaccatggctgaccgggctgctgccgaaagggcctgcaaggatcccaatcccatcattgatggcagaaaggccaacgtgaacctggcatacttaggagcaaaaccaaggatcatgcaaccaggttttgcctttggtgttcaacaacttcatccagcccttatacaaagacctttcgggatacctgcccactatgtctatccgcaggcttttgtgcagccgggagtggtcattccacacgtccagccgacagcagctgccgcctccaccaccccttacattgattacactggagctgcatacgcacaatactcagcagctgctgctgctgccgccgccgctgctgcctatgaccagtacccctatgcagcctctccagctgctgcaggatatgttactgctgggggctatggctacgcagtccagcagccaatcaccgcagcggcacctgggacagctgccgccgccgctgcagcagctgctgccgctgcagcatttggccagtaccagcctcagcagctgcagacagaccgaatgcaatagaccagccatctgatcaaagttgaattgttttctctttccctcccaattttccaatttttagtagctaataagagagttaacattgacttaacagctttaaaaaaaaaaacagccatgctattgtgaagcagagttattattttttttatactccaggtagtgttctagatgagaaagaggtaagaatgaggggaatgggcacaattttggaaatcaatcccaaagagcctgagtaaatgaaaggccactacgaaatgacgccaggagtaacaacggaacttcacttttgtaacgggatttttatttttgctctttttatagtatcagggaagcaaactgccttttacaagttagaaaatgctgtttgaatctagttgaaccagggaatacagagcgagcaatatgtagcttgaattacatttaaaagcagattttttacaaacaaaatggcgaaagcactgattgtcatttttagcagtcacttaaggcctatagaacttttttcaagtcggaaggtcctgttcttactatctcaaaaatgggcatcgaacaatcaatctaggagcgtggcagtgggtaaaatggtggacaggcaccaaagctattttctcatctgtcctgtggatgagtggaactgtggaacaagtgatgtggaattaatgggtgcaacagctgtacagacaatcaataacacacacagttctggaaagaacacatcacttgtgcttgtttgatgagcttgtcacattctaatccctctccccatcctgtttcaattttgggaaacttgtatctgctggtgtcagcaattctgattctgaaataggatcaggcttttactacaacagccttctctttctatttattgtgtcgactcgtggcttatgaataaaggcaggcaaagtttgcagaactgtcttaaggacatttattttttttccctttttaagtaattttacactttagtatctatttcagagtcatatttaaaactatttattagtgactacagtacatgagacaacaaggttactgagattacaattcttcaaaggttaatgataatgtggtttatactgtgccttaatagtaatgctatttaagatatttatttttaagttttactatgctgcactctaaagaaaggaactttagatgtgacactgtaaaattatgtattcatctcatggcataaattatttagtaagtctagatgtagcgtattaaatattaacctattcaactaaagatgttgacttggatttatttaaattcatatgtgcactgtataagagagtactcttacattaacacattttagtttagtttttagatttttttttaaacgatatattgctagtttcatgcttcctcctctgattttgcctgtgtagatttcatttattggtaattcattagtttaacactattatgtagtttttaaatgctgctttacatttttcttctgaaactgcaatacttgcaatttttattcttaaactaaattgaatactattttacactgtattggatttttatacttgaacaatttcatacaagggaagacaggttagcatttttatggactttctccattatcactggatttactttaagtattcccatactagacagtgttatgtaatgtagacatgactctcctgtgcaaattatttattcgttgtgtatattgctttataacatttcagatcttctaatctattcacttgtattaaatataattttt

SEQ ID NO: 5607 - DNA, 995 bp, Homo sapiens
ctgttgccatcatggctgaccccgacccccggtaccctcgctcctcgatcgaggacgacttcaactatggcagcagcgtggcctccgccaccgtgcacatccgaatggttctccagagagattgtaccttcagcaaacaatatatgaggataccttctgcaccctcagccacactgaatatcatcagattttttcatctccggcaatctggtagatcagggatggtgaacattttctacaaagggccaacctttctgagaaaagtctacagcattctttctctgcaggttctcttaactacagtgacttcaacagtttttttatactttgagtctgtacggacatttgtacatgagagtcctgccttaattttgctgtttgccctcggatctctgggtttgatttttgcgttgattttaaacagacataagtatccccttaacctgtacctactttttggatttacgctgttggaagctctgactgtggcagttgttgttactttctatgatgtatatattattctgcaagctttcatactgactactacagtattttttggtttgactgtgtatactctacaatctaagaaggatttcagcaaatttggagcagggctgtttgctcttttgtggatattgtgcctgtcaggattcttgaagttttttttttatagtgagataatggagttggtcttagccgctgcaggagcccttcttttctgtggattcatcatctatgacacacactcactgatgcataaactgtcacctgaagagtacgtattagctgccatcagcctctacttggatatcatcaatctattcctgcacctgttacggtttctggaagcagttaataaaaagtaattaaaagtatctcagctcaactgaagaacaacaaaaaaaatttaatgagaaaaaaggattaaagtaattggaagcagtatatagaaactgtttcattaagtaataaagtttgaaacaatgattaaa

SEQ ID NO: 5608 - DNA, 1510 bp, Homo sapiens
ggcggacaaagcccgattgttcctgggccctttccccatcgcgcctgggcctgctccccagcccggggcaggggcgggggccagtgtggtgacacacgctgtagctgtctccccggctggctggctcgctctctcctggggacacagaggtcggcaggcagcacacagagggacctacgggcagctgttccttcccccgactcaagaatccccggagcccggaggcctgcagcaggagcggccatgaagaagctgatggtggtgctgagtctgattgctgcagcctgggcagaggagcagaataagttggtgcatggcggaccctgcgacaagacatctcacccctaccaagctgccctctacacctcgggccacttgctctgtggtggggtccttatccatccactgtgggtcctcacagctgcccactgcaaaaaaccgaatcttcaggtcttcctggggaagcataaccttcggcaaagggagagttcccaggagcagagttctgttgtccgggctgtgatccaccctgactatgatgccgccagccatgaccaggacatcatgctgttgcgcctggcacgcccagccaaactctctgaactcatccagccccttcccctggagagggactgctcagccaacaccaccagctgccacatcctgggctggggcaagacagcagatggtgatttccctgacaccatccagtgtgcatacatccacctggtgtcccgtgaggagtgtgagcatgcctaccctggccagatcacccagaacatgttgtgtgctggggatgagaagtacgggaaggattcctgccagggtgattctgggggtccgctggtatgtggagaccacctccgaggccttgtgtcatggggtaacatcccctgtggatcaaaggagaagccaggagtctacaccaacgtctgcagatacacgaactggatccaaaaaaccattcaggccaagtgaccctgacatgtgacatctacctcccgacctaccaccccactggctggttccagaacgtctctcacctagaccttgcctcccctcctctcctgcccagctctgaccctgatgcttaataaacgcagcgacgtgagggtcctgattctccctggttttaccccagctccatccttgcatcactggggaggacgtgatgagtgaggacttgggtcctcggtcttacccccaccactaagagaatacaggaaaatcccttctaggcatctcctctccccaacccttccacacgtttgatttcttcctgcagaggcccagccacgtgtctggaatcccagctccgctgcttactgtcggtgtccccttgggatgtacctttcttcactgcagatttctcacctgtaagatgaagataaggatgatacagtctccataaggcagtggctgttggaaagatttaaggtttcacacctatgacatacatggaatagcacctgggccaccatgcactcaataaagaatgaattttattatg

SEQ ID NO: 5609 - DNA, 2557 bp, Homo sapiens
cggattgtcagactgctcctccctcttctttagactgccacgaggaaaaagcagatgtgagaactcaaggttcagggctgctcttctaagaaacaagtctgccataatctccatctgtgttggaatctgttaactaatgaactggtctctgtgcaaatcctgagtgctaaagcttccaacaagactgatgctagctcgtgtcaccaggaagatgctacgtcatgccaagtgttttcagcgcctagcaatttttggttctgtgagggcactgcataaagataatagaacagcaacccctcagaatttctccaactatgaatccatgaaacaggacttcaaactggggattccagagtatttcaactttgctaaagatgtcctggaccaatggactgataaggaaaaggctggaaagaaaccttcaaatccagccttctggtggatcaacagaaatggagaagagatgcgatggagttttgaggaactgggatctctgtccagaaaatttgccaatatactttcagaagcctgttccctacaaagaggagatcgggtaattctgattctgcccagggtcccagagtggtggcttgcaaatgtggcctgtctgcgaacagggacagttttaattccaggaaccactcagctgacccagaaagacattctctacagactacaatcttcaaaagcaaactgcattatcaccaatgatgttttagccccagcagtagacgctgttgcatccaaatgtgaaaatctgcactccaagctgattgtatcagagaactccagagaggggtgggggaacctcaaggagttgatgaaacatgccagtgacagccacacctgtgtgaagacaaaacacaatgagatcatggccatattctttaccagtggaacaagtggatatccgaaaatgactgcacacacccacagcagttttggtttaggattatctgtaaatggaaggttctggctagatttgacaccctcagatgtgatgtggaatacctcagatacgggctgggcaaagtctgcatggagtagtgttttttctccgtggatccagggagcatgtgtattcacacaccatttaccccgttttgagccgacttctatcttgcaaacactctccaagtaccccatcacagtcttctgttcagcaccaactgtataccgaatgcttgtacagaatgatataaccagctataagtttaaaagcttaaagcactgtgtgagtgctggggaaccaattacccctgacgtgactgaaaaatggagaaacaagacgggcctggatatctacgaaggatatggacagactgaaacggtgctaatctgtggaaattttaagggaatgaaaattaaacctggctcaatgggaaaaccttctcctgctttcgatgttaagattgtagatgtaaatggcaatgttctacctcctggacaagaaggagatattggcattcaagttctacccaaccgaccatttggcctttttactcattacgtagataatccttcaaaaacagcttcaactctacgaggcaatttctatatcactggggacagaggatatatggataaagatgggtatttctggtttgttgcaagagcagatgatgtcatattatcctctggctatcgaattggaccatttgaggtagaaaatgccctgaatgaacacccttcagttgcagagtcagctgttgtcagcagcccagaccccatcagaggagaggtagtaaaggcttttgtcgttctaaatcctgattacaagtcacatgatcaagaacaactaataaaggagattcaggagcatgttaaaaaaactacagcaccttacaaatatcccagaaaggtagaatttattcaagagctgccaaagactatcagtgggaagacaaaaagaaatgaactgaggaagaaagaatggaagacaatttaaagttgtttcattaattaccatatctataaaacaaacatagtatctgtcaatctctagaaaccacaagatgatggagaggtcataaaaactgtggtagtatgcttagaaactgttgatttaaaatatcttgtggttatgatatcagaggctaaattttgaaataaaatatttggcaaattcctccacattagtgtcaatgttcctatcatttcttaatataaaaataataccatcaattgctgattaatttttaaatgtatagtatagaagcagtttctgaaccagatctctgctacataggttttcaaactttagttgactaattcttctgatatgttgatatacaaatcagaaccaatgttcaagcctgaaataaaactaaagaacttataaaagtttttagaaaaatataaaatatcagttagaagattatgataatctcaaagtacaagaatctacctgaaaatagactagggatttttattagtcacattttttgcaaataatttaaaaatagtttagacttgtttcaaggtctaactataaaagaaggatcatatactattgttgcttattatatgtaatctaataaatactgtttacaaaaga

SEQ ID NO: 5610 - DNA, 3135 bp, Homo sapiens
ataacgctacctgccgagcaagccgagtggagggaggcaaaggccaggctgaggatcagggtggcccgggtggcagcggggaggcgctgcatgctggaggctgtgctgagtgcccggtgcaggtgagccggtcctgcggagttgtgccgagtgcctgctgcagtctcatttccagttcctccatgacgtggcaagtgaagacaggaatgaaaggaatgtaaagcagcttttctctgaagagaagaagagagagagacacagccaagaccgaggctgggccaagatggtgtctgtgtttcgaagcgaggagatgtgtttgtcacaactgtttctccaggtggaagctgcatattgctgtgtggctgagctcggagagctcggattggttcagttcaaagatttaaatatgaatgtgaacagctttcaaaggaaatttgtgaatgaagtcagaaggtgtgaatcactggagagaatcctccgttttctggaagacgagatgcaaaatgagattgtagttcagttgctcgagaaaagcccactgaccccgctcccacgggaaatgattaccctggagactgttctagaaaaactggaaggagagttacaggaagccaaccagaaccagcaggccttgaaacaaagcttcctagaactgacagaactgaaatacctcctgaagaaaacccaagacttctttgagacggaaaccaatttagctgatgatttctttactgaggacacttctggcctcctggagttgaaagcagtgcctgcatatatgaccggaaagttggggttcatagccggtgtgatcaacagggagaggatggcttcctttgagcggttactgtggcgaatctgccgaggaaacgtgtacttgaagttcagtgagatggacgcccctctggaggatcctgtgacgaaagaagaaattcagaagaacatattcatcatattttaccaaggagagcagctcaggcagaaaatcaagaagatctgtgatgggtttcgagccactgtctacccttgcccagagcctgcggtggagcgcagagagatgttggagagcgtcaatgtgaggctggaagatttaatcaccgtcataacacaaacagagtctcaccgccagcgcctgctgcaggaagccgctgccaactggcactcctggctcatcaaggtgcagaagatgaaagctgtctaccacatcctgaacatgtgcaacatcgacgtcacccagcagtgtgtcatcgccgagatctggttcccggtggcagatgccacacgtatcaagagggcactggagcaaggcatggaactaagtggctcctccatggcccccatcatgaccacagtgcaatctaaaacagcccctcccacatttaacaggaccaataaattcacagctggcttccagaatattgttgatgcctatggtgtcggcagctaccgggagataaacccagccccctacaccatcatcactttccccttcctgttcgctgtgatgtttggagactgtggtcatggaaccgtgatgctcctggctgcactttggatgattctgaatgagagacgcttgctctcccagaagacagacaatgagatttggaacaccttcttccacgggcgctatctgatcctacttatgggcatcttctccatctacacgggtttgatctacaatgactgcttctccaagtccttgaacatctttggctcttcttggagtgtccaacccatgttcagaaacggcacatggaatactcatgtaatggaggaaagtctatatctgcagctggacccagccataccaggagtgtattttggaaatccatacccgtttgggattgatccgatttggaacttggcttcaaacaaactcacatttctgaactcgtataaaatgaagatgtcggtgatcctgggaattgtccagatggttttcggtgtcatcctcagccttttcaatcacatatacttcagaagaactctcaacatcattctgcaatttatccctgagatgatttttatcctgtgtctgtttggatacctggttttcatgatcattttcaaatggtgctgctttgacgtccatgtatctcagcacgcccccagcatcctcatccacttcatcaacatgtttctgtttaactacagtgactcttccaacgcacccctctacaaacatcagcaagaagtccaaagtttctttgtggttatggctttgatttctgtgccgtggatgcttctgattaagccgtttattcttagagccagtcatcggaaatcccagctgcaggcatccaggatccaagaagatgccactgagaacattgaaggtgatagctccagcccttctagccgttctggccagaggacttctgcagatacccacggggctctggacgaccatggagaagagttcaactttggagacgtctttgtccaccaagccatccacaccatcgagtactgcctgggctgcatttcaaacacagcctcctacctgcggctctgggccctcagcctggctcatgcacaactgtctgaagtgctctggactatggtgatgaacagcggccttcagacgcgaggctggggaggaatcgtcggggtttttattatttttgccgtatttgctgtcctgacagtagccatccttctgatcatggagggcctctctgctttcctgcacgccctgcgactgcactgggttgagttccagaacaagttctatgtcggggatggttacaagttttctccattctcctttaaacacatcctggatggcacagccgaggagtaggctgagggctgcacctcccacggtggtcaccatgccaatgaaggaagttcagtcttgtctttgatatcagcccctgcaaggcgctcaatgggaaggttgttcttggctcacctgaagcatgaaactgtgtattatttggacgtcagcctgtggatttgatacgacttaaccacgtcagaggaaggactttggcaagtgatattgtcttcatgtggggtattaattctcaaataataaagtaattgacaaatgaggggagaatgctaaacagatgtcttcttgcaatattttaaatattgtatttgagaaaataaacatctgagtcattc

SEQ ID NO: 5611 - DNA, 3672 bp, Homo sapiens
gtgctgggctgttcgtctcttctatgtgctgatttcctgggttactttgggtcttccttttctttctcccttttaccctgtctcctttcttgaggctgatcgatcacagccaggcctctccattctatttacccagcgttttccttctctccagttagtggggtagatgaacgccctgtgtttataaggtgcctcccaggagcctgagacctgtgagaagaatggggggtggaggtgggggagactcgtcacgaagggagaccttggagcttcgagggtgggaatgttcttattagattcttcatctctgttgacacaaacatgtaggagaagctggagaacatagacagggatgaggttttatttatttattgttcctggtcactgtctctttgaggattggtatctctgctccagaaaagatggcagcctctttcttctctgattttggtcttatgtggtatctggaggagctcaaaaaggaggagttcaggaaatttaaagaacatctcaagcaaatgactttgcagcttgaactcaagcagattccctggactgaggtcaaaaaagcatcccgggaagaacttgcaaacctcttgatcaagcactatgaagaacaacaagcttggaacataaccttaagaatctttcaaaagatggatagaaaggatctctgcatgaaggtcatgagggagagaacaggatacacaaagacctatcaagctcacgcaaagcagaaattcagccgcttatggtccagcaagtctgtcactgagattcacctatactttgaggaggaagtcaagcaagaagaatgtgaccatttggaccgcctttttgctcccaaggaagctgggaaacagccacgtacagtgatcattcaaggaccacaaggaattggaaaaacgacactcctgatgaagctgatgatggcctggtcggacaacaagatctttcgggataggttcctgtacacgttctatttctgctgcagagaactgagggagttgccgccaacgagtttggctgacttgatttccagagagtggcctgaccccgctgctcctataacagagatcgtgtctcaaccggagagactcttgttcgtcatcgacagcttcgaagagctgcagggcggcttgaacgaacccgattcggatctgtgtggtgacttgatggagaaacggccggtgcaggtgcttctgagcagtttgctgaggaagaagatgctcccggaggcctccctgctcatcgctatcaaacccgtgtgcccgaaggagctccgggatcaggtgacgatctcagaaatctaccagccccggggattcaacgagagtgataggttagtgtatttctgctgtttcttcaaagacccgaaaagagccatggaagccttcaatcttgtaagagaaagtgaacagctgttttccatatgccaaatcccgctcctctgctggatcctgtgtaccagtctgaagcaagagatgcagaaaggaaaagacctggccctgacctgccagagcactacctctgtgtactcctctttcgtctttaacctgttcacacctgagggtgccgagggcccgactccgcaaacccagcaccagctgaaggccctgtgctccctggctgcagagggtatgtggacagacacatttgagttttgtgaagacgacctccggagaaatggggttgttgacgctgacatccctgcgctgctgggcaccaagatacttctgaagtacggggagcgtgagagctcctacgtgttcctccacgtgtgtatccaggagttctgtgccgccttgttctatttgctcaagagccaccttgatcatcctcacccagctgtgagatgtgtacaggaattgctagttgccaattttgaaaaagcaaggagagcacattggatttttttggggtgttttctaactggccttttaaataaaaaggaacaagaaaaactggatgcgttttttggcttccaactgtcccaagagataaagcagcaaattcaccagtgcctgaagagcttaggggagcgtggcaatcctcagggacaggtggattccttggcgatattttactgtctctttgaaatgcaggatcctgcctttgtgaagcaggcagtgaacctcctccaagaagctaactttcatattattgacaacgtggacttggtggtttctgcctactgcttaaaatactgctccagcttgaggaaactctgtttttccgttcaaaatgtctttaagaaagaggatgaacacagctctacgtcggattacagcctcatctgttggcatcacatctgctctgtgctcaccaccagcgggcacctcagagagctccaggtgcaggacagcaccctcagcgagtcgacctttgtgacctggtgtaaccagctgaggcatcccagctgtcgccttcagaagcttggaataaataacgtttccttttctggccagagtgttctgctctttgaggtgctcttttatcagccagacttgaaatacctgagcttcaccctcacgaaactctctcgtgatgacatcaggtccctctgtgatgccttgaactacccagcaggcaacgtcaaagagctagcgctggtaaattgtcacctctcacccattgattgtgaagtccttgctggccttctaaccaacaacaagaagctgacgtatctgaatgtatcctgcaaccagttagacacaggcgtgccccttttgtgtgaagccctgtgcagcccagacacggtcctggtatacctgatgttggctttctgccacctcagcgagcagtgctgcgaatacatctctgaaatgcttctgcgtaacaagagcgtgcgctatctagacctcagtgccaatgtcctgaaggacgaaggactgaaaactctctgcgaggccttgaaacatccggactgctgcctggattcactgtgtttggtaaaatgttttatcactgctgctggctgtgaagacctcgcctctgctctcatcagcaatcaaaacctgaagattctgcaaattgggtgcaatgaaatcggagatgtgggtgtgcagctgttgtgtcgggctctgacgcatacggattgccgcttagagattcttgggttggaagaatgtgggttaacgagcacctgctgtaaggatctcgcgtctgttctcacctgcagtaagaccctgcagcagctcaacctgaccttgaacaccttggaccacacaggggtggttgtactctgtgaggccctgagacacccagagtgtgccctgcaggtgctcgggctgagaaaaactgattttgatgaggaaacccaggcacttctgacggctgaggaagagagaaatcctaacctgaccatcacagacgactgtgacacaatcacaagggtagagatctgattgcgaggaacctgggctctgactcgaacacctgcaaaggacagggactgggaccgttacttacatgacactgcacccaggagatacaaatcattgatactctgagttgtgagatttctggcaccccattcatagatttgatatgatacacgtggtttttatgtgctctgtggccttggatgagtcactgaaaggccttcatggtctctcggtctcacaaggacctcttaacccctcaataaagtgttacatttctaaacattgg

SEQ ID NO: 5612 - DNA, 2147 bp, Homo sapiens
gagagcgaacgaggcagccgccggcggagaggagggagcgggcgagggccgggcaggaggagcgggcgcggcgcgggcgaggctgggacccgagcgcgctcacttcgccgcaaagtgccaacttcccctggagtgccgggcgcgcaccgtccgggcgcgggggaaagaaaggcagcgggaatttgagatttttgggaagaaagtcggatttcccccgtccccttccccctgttactaatcctcattaaaaagaaaaacaacagtaactgcaaacttgctaccatcccgtacgtcccccactcctggcaccatgaaggcggccgtcgatctcaagccgactctcaccatcatcaagacggaaaaagtcgatctggagcttttcccctccccggatatggaatgtgcagatgtcccactattaactccaagcagcaaagaaatgatgtctcaagcattaaaagctactttcagtggtttcactaaagaacagcaacgactggggatcccaaaagacccccggcagtggacagaaacccatgttcgggactgggtgatgtgggctgtgaatgaattcagcctgaaaggtgtagacttccagaagttctgtatgaatggagcagccctctgcgccctgggtaaagactgctttctcgagctggccccagactttgttggggacatcttatgggaacatctagagatcctgcagaaagaggatgtgaaaccatatcaagttaatggagtcaacccagcctatccagaatcccgctatacctcggattacttcattagctatggtattgagcatgcccagtgtgttccaccatcggagttctcagagcccagcttcatcacagagtcctatcagacgctccatcccatcagctcggaagagctcctctccctcaagtatgagaatgactacccctcggtcattctccgagaccctctccagacagacaccttgcagaatgactactttgctatcaaacaagaagtcgtcaccccagacaacatgtgcatggggaggaccagtcgtggtaaactcgggggccaggactcttttgaaagcatagagagctacgatagttgtgatcgcctcacccagtcctggagcagccagtcatctttcaacagcctgcagcgtgttccctcctatgacagcttcgactcagaggactatccggctgccctgcccaaccacaagcccaagggcaccttcaaggactatgtgcgggaccgtgctgacctcaataaggacaagcctgtcattcctgctgctgccctagctggctacacaggcagtggaccaatccagctatggcagtttcttctggaattactcactgataaatcctgtcagtcttttatcagctggacaggagatggctgggaattcaaactttctgacccagatgaggtggccaggagatggggaaagaggaaaaacaaacctaagatgaattatgagaaactgagccgtggcctacgctactattacgacaaaaacatcatccacaagacagcggggaaacgctacgtgtaccgctttgtgtgtgacctgcagagcctgctggggtacacccctgaggagctgcacgccatgctggacgtcaagccagatgccgacgagtgatggcactgaaggggctggggaaaccctgctgagaccttccaaggacagccgtgttggttggactctgaattttgaattgttattctattttttattttccagaactcattttttaccttcaggggtgggagctaagtcagttgcagctgtaatcaattgtgcgcagttgggaaaggaaagccaggacttgtggggtgggtgggaccagaaattcttgagcaaattttcaggagagggagaagggccttctcagaagcttgaaggctctggcttaacagagaaagagactaatgtgtccaatcatttttaaaaatcatccatgaaaaagtgtcttgagttgtggacccattagcaagtgacattgtcacatcagaactcatgaaactgatgtaaggcaattaatttgcttctgtttttaggtctgggagggcaaaaaagaggtgggtgggatgaaacatgttttggggggggatgcactgaaaatctgagaactatttacctatcactctag

SEQ ID NO: 5613 - DNA, 5250 bp, Homo sapiens
gccaagcatacatctctaattttattattttggtcttttcgttggattttccctttcttctttttttcgggttatcgctcagttttgagcagaggtttacattttttaaaaatttgctttccagcccgccttgatcttctaagtgcgagttcatcgtctgagaaaaaaaaaaatctctggttggcgtttttgtttcttttcttttctttcttttctttcctttttttttttttttaatttttttcaagggggaggagattttccacaagaaaaggttgttttcatgtttgggattcaggaaagcatccaacggagtggaagcagcatgaaggaagagccgctgggcagcggcatgaacgcggtgcggacgtggatgcagggcgccggggtgctggacgccaacacggcggcgcagagcggggtgggtctggcccgggctcactttgagaagcagccgccttccaatctgcggaaatccaacttcttccacttcgtcctggccctctacgacagacagggccagcccgtggagatcgagaggacagcgtttgtggggttcgtggagaaggaaaaagaagccaacagcgaaaagaccaataacggaattcactaccggcttcagcttctctacagcaatgggataaggacggagcaggatttctacgtgcgcctcattgactccatgacaaaacaagccatagtgtatgaaggccaagacaagaacccagaaatgtgccgagtcttgctcacacatgagatcatgtgcagccgctgttgtgacaagaaaagctgtggcaaccgaaatgagactccctcagatccagtgataattgacaggttcttcttgaaatttttcctcaaatgtaaccaaaattgcctaaagaatgcgggaaacccacgtgacatgcggagattccaggtcgtggtgtctacgacagtcaatgtggatggccatgtcctggcagtctctgataacatgtttgtccataataattccaagcatgggcggagggctcggaggcttgacccctcggaaggtacgccctcttatctggaacatgctactccctgtatcaaagccatcagcccgagtgaaggatggacgacgggaggtgcgactgtgatcatcataggggacaatttctttgatgggttacaggtcatattcggtaccatgctggtctggagtgagttgatcactcctcatgccatccgtgtgcagacccctcctcggcacatccctggtgttgtggaagtcacactgtcctacaaatctaagcagttctgcaaaggaacaccaggcagattcatttatacagcgctcaacgaacccaccatcgattatggtttccagaggttacagaaggtcattcctcggcaccctggtgaccctgagcgtttgccaaaggaagtaatactcaaaagggctgcggatctggtagaagcactgtatgggatgccacacaacaaccaggaaatcattctgaagagagcggccgacattgccgaggccctgtacagtgttccccgcaaccacaaccaactcccggcccttgctaacacctcggtccacgcagggatgatgggcgtgaattcgttcagtggacaactggccgtgaatgtctccgaggcatcacaagccaccaatcagggtttcacccgcaactcaagcagcgtatcaccacacgggtacgtgccgagcaccactccccagcagaccaactataactccgtcaccacgagcatgaacggatacggctctgccgcaatgtccaatttgggcggctcccccaccttcctcaacggctcagctgccaactccccctatgccatagtgccatccagccccaccatggcctcctccacaagcctcccctccaactgcagcagctcctcgggcatcttctccttctcaccagccaacatggtctcagccgtgaaacagaagagtgctttcgcaccagtcgtcagaccccagacctccccacctcccacctgcaccagcaccaacgggaacagcctgcaagcgatatctggcatgattgttcctcctatgtgaaagaattgccttgaagaattgtattaatgaagaggttggattctgctacagagagtaatctgatacaagtcccagagtggaacttttaactcaggcctttttaagaggaatcacaataactgcagatttttaaacaaacaaaatcaccgaccttgcaaatactgaaattggaagagggatctgcaagtgcagggtgttggttaaagttgtacctcccaagtatttgggggatatatttattctgtattgacaaaagcaaatccactttttctttttcttttttttttttaagcttaattctgcaatcatttgtcttttataaaccgtaaagctctatacaagggacactataaataagactccatgttttaatttatgatgtttttaaagctgtgtaaaggaagaatgaagtggtgatatttacaaaaaagtaaaaaaaaaaaaaaagaaaaaaaggaaaaaaaaaaaagcttgtatgggacagaataggaatgccagttagattttttagaaaaactaagggtcggcttttgcgccttaaagcatatcaaatggtagttagctcagacagtgcattttcaatatctaacttaacatgccaccccttagcagtgcaagcttatttatctcttttgtattgttgtcttaagcaactgtgtaaataaatgcagcctggaaagttaaaacgcgatgtaagtgatcacatttttccctctactcgaaaatccagtgcctctagacagattgttaaaactgcatatttaaatctgatctcattctctccttttacttaagtcagtttcttctgaagccgatggcctctcgagagcttggtggcacacatactgtgtgagaatctcctttgagacttcatggaacagggtccaggcacagaattccacactctgccctccagttaacaagccaaaacctcacgtacgctcccccatttgcaagtttaaagtttactcgtcctaaatgcagacttcatacctatcttccaaaagttgataaaagcaacgtggcaggtattttcgattttcccattccagatactgcctctatcagtcgacccttaccatttgtaacataatagattgaaacaacaggttaagtgctttggaattaagagttaaagggaaccgggggtggagaaaggaaaagaaggttgagacctccaaaacatagttttctgttctatgggaatttttgctctcattatctgggaagtgttcttaaaaataagaattaatagcaaagatgcagcaaagctctgaggatgcatttgcctgatatttttttctttgctcttgtgtttttgtatgtagttataaatactgtagattttttttttgtgattttttgccaaagttgttgttctatttatacattttaatgtcttaagacattttttcaatatcacaaaaagattttactgcgtattttgcaaagaaaaaaagctcactacctttagcttgcacatacttgcaaagttaattaaaaggctttttgttttaaaggggattttgtaaaatatccatataaataatgtatttatctttcgaatttgtacattgcttttcccttcttcctcttccttccacccccaatttattttattgtgtatgtttgctacgtgaaaagtgcgtatttgtttggtcacctacacttgtattagctgtttcaatgtgatttttaaacatttcatttatagttatttttagtattgttataaaccatgcttcagtttttttaatttccacccaaaagtcattgtctatttttgtattatttgtaagttaagaagttttttccaatatatggcaaaaaaaaaaaaatagtagcatattattcttgtagtatttagttcagtagatttaaaaaaaaatgtatcctttgctttggaagcttacaaaacaaccctaatgctgttttactctattaatatgcatggaatctctccctttggagtgacgcattttgtgcattaaattctagggagaaacttcatagaaatcaatgaacatactttctttcttaagtctgcttgtatatttcctctgtctttcacataaatataaaccagcagattggatgccttaacaatgcaaatcatattcatttcacttgtacattgtaactgtgcaccagaactgtcagtcatcactaacattctaagaaaaaagaaaaagaaaaaaagaaaaaaaaaaaaacaaagaaatcgaaaagcacaaaagaactgttttgttaccttaagacaatgtaactttttctagtagagcaagaaatcatttacaacaatgctgcaactgtgcatgcccccatatggattttgcaatggttttcactaggctgtcaagagtgcgatttttatgggttggggtgggtgggggaggggagttgtgggagggtaggggagggaggaaagctgtttttcatggtgagaaataataatgatgactaataataataaaaaaaactggaaaatgtaagcaaggtggacgcattgcttctcggtactcagaaaggttatctgaatttgcgtggtaagcgctggcctgaagatgtacacaagttaaagccatattttatctggtgagccccttaactgtttctgaaggaatgaacggtcagccgggaaggtgtccggcttagaccttgacaacagacactacccatctgtcagccatgtgcagtggttagaactcttcttgaaagtccaaagagcctttaaaatgtgtataatttgtgttttgttgcttctatttctattgattagatgaaaagacattctggccctctgatcctctttcttctccacaaaagttttacaaataaaagatgttcccctaaatacagaatatggctttaagaagaaaatgaaatgaagaattaaattaagatttcagtgttgggggaaaaaatacagcttctggatgactggattgcataacattgccctggcctcacattgtactaggatgcagcttaaatgaagtcatctctaaatctactaacctttcaccttcttatcaaaactttttgaatagacacacactgtacagttcaattgttagagaacctaactactgtagagattgttaaattttttttttttttttgcaaaaattcaagctgtaaaaacttttcaactttcacaatatttaattaaagttacttcctgtctgtga

SEQ ID NO: 5614 - DNA, 515 bp, Homo sapiens
acactttgtatggcaagtggaaccactggcttggtggattttgctagatttttctgatttttaaactcctgaaaaatatcccagataactgtcatgaagctggtaactatcttcctgctggtgaccatcagcctttgtagttactctgctactgccttcctcatcaacaaagtgccccttcctgttgacaagttggcacctttacctctggacaacattcttccctttatggatccattaaagcttcttctgaaaactctgggcatttctgttgagcaccttgtggaggggctaaggaagtgtgtaaatgagctgggaccagaggcttctgaagctgtgaagaaactgctggaggcgctatcacacttggtgtgacatcaagataaagagcggaggtggatggggatggaagatgatgctcctatcctccctgcctgaaacctgttctaccaattatagatcaaatgccctaaaatgtagtgacccgtgaaaaggacaaataaagcaatgaatac

SEQ ID NO: 5615 - DNA, 1907 bp, Homo sapiens
agtttcccgggagagacgaaagcaggaacgagagcggagcggagcacagtccgccgagcacaagctccagcatcccgtcaggggttgcaggtgtgtgggaggtaagcgtgggtccttcttcggggcgtctgcactgccctggagaaaacgtcttccaataggaattacatcaagacacagctaaaagagtccgcgttgggttaggaaaccggtgcaaaacctctcgggtgaaagatttacatttttcgactttaagggcaaaaaagcaaaaggaagcttgactctgggtataaagggcgtggttagtgtttttggtttgagttgcaccagtaaaactgttctgggagatctgaagattgagaaaaatcctgctaattgaggacgaggtggatgttatctggtggatgttataggcttgaaactgttacaatatggctttccttggactcttctctttgctggttctgcaaagtatggctacaggggccactttccctgaggaagccattgctgacttgtcagtgaatatgtataatcgtcttagagccactggtgaagatgaaaatattctcttctctccattgagtattgctcttgcaatgggaatgatggaacttggggcccaaggatctacccagaaagaaatccgccactcaatgggatatgacagcctaaaaaatggtgaagaattttctttcttgaaggagttttcaaacatggtaactgctaaagagagccaatatgtgatgaaaattgccaattccttgtttgtgcaaaatggatttcatgtcaatgaggagtttttgcaaatgatgaaaaaatattttaatgcagcagtaaatcatgtggacttcagtcaaaatgtagccgtggccaactacatcaataagtgggtggagaataacacaaacaatctggtgaaagatttggtatccccaagggattttgatgctgccacttatctggccctcattaatgctgtctatttcaaggggaactggaagtcgcagtttaggcctgaaaatactagaaccttttctttcactaaagatgatgaaagtgaagtccaaattccaatgatgtatcagcaaggagaattttattatggggaatttagtgatggctccaatgaagctggtggtatctaccaagtcctagaaataccatatgaaggagatgaaataagcatgatgctggtgctgtccagacaggaagttcctcttgctactctggagccattagtcaaagcacagctggttgaagaatgggcaaactctgtgaagaagcaaaaagtagaagtatacctgcccaggttcacagtggaacaggaaattgatttaaaagatgttttgaaggctcttggaataactgaaattttcatcaaagatgcaaatttgacaggcctctctgataataaggagatttttctttccaaagcaattcacaagtccttcctagaggttaatgaagaaggctcagaagctgctgctgtctcaggaatgattgcaattagtaggatggctgtgctgtatcctcaagttattgtcgaccatccatttttctttcttatcagaaacaggagaactggtacaattctattcatgggacgagtcatgcatcctgaaacaatgaacacaagtggacatgatttcgaagaactttaagttactttatttgaataacaaggaaaacagtaactaagcacattatgtttgcaactggtatatatttaggatttgtgttttacagtatatcttaagataatatttaaaatagttccagataaaaacaatatatgtaaattataagtaacttgtcaaggaatgttatcagtattaagctaatggtcctgttatgtcattgtgtttgtgtgctgttgtttaaaataaaagtacctattgaacatg

SEQ ID NO: 5616 - DNA, 3548 bp, Homo sapiens
ctctgtgcggtgggaccaacggacggacggacggacgcgcgcacctaccgaggcgcgggcgctgcagaggctcccagcccaagcctgagcctgagcccgccccgaggtccccgccccgcccgcctggctctctcgccgcggagccgccaagatgggggacaagaaagatgacaaggactcacccaagaagaacaagggcaaggagcgccgggacctggatgacctcaagaaggaggtggctatgacagagcacaagatgtcagtggaagaggtctgccggaaatacaacacagactgtgtgcagggtttgacccacagcaaagcccaggagatcctggcccgggatgggcctaacgcactcacgccaccgcctaccaccccagagtgggtcaagttttgccggcagctcttcgggggcttctccatcctgctgtggatcggggctatcctctgcttcctggcctacggtatccaggcgggcaccgaggacgacccctctggtgacaacctgtacctgggcatcgtgctggcggccgtggtgatcatcactggctgcttctcctactaccaggaggccaagagctccaagatcatggagtccttcaagaacatggtgccccagcaagccctggtgatccgggaaggtgagaagatgcaggtgaacgctgaggaggtggtggtcggggacctggtggagatcaagggtggagaccgagtgccagctgacctgcggatcatctcagcccacggctgcaaggtggacaactcctccctgactggcgaatccgagccccagactcgctctcccgactgcactcacgacaaccccttggagactcggaacatcaccttcttttccaccaactgtgtggaaggcacggctcggggcgtggtggtggccacgggcgaccgcactgtcatgggccgtatcgccaccctggcatcagggctggaggtgggcaagacgcccatcgccatcgagattgagcacttcatccagctcatcaccggcgtggctgtcttcctgggtgtctccttcttcatcctctccctcattctcggatacacctggcttgaggctgtcatcttcctcatcggcatcatcgtggccaatgtcccagagggtctgctggccactgtcactgtgtgtctgacgctgaccgccaagcgcatggcccggaagaactgcctggtgaagaacctggaggctgtagaaaccctgggctccacgtccaccatctgctcagataagacagggaccctcactcagaaccgcatgacagtcgcccacatgtggtttgacaaccagatccacgaggctgacaccactgaggaccagtcagggacctcatttgacaagagttcgcacacctgggtggccctgtctcacatcgctgggctctgcaatcgcgctgtcttcaagggtggtcaggacaacatccctgtgctcaagagggatgtggctggggatgcgtctgagtctgccctgctcaagtgcatcgagctgtcctctggctccgtgaagctgatgcgtgaacgcaacaagaaagtggctgagattcccttcaattccaccaacaaataccagctctccatccatgagaccgaggaccccaacgacaaccgatacctgctggtgatgaagggtgcccccgagcgcatcctggaccgctgctccaccatcctgctacagggcaaggagcagcctctggacgaggaaatgaaggaggccttccagaatgcctaccttgagctcggtggcctgggcgagcgcgtgcttggtttctgccattattacctgcccgaggagcagttccccaagggctttgccttcgactgtgatgacgtgaacttcaccacggacaacctctgctttgtgggcctcatgtccatgatcgacccaccccgggcagccgtccctgacgcggtgggcaagtgtcgcagcgcaggcatcaaggtcatcatggtcaccggcgatcaccccatcacggccaaggccattgccaagggtgtgggcatcatctctgagggcaacgagactgtggaggacatcgccgcccggctcaacattcccgtcagccaggttaacccccgggatgccaaggcctgcgtgatccacggcaccgacctcaaggacttcacctccgagcaaatcgacgagatcctgcagaatcacaccgagatcgtcttcgcccgcacatccccccagcagaagctcatcattgtggagggctgtcagagacagggtgcaattgtggctgtgaccggggatggtgtgaacgactcccccgctctgaagaaggccgacattggggtggccatgggcatcgctggctctgacgtctccaagcaggcagctgacatgatcctgctggacgacaactttgcctccatcgtcacaggggtggaggagggccgcctgatcttcgacaacctaaagaagtccattgcctacaccctgaccagcaatatcccggagatcacgcccttcctgctgttcatcatggccaacatcccgctgcccctgggcaccatcaccatcctctgcatcgatctgggcactgacatggtccctgccatctcactggcgtacgaggctgccgaaagcgacatcatgaagagacagcccaggaacccgcggacggacaaattggtcaatgagagactcatcagcatggcctacgggcagattggaatgatccaggctctcggtggcttcttctcttactttgtgatcctggcagaaaatggcttcttgcccggcaacctggtgggcatccggctgaactgggatgaccgcaccgtcaatgacctggaagacagttacgggcagcagtggacatacgagcagaggaaggtggtggagttcacctgccacacggccttctttgtgagcatcgttgtcgtccagtgggccgatctgatcatctgcaagacccggaggaactcggtcttccagcagggcatgaagaacaagatcctgatcttcgggctgtttgaggagacggccctggctgccttcctgtcctactgccccggcatggacgtggccctgcgcatgtaccctctcaagcccagctggtggttctgtgccttcccctacagtttcctcatcttcgtctacgacgaaatccgcaaactcatcctgcgcaggaacccagggggttgggtggagaaggaaacctactactgacctcagccccaccacatcgcccatctcttccccgtcccccaggcccaggaccgcccctgtcagtccccccaattttgtattctggggggaggagccctctcttcctgtggccccaccttggcccccaccccctccactatctcctgccgcccccactctggctggcttctctcccctgccccaaacctctctcctctctcttttctgtgtcagtttctctccctctcctcacccctctatccattcctcccgccccagccacctccctgggctcttttttactccccttcagccccccggctgatgccatctctggttctggacaattatcaaatatatcagtggggagagagaa

SEQ ID NO: 5617 - DNA, 1118 bp, Homo sapiens; identical to SEQ ID NO: 4569

SEQ ID NO: 5618 - DNA, 1779 bp, Homo sapiens; identical to SEQ ID NO: 698

SEQ ID NO: 5619 - DNA, 842 bp, Homo sapiens
cggcggcggcggcagcggcagccagaggactcccagcggctggagcagaagtgttagcggccagagctcccagacccctacccacagccaggcgggacgcgcacagtccctccacgcggaaagaagtaccttcgccggtcaccggctcctgcagggtgcaaatatatacagagcttcataatcagcccaagaccacatagagcaaacatgaatgatatttcccaaaaggctgagattctgctttcttcatctaaacctgtcccaaaaacctatgtaccaaaacttggcaagggtgatgtaaaggataagtttgaagccatgcagagagccagggaagaaagaaatcaaaggagatctagagacgaaaaacaaagaagaaaagaacaatatattagagagagagaatggaacaggagaaagcaggagattaaagaaatgcttgcttctgatgatgaggaagatgtatcttctaaagtagaaaaggcttatgttccaaaattaacaggaactgtgaagggtagatttgctgaaatggagaaacaaagacaagaggaacaaaggaagagaacggaggaggaacgaaaacgcagaattgagcaggatatgttagaaaagaggaaaatacagcgtgaattagcaaaaagggctgaacagaaattagccaggcgtgatggtgcacacctgtagtaccagctactcaggaggctgaggcaggagaattgcttgaacccagcatgcagaagttgcagtgacctgagactacgacactacactccagcctgggtgacagcacgagactccatctcaaaaaaaaaaataaactagcctacatctttcactgc

SEQ ID NO: 5620 - DNA, 4928 bp, Homo sapiens
taaaaagtcgcagcgaagcctgcacctccgagcaccgcgcgcggccctgcccccggcacggcccccaggtgcgctccttctccggctgcttgtagcactggtctcactgtccccgccgtcagccaccggttccttatccgtctcattccccattgtggcttggctgagccggtcgccaggcctcgctgtcctcctttgccttcctctctcctcagcggccgtactttgcgccgtacctcacctggcctgcaggatgaagaaccccatgctggaggtggtgtctttactactggagaagctgctcctcatctccaacttcacgctctttagttcgggcgccgcgggcgaagacaaagggaggaacagtttttatgaaaccagctctttccaccgaggcgacgtgctggaggtgccccggacccacctgacccactatggcatctacctaggagacaaccgtgttgcccacatgatgcccgacatcctgttggccctgacagacgacatggggcgcacgcagaaggtggtctccaacaagcgtctcatcctgggcgttattgtcaaagtggccagcatccgcgtggacacagtggaggacttcgcctacggagctaacatcctggtcaatcacctggacgagtccctccagaaaaaggcactgctcaacgaggaggtggcgcggagggctgaaaagctgctgggctttaccccctacagcctgctgtggaacaactgcgagcacttcgtgacctactgcagatatggcaccccgatcagtccccagtccgacaagttttgtgagactgtgaagataattattcgtgatcagagaagtgttcttgcttcagcagtcttgggattggcgtctatagtctgtacgggcttggtatcatacactacccttcctgcaatttttattccattcttcctatggatggctggctaacttcatacccccatgtcagtgtgtgtattctgtatgtaaatatgtttatatttatagagcatcaatcaatataagcattattgagaaaaatgtgacccgtaacactgtgttctggataaaaatgtgattaggaatcacgcaaagtgcttactgtgtaagcccaagaacaaaggctttctgaatcttctcaggcagttcagatttaaagcaccatccaaaccttggaaatacgacagggtgtggtagaattcagcaatatgagaaaaccagcccctaaaatgatagccacaagagattaattgtgtttttttttctcctgtaatccttgtactgttcggctgaatttgaagattggaagacttatattgagaccagtaactttactgtaaatttactttgtttcattgaaaaaacaaattgataaacatattaaactggaagaattttctttattcaaatgaaaacatgtttgatgactggtcaaaaaataagctcataatctatttttttcatgtagtatataagtcaagaatgttttattgtcattatgtgaaaccaatattggcaaatagtactttaatgatgaagtaaatgaccagaaattatagaaatctgtgttttcctgtaaaaatagcactatagtatcacttgaacaatttgatttggctttacttactaggaagcctggaattcattatttttttccttttatgtgccactgtggctactttaaatcactctgagaggtaaatggatataggattgaagttatgtgggtatttggcatgtgtgtgtgaaataaatatgtagatagtcacatatacacagactgagagataaattgttcttgattgctttattatcatcatactagtgtgttcattatagagtatctgtagaggtgaatgtaaaagtaagtccaatctattttcttatgtcattgaatttgtagtgttaacttgcatatatgttattggatgggttgtcttttaaagcatttactaatgtactctgaaatttttaaaagccttcagatttgttttctagtcacttttttccatatcatttctaattatagtttatatccttaaaagaaggatgccacagtagtatgtaaaacccaaacaagtagaacccaagcaaataaaattatttaaaataattttaaagtggcttagtactgccagtcatgtaaattgattctgctgagggtcttataagaattgagatataacaatggtaaaacaagcattcaagcacttttacaaaattaccaaattcttaaaatgaagccacagctagacttgcatttcaggtattaaaattgctttcttaactgtcaagaatcacaaaataacaaatcatattatgagtgaatatggggagggcggggccaatcagtcaatgataatctgaacaaattttaagagcagattttagattaataatgttttatcaccactaatttgcccacaacaaactcagtatttaatttttcaaattaaatattaaattatttaagtattttaaataattaaaacattaaatggcaacaccatagaatataggtgttctctggacctattctaaccacttaaaattatcttaagtatgcatacataaaagcaaccactatgagaactaccgtgttagtggtttttcacttactgtatattacccttgtaggaatagtttaaggaaattcatttcttaaaaatatagtgtcctcaaataattaatttttttgcaaactttagttattacaggcagcaaaaaccactgtctgaaactaaatctgtgttcaaagatgaagacccctcattaaaagccaaggacgttcttaagattggaactgacataattagtcttgacttacttcattaaagcaagattcaattccttgttcatttgagtgttcattatatgccaggcattgaccagttgcaattttatggtccagaattaatattattattcgtaaactagctataatagagtatatacagtgctgtgggaatacaggggaagaagcaattaaatctgctagaagggtaagagaaatctgtatgcaggaggcaatgctagcattaagccaagaaatagtgtgaggtgatcttatcacactgatgtgttcaactgtttatgggaaaaggaaactaggatggttttatttgtgaaatgttctacaacgctagaactgttgaacttcttgggagaaaaggagaatctttgttttgttgtgctgagtttgattagttgcttaaccaagtagaaagaaaagcacatcttcctgatcacagttataaaagaaaccctgaggccgggcgcggtggctcaagcctgtaaccccagcactttgggaggccaaggagggaggatcacaaggtcaggagatcgagaccatcctggctaacacggtgaaaccccatctctactaaaaatacaaaattagctgggcgtggtggccggcgcctgtagtcccagctactcatgaggttgaggcaggagaatggcgtgaaccgaggaggcggagcttgcagtgagtggaaattgcgccactgcactccagcctgggcaacaaagtgagactccatctcaaaaaaaaaaaaaaaaaaaaaaaaaaaaaaagaagaagaaaccctgagccattaatgtgtctcgtaacttgaggaagttcatgaattctctgggcttcatccattaagattcatccttatgctcctgcaagtttcttatatttatgtatttctattctgatttctgaaatgataacctagtagtgtctgatgaagttttttcatgcttattttattctttgtcacagatgaaagaagaataggactaattggggctaagatgaattaatgtaagtgtcagatactaggcaggtgttagggatgaaatgatgaatgaggcatggacctgttcctcagagtttatggcccagtagacataattgtattaggactttctgcagttgacatttgcataaagctgactgactgaaggaacagaaagtgagacagacagatatgaccaaatttatacaaaccatgtaccaacacttgaaagatgggtggatattttccaggaaacagattttgggcaggacattccatgcactggaaatagcatgaacaaatgcatgaaaattgcctacaacatgcctggcacatagctgtgaggtaccctatgagttgttgacttgaaaacatggaactgcacagggcattcaggcaagtgcaagtggttcaggggccagcgcagagcagagtgctgagtaaagatgtcagaaaaggaaagcaatggtctggtacaagtcttgtatagaacaagaagtttagacttttgaacaggcaatcgagatttggggttcagaaagataaatcccaaaagtatggagaacaaaggaactcattttaaaggactagctaagatgctcaatctctaaaaaaaaaaggatctgtattcgtgagagtagagagaaaggttgtttaggaagagtcaacagactttagcaaaatccttttatttgattcatgcataactcctgatggagtgtcaaggaagactcattcacttttctttcctgccagaaagttggttcttgcaaaatagattaacttgatgactatgtgtatattggatactcctaattttagctctgttagatatgtttctttctaaggacaagcaactatgtatagacttgttgtttgaattttttttcagtatatatatgtttcttgtttttctatttttctacttcatactgttaatgtcaaatatcaaaaatgttttccagcaatatcaagttatggcaatggcaaaagtccttgttgtagatgagaagcatataagaaatggttgccaatctttgttttgtatgatctatttagagttttaaccaacctagatctgtcagctaagctaattttatatttggtatacatgcatgtcaaataaagttaattttacatac

SEQ ID NO: 5621 - DNA, 3852 bp, Homo sapiens; identical to SEQ ID NO: 5119

SEQ ID NO: 5622 - DNA, 3723 bp, Homo sapiens
atttgactgtcttttatccaactgcccagaagcaaatgtgttaactcggcgatgccccttcatgcccgggttcttgcagagctctgaggacgcccagacccattttcctggctggatttggagcggctgctgggctgtggacccaggtgtgtggatcgctttacccagaagcttggaaagcgccaatattaacctgcttccaggtacatcacaaggtcaagagagtgtcttgcagccctcttgtttccgtgtatctacaccttcttctcttggccagaaggatatttacgttttggttcacagcatttgaagccaaaagttcagcccttcgaactggtttgctatacaaaacaaaacaaaacaaataaggtaatgaggattgcttattaaactgcttaacaaaatccccgactcttcctcagccctttctcggctccctcctccccaccaaaatgtcaccagctcttgaattacgtggattcgggttggaggagaacttgaaggaaacgtgattaaagggctatgcgagaacgctctctttgctgcccgcggtccggtgggcttcgaagccaatcgtgagaaggaccggttccctccgtgctgcttcctccccgtgcagtgctgggtgtgcgtgtgcgagtgtgagtgcaagtgcgcgcgcgcccgggtgcgagtgtgtgtgagtgtgagcgtgtgtctgtgtgtgcgtgcgcggccgccctgcctctgcccgctccccgggcgcggagccgcgggtttcatggggcgattgcagcgattcccccacccagagcgacctgcgggcagcggcggcagtggcaggagccgcctttccgattccctacgatgcgggtgctgagctatggcaaagggcagcgaagtgacgagcgagacccgcgtacgactgtgaaagccacctggagccaccttgccgggattgtacctgcaggcagaaagtcttcctacgaccgtcttttcccttagaggcaccagaatccctgtaaccattcatccaggtgttgagaagatatgtagcagccgagcacccatcttttgacaccgtcctctgaaatcagctttggagatgctttcactctgtccgtcttctgcagcagccaggcagagtgccgactccttcacagccgtgaggaactcttcaggctccagaagctcttaaacctgatctacaatggaaaaaattcttttttatctgtttctcattggcatagcagtgaaagctcagatctgtccaaagcgttgtgtctgtcagattttgtctcctaatcttgcaaccctttgtgccaagaaagggcttttatttgttccaccaaacattgacagaagaactgtggaactgcggttggcagacaattttgttacaaatattaaaaggaaagattttgccaatatgaccagcttggtggacctgactctatccaggaatacaataagttttattacacctcatgctttcgctgacctacgaaatttgagggctttgcatttgaatagcaacagattgactaaaattacaaatgatatgttcagtggtctttccaatcttcatcatttgatactgaacaacaatcagctgactttaatttcctctacagcgtttgatgatgtcttcgcccttgaggagctggatctgtcctataataatctagaaaccattccttgggatgctgttgagaagatggttagcttgcatacccttagtttggatcacaatatgattgataacattcctaaggggaccttctcccatttgcacaagatgactcggttagatgtgacatcaaataaattgcagaagctaccacctgaccctctctttcagcgagctcaggtactagcaacctcaggaatcataagcccatctacttttgcattaagttttggtggaaaccccttgcattgcaattgtgaattgttgtggttgaggcgtctgtccagagaagatgacttagagacctgtgcttctcctccacttttaactggccgctacttttggtcaattcctgaagaagagtttttgtgtgagcctcctctcattactcgtcatacacatgagatgagagtcctggagggacaaagggcaacactgaggtgcaaagccaggggagaccctgagcctgcaattcactggatttctcctgaagggaagcttatttcaaatgcaacaagatctctggtgtatgataacggaacacttgacattcttatcacaactgtaaaggatacaggtgcttttacctgcattgcttccaatcctgctggggaagcaacacaaatagtggatcttcatataattaagctccctcacttactaaatagtacaaaccatatccatgagcctgatcctggttcttcagatatctcaacttctaccaagtcaggttctaatacaagcagtagtaatggtgatactaaattgagtcaagataaaattgtggtggcagaagctacatcatcaacggcactacttaaatttaattttcaaagaaatatccctggaatacgtatgtttcaaatccagtacaatggtacttatgatgacacccttgtttacagaatgatacctcctacgagcaaaacttttctggtcaataatctggctgctggaactatgtatgacttgtgtgtcttggccatatatgatgatggcatcacttccctcactgccacaagagtcgtgggttgcatccagtttactacggaacaggattatgtgcgttgccatttcatgcagtctcagtttttgggaggcaccatgattattattattggtggaatcattgtagcatctgtgctggtattcatcattattctgatgatccggtataaggtttgcaacaataatgggcaacacaaggtcaccaaggttagcaatgtttattcccaaactaacggggctcaaatacaaggctgtagtgtaacgctgccccagtccgtgtccaaacaagctgtgggacacgaagagaatgcccagtgttgtaaagctaccagtgacaatgtgattcaatcttcagaaacttgttcgagtcaggactcctctaccactacctctgctttgcctccttcctggacttcaagcacttctgtgtcccaaaagcagaaaagaaagactggcacaaagccaagtacagaaccacagaatgaagccgtcacaaatgttgaatcccaaaacactaacaggaacaactcaactgccttgcagttagctagccgtcctcccgattctgtcacagaggggcccacgtctaaaagagcacatataaagccaaatgctttgctgactaatgttgaccagattgtccaggaaacacagaggctggagttaatctgaagagcaccacttctcctctctctcctgaaaaaatttgccactgatatttttactggataaaattcaaaaatgtttcaattcacaaaggctaattgttgaactggtgtcgtagaagaaattgtctacaggagccaaggtgaaagtctctgatgacggcggaactggctccattagaccatggttcatcctcttttaaaaccaaatttttttttcttctggcctacaagtattttttttttaaaaaagaaaaaaagcctacattggcatcaagttctgtatcaatccatcttacattgccatccatgatttaacagactgtagaatcttgaataatctatatcactttaacaaataaatgttttactatgacagaa

SEQ ID NO: 5623 - DNA, 2271 bp, Homo sapiens
gcttcatgaatgcacacagtcacgtcgcagaagtgcccacccagcttctgcccattgagggtctcaagcagagagcgtgagaagttctgcagatgtatgtggcgcacagcctctacagccgccgactccgactcctcttcaggcaccaggcctggccgtggccgccttctcaccgactccaaggcagcacttccgggcgcttctctttatttttatacagttttattgagatataatttacatgctatccagcccatctatttcaagtgtaccatgcaaggggtttgtatatattcacagagttgtgtatccatcaccatcgttttagaacattcatcactccagaagaaactacgtacccatcagcagccactgcccatttccctgatctgccccgccctaggaaatccgtaatcactttcagtctatggatttgcctattctagaccattcatataaatgaagtcacacaacactgggtcttatgtgactggcttctatcaaagtttgcaaggttcatttatgttcatgggctgaccccacattggacaccgctgcatccatgtccatcacacaacacagctgccgtttcttctgcctgcttatgggaaagtcccctcttctcctccgttttcttctcttcctgccctatcacaccgtgcacttctccctttccttaaagaaccaccatcaactttaggaggagggaaaggggtggctctggcaggaaaagccagaatcccctctagccagcagagagagagaggaatggctgcatgttttctcccccagtccaaggcactgggtcttggctgggttgaaggttccaagctgctctcctgctgtgtcggtgagttctggtcaacctgcaacctcctgatatggccattgcagttcatcgagtcttcagggactccccatggcctggagtactttgccttgcttacacgggagaggagaatggatttatagagaacatcatctaaatccaacttgaccattgtgtggccacacttgctagattgctatagtctaaatctagcattgtagaaagacgggggagcttggagctgcacaaacccaggtctggaactggctccttaccttggaaggtgaatgatcctgccaggactcttagcctccctgggtctcaatttctttatctgtttcatgggaatgaggatctctgctgggtggttgggtgatgtgggggctgtgtgaaaacagcttgtcaatacaagccaaaatagaaatatttctccacagagtatgaaggtcaaatgagagaatacatttaaattaaatggaaaattaaaatggtaaaaaatgcaaagctgtattgaaagttccgagcttctctataaggagctttttgactatggaagaatcctgtactcgttccccctaaatataaaaaaaaagttgaaggaggcagaagggagagtgatgcacgatgggcaaggacttcacctgctgttgctggctttgaggatggaggaaggaggccacaaacctagaagctggagcccctagaagctagaaaaggcagggacccgattctttccttgagcctccagaagggacacagccccgccagcaccttgactttagcctggtgagatcctcttaggacttttggcaatcagaactataagacagaaatggaagccactgagtctgtagctgtttgttgcagcagcaatagaaaactaatgcagggcccaagaaatcactggtgatgagatcgggaaagtgggctcaggaggtctggatctgtgatgagatggggaaagtgggctcaagaggtctggatctgtggtgagatgggggaagtgggctcaggaggtctggatctgtgatgagatggggaaagtgggctcaggaggtctggatctgtgatgagatggggaaagtgggctcaggaggtctggatctgtgatgagatgggggaagtgggctcaggaggtctggatctgtgatgagatgggggaagtgggctcaggaggtctggatctgtgatgagatgggggaagtgggctcaggaggtctggatctgtgatgagatggggaaagtgggctcaggaggtctggatctgtgatgagatcgggaaagtgggctcaagaggtctggatctgtggtgagatgggggaagtgggctcaggaggtctggatctgtgatgagatggggaaagtgggctcaggaggtctggatctgtgatgagatgggggaagtgggctcaggaggtctggatctggggtggggatctgga

SEQ ID NO: 5624 - DNA, 2337 bp, Homo sapiens
atgctagacagctgcaagctgaaaagtgcctgcaatttgccatttatttgtaataagaaaataataaacactgctggaaccagtaatgcagaagtccccttggctgatcccggaatgtaccagctggacattacattaagaaggggtcaaagtttagctgctcgagatcgaggagggacgagtgatccatatgtgaagtttaaaatcggaggaaaagaagtttttagaagtaagataatacacaagaacctcaaccctgtgtgggaagaaaaagcttgtattctggttgatcatcttagggagccattgtatataaaggtatttgactatgattttggactacaggatgactttatgggctcagcctttctggatctgacacaattggagttaaacaggcccacagatgtgacccttactctgaaagatcctcattatcctgaccatgatcttggaatcattttgctctcagtcatccttacccctaaagaaggagagtccagggatgtgacaatgctaatgaggaagagttggaaaagatcaagtaaggaactttcagaaaatgaagtggttggatcttatttctctgtgaagtctctcttttggaggacgtgcggcaggccagctcttcctgtcctgggcttctgcagagcagagcttcagaatccttattgcaaaaatgtacaatttcagacccaaagtttacgcctatcagacctacacagaaaatcgcatctttggagaggaatagtcagcatcaccttgattgaagggagagacctcaaggccatggattccaacgggttgagcgatccctacgtgaagttccggcttgggcatcagaagtacaagagcaagattatgccaaaaacgttgaatcctcagtggagggaacaatttgattttcacctttatgaagaaagaggaggagtcattgatatcactgcatgggacaaagatgctgggaaaagggatgatttcattggcaggtgccaggtcgacctgtcagccctcagtagggaacagacgcacaagctggagttgcagctggaagagggtgagggacacctggtgctgctggtcactctgacagcatcagccacagtcagcatctctgacctgtctgtcaactccctggaggaccagaaggaacgagaggagatattaaagagatatagcccattgaggatatttcacaacctgaaagatgtgggatttctccaggtgaaagtcatcagagcggaagggttaatggctgccgacgtcactggaaaaagtgacccattttgtgtggtagaactgaacaacgatagactgctaacacatactgtctacaaaaatctcaatcctgagtggaataaagtcttcacgttcaacattaaagatatccattcagttcttgaagtgacagtttatgatgaagatcgggatcgaagtgctgactttctgggcaaagttgctataccattgctgtctattcaaaatggtgaacagaaagcctacgtcttgaaaaacaagcagctgacagggccaacaaagggggtcatctatcttgaaatagatgtgatttttaatgctgtgaaagccagcttacgaacattaatacccaaagaacagaagtacattgaagaggaaaacagactctctaaacagctgctactaagaaactttatcagaatgaaacgttgtgtcatggtgctggtaaatgctgcatactacgttaatagttgctttgattgggattcacccccaaggagtctcgctgcttttgtgctctttctctttgttgtctggaactttgagctctacatgataccactggttttgttgttactattgacatggaactacttcttgataatatcagggaaagataacaggcaacgtgatacagtagtggaggacatgctagaggacgaggaagaagaagatgacaaagatgacaaggacagtgaaaaaaagggatttataaataaaatctatgccatccaggaggtatgtgtcagtgtccagaacatcctagatgaagtggcttcctttggcgaaaggataaagaatactttcaactggactgtcccattcttaagctggctggccattgtagccctctgtgtgttcacagccatcctgtactgcattccgctgagatacattgtccttgtctggggcatcaataaatttacaaaaaagcttcggagtccatatgcaattgataacaatgaactacttgacttcctttccagagtcccttcagatgtacaagtggtgcaataccaagaactgaaaccagatccttctcatagcccatataaaagaaagaaaaacaatcttggctag

SEQ ID NO: 5625 - DNA, 6476 bp, Homo sapiens
cagtttggcaagtcagtgcaagaggctgacttctgagaggcttccaggagcccgaagagaggacctccacgggagaagggagtgcgtgtgctcggttttgtttttttctctcttttttttttttttttctgaatgaacagctttgcccaagtgactgaaaaatacagcttcttcctgaatctaccggcgtagttgctgaagagcgctctagacaggacatggctctgaagactcactctttggaatgtcctcttgctcccggcttataaacaactgtcccgaggaaagaaaggttttacatagccaaatacagcctgacaaatggcacttcggaactgtgctttctgatgacaacgcgttcgatttctgacaaagcctctcgcacgctgcccctggagggaagtcctaagtaaaactcagaccctccttaaagtgaggagcgagggcttggacggtgaacacggcagcatggcatccgcggggcacattatcaccttgctcctgtggggttacttactggagctttggacaggaggtcatacagctgatactacccacccccggttacgcctgtcacataaagagctcttgaatctgaacagaacatcaatatttcatagcccttttggatttcttgatctccatacaatgctgctggatgaatatcaagagaggctcttcgtgggaggcagggaccttgtatattccctcagcttggagagaatcagtgacggctataaagagatacactggccgagtacagctctaaaaatggaagaatgcataatgaagggaaaagatgcgggtgaatgtgcaaattatgttcgggttttgcatcactataacaggacacaccttctgacctgtggtactggagcttttgatccagtttgtgccttcatcagagttggatatcatttggaggatcctctgtttcacctggaatcacccagatctgagagaggaaggggcagatgtccttttgaccccagctcctccttcatctccactttaattggtagtgaattgtttgctggactctacagtgactactggagcagagacgctgcgatcttccgcagcatggggcgactggcccatatccgcactgagcatgacgatgagcgtctgttgaaagaaccaaaatttgtaggttcatacatgattcctgacaatgaagacagagatgacaacaaagtatatttcttttttactgagaaggcactggaggcagaaaacaatgctcacgcaatttacaccagggtcgggcgactctgtgtgaatgatgtaggagggcagagaatactggtgaataagtggagcactttcctaaaagcgagactcgtttgctcagtaccaggaatgaatggaattgacacatattttgatgaattagaggacgtttttttgctacctaccagagatcataagaatccagtgatatttggactctttaacactaccagtaatatttttcgagggcatgctatatgtgtctatcacatgtctagcattcgggcagccttcaacggaccatatgcacataaggaaggacctgaataccactggtcagtctatgaaggaaaagtcccttatccaaggcctggttcttgtgccagcaaagtaaatggagggagatacggaaccaccaaggactatcctgatgatgccatccgatttgcaagaagtcatccactaatgtaccaggccataaaacctgcccataaaaaaccaatattggtaaaaacagatggaaaatataacctgaaacaaatagcagtagatcgagtggaagctgaggatggccaatatgacgtcttgtttattgggacagataatggaattgtgctgaaagtaatcacaatttacaaccaagaaatggaatcaatggaagaagtaattctagaagaacttcagatattcaaggatccagttcctattatttctatggagatttcttcaaagcggcaacagctgtatattggatctgcttctgctgtggctcaagtcagattccatcactgtgacatgtatggaagtgcttgtgctgactgctgcctggctcgagacccttactgtgcctgggatggcatatcctgctcccggtattacccaacaggcacacatgcaaaaaggcgtttccggagacaagatgttcgacatggaaatgcagctcagcagtgctttggacaacagtttgttggggatgctttggataagactgaagaacatctggcttatggcatagagaacaacagtactttgctggaatgtaccccacgatctttacaagcgaaagttatctggtttgtacagaaaggacgtgagacaagaaaagaggaggtgaagacagatgacagagtggttaagatggaccttggtttactcttcctaaggttacacaaatcagatgctgggacctatttttgccagacagtagagcatagctttgtccatacggtccgtaaaatcaccttggaggtagtggaagaggagaaagtcgaggatatgtttaacaaggacgatgaggaggacaggcatcacaggatgccttgtcctgctcagagtagcatctcgcagggagcaaaaccatggtacaaggaattcttgcagctgatcggttatagcaacttccagagagtggaagaatactgcgagaaagtatggtgcacagatagaaagaggaaaaagcttaaaatgtcaccctccaagtggaagtatgccaaccctcaggaaaagaagctccgttccaaacctgagcattaccgcctgcccaggcacacgctggactcctgatggggtgagactatctactgtcttttgaagaatttatatttggaaagtaaaaaagtaaaaaaataaatcatccaacttctttgcattacttaaaagagatttctgtaatacaggaatgactatgaaggtgttataataaattattctacatactcatttgactggataaactttacataaaattaactaattttttaaataaatgcattgcttaatggtttctcattatgtttatcaaaaaacaactgtagctgttattttcagtacttggctgcttttctgtgaaaattattattttacttttggaagacaagattattagaatattgaagaaaaattggagacttataatcatggtaaatataaaactaaatatgttttaatatttctgaatttttcttttccatcacaatgtaagatatgcagaatacaagatactttggcattctcatgtgaactttctgtactctttaaggattattttattagtgttgtttaagccatgagtgttaagtagcaggtgtgttgtgagtgctgtaacccatgaaaggaaaaatgtcattctgaggcttgtgcccttcgtaaaatattcattaaagtacattcacactatttttgctttataacacagtctttaattttcactcactgtggaaataaaaactaaggtaacttctcagaaagatatcaaatctcagaaagaatgtcaaatcagatgaagttatagttaggattctaactactgtaaaagatttttgcttccctcttgtggtaaaaaaaattatattctcacacatttcttttttctctacagacggatatctgtttaggaaagatttgaaagcagattatcagtaggtacatggatacatcaagttcatttgcagaaacaaataactgaaataaaaaacatgttaatccttgtatcatactttaatatgaaagtattgtttatagataatttatctcacaagtcaaaaatgaagattttgcagcactgaaaatctattaaagctccaaattttaagtttctaaataatcttcgctgaaatctaaaatatactataacaaccgtgttttatttgtgaaaaaaatattaaagtgatttgctctcaaatatcaaattttcttctctcttttatattaagagacagaaaattgtttcatgagttcacttaactactgagatattcagagcatttttacctctctcttaaatgttataaaaaacaattgtatttttaagaatgtttatttatcaaagtctttccttcttctattaaatatttagcaattacctttctaaaatatgaaattttgtaagatgttttcacctaaataaaaattgaaagcaagtggattacacaggagaaccattatgaacatttatttagatattaatcttaaacagtgtttatttcagttttcaaagttagcttataggttatacatttaagttaaagtgctcataatcacttgcaatttcattgtaaaatgaacaaatacataaatattttaagaaaaatttaagtttattcagataagtcaccatgcttcaaaagatctaagaaatgcaaatatactgaaaattgacatcctctgaaaattccacttgctatttacccaagaatccactggaggtcattactgccattaaataataactgaaaagactatgtagtgaaatgtatttttaaaaactatattcagtaaaagcctgctcaatttggagaaatagaaccacaaacacagatcacaggggccttacaaagtttatgtctgaacaaataagtcaattaagtacactttattgaaaattgccttccattaacacacaagaaagaaagcaggattttctcctgtatctgaattttaaaattaaaaaggcagataagacataaatagttatcattttaattgcaataacacagacaagtagttaatgatgataacaatggtgtaacttgtaaactaaatatttggtaactgaagcaataggcagaggaaaatagcttttctatgacacaagtcataagaagtccatatactgaagagcgtttgattaaaataaagtgactattaaccagaaaagaaacattttacataaaatgctaaaatttattataggaaaataaatcaaacccaaagaaagtttattcaatgctaatttgaaagaaaattgataagaaaactttgagggcccaagtccacaatttggtgagaccactaaattttacatataattatacacacacatatgtacatatatatgtatataatcttgcttcccgcctgtttatggcagtactgaagagaaatgggaaagaagagggagggagagagaaagacgaagggagagagaaagcagtttccaaggatatgtttcatgtcccaccattttctcagtttctccctctctctcccaacacacacacacacacacccctcacatactataaaataaatcttcactgccctatcaaaatacaaataaatcaatctatgctgttctgtccttcttgagaatctaaaacataccacaaaaatacatccccagtcttttgttctgtctgaggttagaattaattcaaattcagaatctgttgtgagaaatgcccaggctttaaaaattaaaaatggatggatcttctctgaactcagggagggcacatacttagatacctacaagacttggaggaattaagagttcacccttcatctcaccaaattttccccatttttctctttcttgtagaaggagagaaaccatgctctctagcaacattgagcaaaaatcataaccactcatctaatttctaagaggcacctccatcgagggccggtctcctgcttctttagacctcttctatctttgttacaggagaggacctgtggatagacttagttttgacataaaacaatgcccattcacctcctccttcagcacaacgtcacccattgggcaagagatccagatttgttaacaaaaaagattttacttcgtgattccacgtctataattctatattgctaattttttcttttgtgtgaattactgaatatttcagagcaaagctatcaacttggagaaacagggattaaaaataaggataaacactaataagagctctagaaaaaagggaacagaaagtctgcctgtttagtaagtggcaattccatacatattttagagttttttctatctaaaattagttaaatacttagaatgtttgtaatgagtgttcgatatttgctataggttttagggttttgtaaatcttcatagtaattataaacatttgtaaaatttgtaaaatactataagtcattttgagtgttggtgttaagcatgaaacaaacagcagctgttgtccttaaaaatgaattgacctggccgggcgcggtggctcacgcctgtaatcccagcactttgggaggccgaggcgggtggatcatgaggtcaggagatcgagaccatcctggctaacaaggtgaaaccccgtctctactaaaaatacaaaaaattagccgggcgcggtggcgggcgcctgtagtcccagctacttgggaggctgaggcaggagaatggcgtgaacccgggaagcggagcttgcagtgagccgagattgcgccactgcagtccgcagtccggcctgggcgacagagcgagactccgtctc

SEQ ID NO: 5626 - DNA, 3557 bp, Homo sapiens
gctgaccaggccggtcccccgggaacaggaaccctggtggacgggtcccagcaggcttcttcggtgcccgagagggagcgggtgcccaagggggtggtccctgtggcaggtcccggggtgggggcgcggcgctccgggaagagccttccgcaggtccccgccccgtcacgtgggcgccggccccggccgctgcggtcggtccgctggttggtcgggcgcttggtccggcagttggtcggtgggccagtggcccgtcgctcgcttctgggctctcatgtttgaaggtgggagggacacgggagcggcccgcacacctgagccgcccggagaggagcctcggccccgtacccagtaagaagaggaggaggccaggcaggcaaaaggagtcatggcttctgatgctagtcatgcgctggaagctgccctggagcaaatggacgggatcattgcaggcactaaaacaggtgcagatcttagtgatggtacttgtgagcctggactggcttccccggcctcctacatgaaccccttcccggtgctccatctcatcgaggacttgaggctggccttggagatgctggagcttcctcaggagagagcagccctcctgagccagatccctggcccaacagctgcctacataaaggaatggtttgaagagagcttgtcccaggtaaaccaccacagtgctgctagtaatgaaacctaccaggaacgcttggcacgtctagaaggggataaggagtccctcatattgcaggtgagtgtcctcacagaccaagtagaagcccagggagaaaagattcgagacctggaagtgtgtctggaaggacaccaggtgaaactcaatgctgctgaagagatgcttcaacaggagctgctaagccgcacatctcttgagacccagaagctcgatctgatgactgaagtgtctgagctgaagctcaagctggttggcatggagaaggagcagagagagcaggaggagaagcagagaaaagcagaggagttactgcaagagctcaggcacctcaaaatcaaagtggaagagttggaaaatgaaaggaatcagtatgaatggaagctaaaggccactaaggctgaagtcgcccagctgcaagaacaggtggccctgaaagatgcagaaattgagcgtctgcacagccagctctcccggacagcagctctccacagtgagagtcacacagagagagaccaagaaattcaacgtctgaaaatggggatggaaactttgctgcttgccaatgaagataaggaccgtcggatagaggagcttacggggctgttaaaccagtaccggaaggtaaaggagattgtgatggtcactcaagggccttcggagagaactctctcaatcaatgaagaagaaccggagggaggtttcagcaagtggaacgctacaaataaggaccctgaagaattatttaaacaagagatgcctccaagatgtagctctcctacagtggggccacctccattgccacagaaatcactggaaaccagggctcagaaaaagctctcttgtagtctagaagacttgagaagtgaatctgtggataagtgtatggatgggaaccagcccttcccggtgttagaacccaaggacagccctttcttggcggagcacaaatatcccactttacctgggaagctttcaggagccacgcccaatggagaggctgccaaatctcctcccaccatctgccagcctgacgccacggggagcagcctgctgaggctgagagacacagaaagtggctgggacgacactgctgtggtcaatgacctctcatccacatcatcgggcactgaatcaggtcctcagtctcctctgacaccagatggtaaacggaatcccaaaggcattaagaagttctggggaaaaatccgaagaactcagtcaggaaatttctacactgacacgctggggatggcagagtttcgacgaggtgggctccgggcaaccgcagggccaagactctctaggaccagggactccaagggacagaaaagtgacgccaatgccccctttgcccagtggagcacagagcgtgtgtgtgcatggctggaggactttggcctggctcagtatgtgatctttgccaggcagtgggtatcttctggccacaccttattgacagccacccctcaggacatggaaaaggagctaggaattaagcacccactccacaggaagaagcttgttttagcagtgaaagccatcaacaccaaacaggaggagaagtctgcactgctagaccacatttgggtgacaaggtggcttgatgatattggcttaccccagtacaaagaccagtttcatgaatctagagttgacagacgaatgctgcaatacctaactgtgaacgatttactcttcttaaaagtcaccagccaactacatcatctcagcatcaaatgtgccattcacgtgctgcatgtcaacaagttcaacccccactgcctgcaccggcggccagctgatgagagtaacctttctccttcagaagttgtacagtggtccaaccacagggtgatggagtggttacgatctgtggacctggcagagtatgcacccaatcttcgagggagtggagtccatggaggcctcattatcctggagccacgcttcactggggacaccctggctatgcttctcaacatccccccacaaaagacgctcctcaggcgccacctgaccaccaagttcaatgccttgattggtccggaggctgaacaggagaagcgagagaaaatggcctcaccagcttacacaccactgaccaccacagccaaagtccggccaaggaaactaggattttcacacttcggaaacataagaaaaaagaagttcgatgaatcgacggactacatttgcccaatggagcccagtgacggtgtcagtgatagtcacagggtctacagtggctaccggggcctcagcccccttgatgcccctgaactggatgggctggaccaggtgggacagattagctgatgcccttgtcacctgccctctgtgcaccctgagagctcacagtaacactgtgtgtgtcaccatataactgcacctcacccccgcacgtgtgcatgactcgcagagaatattccagcaattgtgtacccctgggccagtctctttgaaccctgagggtggccaggatctggagctgcatctctaaggggccaggctttggggaccattgccaaaggtggactcaggaggaaagacacttaaagacacttttacatgtctagtaattcttgatgttcatcttcagcaccagtggaaacacatgaacttcgatgcaggtccagagaccatggacactcccacgaggctcagctctcaggcaccccctacacttcagttgagggaaaagctcaagtgccttaggcccgtggaccacagtcttggctgagatcaaagggatgagcaacagggacttctgccacagtgacaatggaattgtgttgtgccttacttcagaggtggtctcttctttcttgtaataaaagcaatatttatgcggaaa

SEQ ID NO: 5627 - DNA, 800 bp, Homo sapiens
accaccatgaatccactcctgatccttacctttgtggcagctgctcttgctgccccctttgatgatgatgacaagatcgttgggggctacaactgtgaggagaattctgtcccctaccaggtgtccctgaattctggctaccacttctgtggtggctccctcatcaacgaacagtgggtggtatcagcaggccactgctacaagtcccgcatccaggtgagactgggagagcacaacatcgaagtcctggaggggaatgagcagttcatcaatgcagccaagatcatccgccacccccaatacgacaggaagactctgaacaatgacatcatgttaatcaagctctcctcacgtgcagtaatcaacgcccgcgtgtccaccatctctctgcccaccgcccctccagccactggcacgaagtgcctcatctctggctggggcaacactgcgagctctggcgccgactacccagacgagctgcagtgcctggatgctcctgtgctgagccaggctaagtgtgaagcctcctaccctggaaagattaccagcaacatgttctgtgtgggcttccttgagggaggcaaggattcatgtcagggtgattctggtggccctgtggtctgcaatggacagctccaaggagttgtctcctggggtgatggctgtgcccagaagaacaagcctggagtctacaccaaggtctacaactatgtgaaatggattaagaacaccatagctgccaatagctaaagcccccagtatctcttcagtctctataccaataaagtgaccctgttctc

SEQ ID NO: 5628 - DNA, 2013 bp, Homo sapiens
aagggcgaggggcggggcctgcgtcgcgctgcgggcacgtcgccgcgcgtcttcagtatttaatgtctctgtgttccacccgcctgggctagcacgtgggggagctgcggaagcgcggcgctgcgggccgggccgcggggcacagccgggggccggcggcggcgcgcggactccgcatcccgcaccccgatggtagccgaggagctggtgtaattacttcaagcctccaggatggcaatccagttccgttcgctcttccccttggcattgcctgggatgctggcgctcctcggctggtggtggtttttctctcgtaaaaaaggccatgtcagcagccatgatgagcagcaggtggaggctggtgctgtgcagctgagggctgaccctgccatcaaggaacctctccccgtggaagacgtctgtcccaaagtagtgtccacaccccccagtgtcacagagcctccagaaaaggaactgtccaccgtgagcaagctgcctgcagagcccccagcattgctccagacacacccaccttgccgaagatcagagtcctcgggcattcttcctaacaccacagacatgagattgcgaccaggaacacgcagagatgacagtacaaagctggagctagccctgacaggtggtgaagccaaatcgattcctctagagtgccccctttcatccccaaagggtgtactattctccagcaaatcagctgaggtgtgtaagcaagattcccccttcagcagggtgccaaggaaggtccagccaggctaccccgtagtccccgcagagaagcgtagctctggggagagggcaagagagacaggtggggccgaagggactggtgatgccgtgttgggggaaaaggtgcttgaagaagctctgttgtctcgggagcatgtcttggaattggagaacagcaagggccccagcctggcctctttagagggggaagaagataaggggaagagcagctcatcccaggtggtggggccagtgcaggaggaagagtatgtagcagagaagttgccaagtaggttcatcgagtcggctcacacagagctggcaaaggacgatgcggcgccagcacccccagtcgcagacgccaaagcccaggatagaggtgtcgagggagaactgggcaatgaggagagcttggatagaaatgaggagggcttggatagaaatgaggagggcttggatagaaatgaggagagcttggatagaaatgaggagggcttggatagaaatgaggagattaagcgggctgccttccagataatctcccaagtgatctcagaagcaaccgaacaggtgctggccaccacggttggcaaggttgcaggtcgtgtgtgtcaggccagtcagctccaagggcagaaggaagagagctgtgtcccagttcaccagaaaactgtcttgggcccagacactgcggagcctgccacagcagaggcagctgttgccccgccggatgctggcctccccttgccaggcctaccagcagagggctcaccaccaccaaagacctacgtgagctgcctgaagagccttctgtccagccccaccaaggacagtaagccaaatatctctgcacaccacatctccctggcctcctgcctggcactgaccacccccagtgaagagttgccggaccgggcaggcatcctggtggaagatgccacctgtgtcacctgcatgtcagacagcagccaaagtgtccctttggtggcttctccaggacactgctcagattctttcagcacttcagggcttgaagactcttgcacagagaccagctcgagccccagggacaaggccatcaccccgccactgccagaaagtactgtgcccttcagcaatggggtgctgaagggggagttgtcagacttgggggctgaggatggatggaccatggatgcggaagcagatcattcaggagttgcagctccacccccgggaaagcggggcactttgataacgaggtgtcctgggtttttcgagtgctga

SEQ ID NO: 5629 - DNA, 4722 bp, Homo sapiens; identical to SEQ ID NO: 258

SEQ ID NO: 5630 - DNA, 4727 bp, Homo sapiens
agaagccccgcagccgccgcgcggagaacagcgacagccgagcgcccggtccgcctgtctgccggtgggtctgcctgcccgcgcagcagacccggggcggccgcgggagcccgcgccccgcccgccgcgcctctgccgggacccacccgcagcggagggctgagcccgccggcggctccccggagctcacccacctccgcgcgccggagcgcaggcaaaaggggaggaaaggctcctctctttagtcaccactctcgccctctccaagaatttgtttaacaaagcgctgaggaaagagaacgtcttcttgaattctttagtaggggcggagtctgctgctgccctgcgctgccacctcggctacactgccctccgcgacgacccctgaccagccggggtcacgtccgggagacgggatcatgaagcgctcggtagccgtctggctcttggtcgggctcagcctcggtgtcccccagttcggcaaaggtgatatttgtgatcccaatccatgtgaaaatggaggtatctgtttgccaggattggctgatggttccttttcctgtgagtgtccagatggcttcacagaccccaactgttctagtgttgtggaggttgcatcagatgaagaagaaccaacttcagcaggtccctgcactcctaatccatgccataatggaggaacctgtgaaataagtgaagcataccgaggggatacattcataggctatgtttgtaaatgtccccgaggatttaatgggattcactgtcagcacaacataaatgaatgcgaagttgagccttgcaaaaatggtggaatatgtacagatcttgttgctaactattcctgtgagtgcccaggcgaatttatgggaagaaattgtcaatacaaatgctcaggcccactgggaattgaaggtggaattatatcaaaccagcaaatcacagcttcctctactcaccgagctctttttggactccaaaaatggtatccctactatgcacgtcttaataagaaggggcttataaatgcgtggacagctgcagaaaatgacagatggccgtggattcagataaatttgcaaaggaaaatgagagttactggtgtgattacccaaggagccaagaggattggaagcccagagtatataaaatcctacaaaattgcctacagtaatgatggaaagacttgggcaatgtacaaagtgaaaggcaccaatgaagacatggtgtttcgtggaaacattgataacaacactccatatgctaactctttcacaccccccataaaagctcagtatgtaagactctatccccaagtttgtcgaagacattgcactttgcgaatggaacttcttggctgtgaactgtcgggttgttctgagcctctgggtatgaaatcaggacatatacaagactatcagatcactgcctccagcatcttcagaacgctcaacatggacatgttcacttgggaaccaaggaaagctcggctggacaagcaaggcaaagtgaatgcctggacctctggccacaatgaccagtcacaatggttacaggtggatcttcttgttccaaccaaagtgactggcatcattacacaaggagctaaagattttggtcatgtacagtttgttggctcctacaaactggcttacagcaatgatggagaacactggactgtataccaggatgaaaagcaaagaaaagataaggttttccagggaaattttgacaatgacactcacagaaaaaatgtcatcgaccctcccatctatgcacgacacataagaatccttccttggtcctggtacgggaggatcacattgcggtcagagctgctgggctgcacagaggaggaatgaggggaggctacatttcacaaccctcttccctatttccctaaaagtatctccatggaatgaactgtgcaaaatctgtaggaaactgaatggtttttttttttttttcatgaaaaagtgctcaaattatggtaggcaactaacggtgtttttaagggggtctaagcctgccttttcaatgatttaatttgattttattttatccgtcaaatctcttaagtaacaacacattaagtgtgaattacttttctctcattgtttcctgaattattcgcattggtagaaatatattagggaaagaaagtagccttctttttatagcaagagtaaaaaagtctcaaagtcatcaaataagagcaagagttgatagagcttttacaatcaatactcacctaattctgataaaaggaatactgcaatgttagcaataagtttttttcttctgtaatgactctacgttatcctgtttccctgtgcctaccaaacactgtcaatgtttattacaaaattttaaagaagaatatgtaacatgcagtactgatattataattctcattttactttcattatttctaataagagattatgtgacttctttttcttttagttctattctacattcttaatattgtatattacctgaataattcaatttttttctaattgaatttcctattagttgactaaaagaagtgtcatgtttactcatatatgtagaacatgactgcctatcagtagattgatctgtatttaatattcgttaattaaatctgcagttttatttttgaaggaagccataactatttaatttccaaataattgcttcataaagaatcccatactctcagtttgcacaaaagaacaaaaaatatatatgtctctttaaatttaaatcttcatttagatggtaattacatatccttatatttactttaaaaaatcggcttatttgtttattttataaaaaatttagcaaagaaatattaatatagtgctgcatagtttggccaagcatactcatcatttctttgttcagctccacatttcctgtgaaactaacatcttattgagatttgaaactggtggtagtttcccaggaaggcacaggtggagttatttgtgagaagcaaagtgtttactaatgacaaagtagtaaaccattttcaagatgaaaactgatttctatttattttgcttcaaaggtcctgaaaaaataagcaattatcataacaatttgttattgatactggaggtttcattgacatgtctctcaaattaaagctcacactgcctccataaaagtcttcaacatctaatttataagctttacaagtatttattttataaggcttagacagaattattggagttttaaattaagtgtattggaaaagaaaggatggtatgtgtatgaaatgttaagatcctacgcaacactgctatttttttcctttaatatttgtgctgcataacaaaagccactagactgttactgtcttgtctgtccatgtgttaacagcatttcttaatgatgtatatatggagtggtcttcaatcatagtgaagaatttaaagagaaagtcaattgtattggcatttttaataagaacaaaattagttcgtctaaggggactggctggccacatatttgttccttgcccatatgctttctacttcttgttcttattatgaaattatgaatttgaagcctctgaaatggtgatcagttttcaacatctttcaaaaacaaaattactatttcctccatattgccttttttagataactttaaagttaggattttaaaatatttgtaactggctaaattttaaagtcgtgacaaataattacttaggttcagaaatatacacacacttactctttagccagtttctttcaaggtttactgtcccatcagatatctagccattttcctttgcaaattacataccttcttaagagtgtatttttaagattattacttacgctttatgatgatatagtttttcaaaattatttatagcttcatatgatgttttgtaattttttctattgatacctgttttaaaaatattttccaaggaagttgattaaaattatatttgttaccttttagaaaaagcattgaaatgagtttctcttgctttttcattttccctctgctttatatgctcttcgcaatacatcatgtccaacgggatacctattgttctcatgacacccaaaattgatgagagcaaaggggtcgcaccatatggaaatgttgaaaactattgtaaagtagtattatgaagtagcttttgtgtcattcatgtcgatgacatgaaagtgaagtaaatttattctatgtaaattcacactaaaaccagtacagtaccataagtagaatacatgtaagaatcacctagtcttcactatattgagtaaatataacatgctaattttacaattaatgaaactaaacttttaaacatctccattatatctacatccttttgaaggtatttatcatagttgccaattttaattttaggattgactttctctttctgaatgacttcataaagtttggtgtgaattttgaagacttgggttactaatgattgtatctttgctagtcaacaacttatgaaatatactcaatgcgtctgatgtgtcattaagtgcagaaataactaagacacaaataacctttgcaaaccttcaagctgtgtaatattccaatgttgtttttttctttgtatatatacttatatcacgtaggatgtaaaaccagtatgaccttgtctagtctccaaacttaaaataaacttttgaaaagctgggattcttttgaagcagttgtaattaaacacatttataagaata

SEQ ID NO: 5631 - DNA, 2235 bp, Homo sapiens
ataggcagaggccaccctccccgcctccccgcccgctgcgcgcccgccccgccccggctcactttaaaagtttactcgggccgggacgcagggcaaagcgagccatggctgtctacgtcgggatgctgcgcctggggaggctgtgcgccgggagctcgggggtgctgggggcccgggccgccctctctcggagttggcaggaagccaggttgcagggtgtccgcttcctcagttccagagaggtggatcgcatggtctccacgcccatcggaggcctcagctacgttcaggggtgcaccaaaaagcatcttaacagcaagactgtgggccagtgcctggagaccacagcacagagggtcccagaacgagaggccttggtcgtcctccatgaagacgtcaggttgacctttgcccaactcaaggaggaggtggacaaagctgcttctggcctcctgagcattggcctctgcaaaggtgaccggctgggcatgtggggacctaactcctatgcatgggtgctcatgcagttggccaccgcccaggcgggcatcattctggtgtctgtgaacccagcctaccaggctatggaactggagtatgtcctcaagaaggtgggctgcaaggcccttgtgttccccaagcaattcaagacccagcaatactacaacgtcctgaagcagatctgtccagaagtggagaatgcccagccaggggccttgaagagtcagaggctcccagatctgaccacagtcatctcggtggatgcccctttgccggggaccctgctcctggatgaagtggtggcggctggcagcacacggcagcatctggaccagctccaatacaaccagcagttcctgtcctgccatgaccccatcaacatccagttcacctcggggacaacaggcagccccaagggggccaccctctcccactacaacattgtcaacaactccaacattttaggagagcgcctgaaactgcatgagaagacaccagagcagttgcggatgatcctgcccaaccccctgtaccattgcctgggttccgtggcaggcacaatgatgtgtctgatgtacggtgccaccctcatcctggcctctcccatcttcaatggcaagaaggcactggaggccatcagcagagagagaggcaccttcctgtatggtacccccacgatgttcgtggacattctgaaccagccagacttctccagttatgacatctcgaccatgtgtggaggtgtcattgctgggtcccctgcacctccagagttgatccgagccatcatcaacaagataaatatgaaggacctggtggttgcttatggaaccacagagaacagtcccgtgacattcgcgcacttccctgaggacactgtggagcagaaggcagaaagcgtgggcagaattatgcctcacacggaggcccggatcatgaacatggaggcagggacgctggcaaagctgaacacgcccggggagctgtgcatccgagggtactgcgtcatgctgggctactggggtgagcctcagaagacagaggaagcagtggatcaggacaagtggtattggacaggagatgtcgccacaatgaatgagcagggcttctgcaagatcgtgggccgctctaaggatatgatcatccggggtggtgagaacatctaccccgcagagctcgaggacttctttcacacacacccgaaggtgcaggaagtgcaggtggtgggagtgaaggacgatcggatgggggaagagatttgtgcctgcattcggctgaaggacggggaggagaccacggtggaggagataaaagctttctgcaaagggaagatctctcacttcaagattccgaagtacatcgtgtttgtcacaaactaccccctcaccatttcaggaaagatccagaaattcaaacttcgagagcagatggaacgacatctaaatctgtgaataaagcagcaggcctgtcctggccggttggcttgactctctcctgtcagaatgcaacctggctttatgcacctagatgtccccagcacccagttctgagccaggcacatcaaatgtcaaggaattgactgaacgaactaagagctcctggatgggtccgggaactcgcctgggcacaaggtgccaaaaggcaggcagcctgcccaggccctccctcctgtccatcccccacattcccctgtctgtccttgtgatttggcataaagagcttctgttttctttg

SEQ ID NO: 5632 - DNA, 2500 bp, Homo sapiens
ctattaacttgttcaaaaaagtatcaggagttgtcaaggcagagaagagagtgtttgcaaaagggggaaagtagtttgctgcctctttaagactaggactgagagaaagaagaggagagagaaagaaagggagagaagtttgagccccaggcttaagcctttccaaaaaataataataacaatcatcggcggcggcaggatcggccagaggaggagggaagcgctttttttgatcctgattccagtttgcctctctctttttttcccccaaattattcttcgcctgattttcctcgcggagccctgcgctcccgacacccccgcccgcctcccctcctcctctccccccgcccgcgggccccccaaagtcccggccgggccgagggtcggcggccgccggcgggccgggcccgcgcacagcgcccgcatgtacaacatgatggagacggagctgaagccgccgggcccgcagcaaacttcggggggcggcggcggcaactccaccgcggcggcggccggcggcaaccagaaaaacagcccggaccgcgtcaagcggcccatgaatgccttcatggtgtggtcccgcgggcagcggcgcaagatggcccaggagaaccccaagatgcacaactcggagatcagcaagcgcctgggcgccgagtggaaacttttgtcggagacggagaagcggccgttcatcgacgaggctaagcggctgcgagcgctgcacatgaaggagcacccggattataaataccggccccggcggaaaaccaagacgctcatgaagaaggataagtacacgctgcccggcgggctgctggcccccggcggcaatagcatggcgagcggggtcggggtgggcgccggcctgggcgcgggcgtgaaccagcgcatggacagttacgcgcacatgaacggctggagcaacggcagctacagcatgatgcaggaccagctgggctacccgcagcacccgggcctcaatgcgcacggcgcagcgcagatgcagcccatgcaccgctacgacgtgagcgccctgcagtacaactccatgaccagctcgcagacctacatgaacggctcgcccacctacagcatgtcctactcgcagcagggcacccctggcatggctcttggctccatgggttcggtggtcaagtccgaggccagctccagcccccctgtggttacctcttcctcccactccagggcgccctgccaggccggggacctccgggacatgatcagcatgtatctccccggcgccgaggtgccggaacccgccgcccccagcagacttcacatgtcccagcactaccagagcggcccggtgcccggcacggccattaacggcacactgcccctctcacacatgtgagggccggacagcgaactggaggggggagaaattttcaaagaaaaacgagggaaatgggaggggtgcaaaagaggagagtaagaaacagcatggagaaaacccggtacgctcaaaaagaaaaaggaaaaaaaaaaatcccatcacccacagcaaatgacagctgcaaaagagaacaccaatcccatccacactcacgcaaaaaccgcgatgccgacaagaaaacttttatgagagagatcctggacttctttttgggggactatttttgtacagagaaaacctggggagggtggggagggcgggggaatggaccttgtatagatctggaggaaagaaagctacgaaaaactttttaaaagttctagtggtacggtaggagctttgcaggaagtttgcaaaagtctttaccaataatatttagagctagtctccaagcgacgaaaaaaatgttttaatatttgcaagcaacttttgtacagtatttatcgagataaacatggcaatcaaaatgtccattgtttataagctgagaatttgccaatatttttcaaggagaggcttcttgctgaattttgattctgcagctgaaatttaggacagttgcaaacgtgaaaagaagaaaattattcaaatttggacattttaattgtttaaaaattgtacaaaaggaaaaaattagaataagtactggcgaaccatctctgtggtcttgtttaaaaagggcaaaagttttagactgtactaaattttataacttactgttaaaagcaaaaatggccatgcaggttgacaccgttggtaatttataatagcttttgttcgatcccaactttccattttgttcagataaaaaaaaccatgaaattactgtgtttgaaatattttcttatggtttgtaatatttctgtaaatttattgtgatattttaaggttttcccccctttattttccgtagttgtattttaaaagattcggctctgtattatttgaatcagtctgccgagaatccatgtatatatttgaactaatatcatccttataacaggtacattttcaacttaagtttttactccattatgcacagtttgagataaataaatttttgaaatatggacactg

SEQ ID NO: 5633 - DNA, 3436 bp, Homo sapiens; identical to SEQ ID NO: 886

SEQ ID NO: 5634 - DNA, 928 bp, Homo sapiens; identical to SEQ ID NO: 3980

SEQ ID NO: 5635 - DNA, 1629 bp, Homo sapiens
ctacaagagactgtgaaaaggaagttggaaggagctcgatcaccacttaatggagaccagcagaatggtgcttgtgatgggaatttttctccgactagcaaacgaattcgaaaggacatttctgcggggatggaagccatcaacaatttgcccagtaacatgccactgccttcagcttctcctcttcaccaacttgacctgaaaccttctttgcccttgcagaacagtggaactcacactcctgggcttctagaagatctaagtaagaatggtaggctccctgagattaaacttcctgtcaacggttgcagtgacctggaggatagcttcaccatcttgcagagcaaagacctcaaacaagaacctctcgatgaccctacttgcatagacacatcagaaacatctctttcaaatcagaacaagctgttctcagacattaatctgaatgatcaggagtggcaagaattaatagatgaattggccaacacggttcctgaggatgacatacaggacctgttcaacgaagactttgaagagaagaaggagccagaattctcgcagccagcaactgagacccctctctcccaggagagtgcgagcgtgaagagcgacccctctcactctcccttcgcacatgtctccatgggatctccccaggcgaggccttcttcttctggtcctcccttttctactgtctccacggccactagtttaccttctgttgccagcactcccgcagctccaaaccctgcaagctcaccagcaaactgtgctgtccagtcccctcaaactccaaaccaagcccacactccaggccaagctccacctcggcctggaaatggttatctcctgaatccggcagcagtgacagtggccggttcagcgtcagggcctgtggctgtgcccagctctgacatgtctccagcagaacagctcaaacagatggctgcacagcagcaacaaagggccaaactcatgcagcagaaacagcaacagcaacagcagcagcagcagcagcagcagcagcagcagcagcagcagcagcagcagcagcagcaacagcactcaaatcagacttcaaattggtctcccttaggacctccctctagtccatatggagcagcttttactgcagaaaaaccaaatagcccaatgatgtacccccaagcctttaacaaccaaaaccctatagtgcctccaatggcaaacaacctgcagaagacaacaatgaataactacctccctcagaatcacatgaatatgatcaatcagcagccaaataacttgggtacaaactccttaaacaaacagcacaatattctgacttatggcaacactaaacccctgacccacttcaatgcagacctgagtcagaggatgacaccaccagtggccaaccccaacaaaaaccccttgatgccgtatatccagcagcagcaacagcagcagcaacagcaacagcagcagcagcagcagcagcagccgccacctccacagctccaggcccccagggcacacctgagcgaagaccagaaacgcctgcttctcatgaagcagaaaggagtgatgaatcagcccatggcttacgctgcacttccatcccacggtcaggagcagcaaccagtcggg

SEQ ID NO: 5636 - DNA, 6466 bp, Homo sapiens
atctgatcctgggctcccagctggagaggcggaggcagctccagggggctggaagtggaagcgcagcggcagaaggagagggagagagaaagagagagaggctaattaaaaaaggatactccgagggaagagagcaagggcggtgcgccgccaaggaccaactagcggcggagcttcgatcttgcctaggcgcggagagctcccaacctgggctggaaccttgcccagcacaggtggctgctacaccccatgtaaaaagcggaaaataaaatgaagattttccagcgcaagatgcggtactggttgcttccaccttttttggcaattgtttatttctgcaccattgtccaaggtcaagtggctccacccacaaggttaagatataatgtaatatctcatgacagtatacagatttcatggaaggctccaagagggaaatttggtggttacaaacttcttgtgactccaacttcaggtggaaaaactaaccagctgaatctgcagaacactgcaactaaagcaattattcaaggccttatgccagaccagaattacacagttcaaattattgcatacaataaagataaagaaagcaagccagctcaaggccaattcagaattaaagatttagaaaaaagaaaggatccaaagcccagagtcaaagttgtggacagaggaaatgggagtagaccatcttcaccagaagaagtgaaatttgtctgtcaaactccagcaattgctgacattgtaatcctggtcgatggttcatggagtattggaagattcaacttcagactggttcggcatttcttggaaaacctggttacagcattcgatgtgggctcagagaagacacgaattggtcttgcacagtatagtggtgaccccagaatagaatggcacttgaatgcatttagcacaaaagatgaagtgattgaagctgtccgaaacctcccatataaaggaggaaatacactaacaggtcttgctttgaactacatttttgaaaatagcttcaaaccagaagcaggatcaaggactggagtatccaaaattggcattttaatcacagatggaaaatcccaagatgacattattccaccatctagaaatcttcgtgagtctggtgtagaactgtttgccataggggtgaaaaacgcggatgtgaatgagctgcaggagatcgcctctgaaccagacagcactcatgtgtacaatgttgccgaattcgatctgatgcacacagttgtggagagtctgaccaggactctctgctctagagtggaagaacaggacagagaaattaaagcctcagcccatgccatcactgggccgcctacggagttgattacttctgaagtcactgccagaagctttatggttaactggactcatgccccaggaaatgtggaaaaatacagagttgtgtattatcctaccaggggtggaaaaccagacgaggtggtggtagatggaactgtatcttccacagtgttgaaaaacttgatgtctttaactgaatatcagatagcagtctttgcaatctatgcccacactgctagtgaaggcctacggggaactgaaactacacttgctttaccgatggcttctgaccttctactgtacgacgtgactgagaacagcatgcgagtcaaatgggatgcagtgcctggggcctcaggttacctgatcctttatgctcctctaacagagggcctggctggggatgaaaaagagatgaaaattggagagacccacacagatattgaattgagtgggttgttgcccaatacagaatacacagtcacagtttatgccatgtttggagaagaggccagtgatcctgttacgggacaagaaacaacattggctttaagtccaccaagaaacctgagaatctccaatgttggctctaacagtgctcgattaacctgggacccaacttcaagacagatcaatggttatcgaattgtatataacaatgcagatgggactgaaatcaatgaggttgaagtcgatcctattactaccttccctctgaagggcttgacacctctcacagagtatactattgctattttctccatctatgatgaaggacagtcagagcctctgactggagtttttaccaccgaggaagttccagcccagcaatacttagaaattgatgaggtgacgacagacagttttagggtgacctggcatcccctctcagctgatgaagggctacacaaattgatgtggattccagtctatggggggaagactgaggaggttgtcctgaaagaagagcaggactcacatgttattgaaggcctggagcccggtacggagtatgaagtttcactattggccgtacttgatgatggaagcgagagtgaggtggtgactgctgtcgggaccacacttgacagtttttggacagaaccagctacaaccatagtgcctaccacatctgtgacttcagttttccagacgggaatcagaaacctagttgtaggtgatgaaactacttctagcctgcgggtaaaatgggacatttctgacagcgatgtgcagcagtttagggtgacctacatgacagctcaaggggaccctgaggaagaagtcataggaacggttatggtgcctggaagccagaacaacctccttctgaagcctctgcttcctgatactgaatacaaagtcacagtgactcccatctacacggatggcgaaggcgtcagcgtctccgctcctggaaaaaccttaccatcctcggggccccagaacttgcgggtgtccgaggaatggtataaccggttgcgcattacgtgggaccccccatcttccccggtgaaaggctatagaattgtctacaaacctgtcagtgttcctggtccaacactggaaacgtttgtgggagctgacattaacaccatccttatcacaaacctcctcagcggaatggactacaatgtgaagatatttgcctcccaggcctcaggcttcagcgacgccctgacaggcatggtgaaaacattgttcttgggtgttaccaatctccaagccaaacatgttgaaatgaccagcttgtgtgcccactggcaggtacatcgccatgccacagcctatagggttgttatagaatccctccaggataggcaaaagcaagaatccactgtgggtggagggacaaccaggcattgcttctatggacttcagcctgattctgaatataaaatcagtgtttatacaaagctccaggagattgaaggacctagtgtgagcataatggaaaaaacacaatcacttcctacacgaccaccaacttttcctccaaccattccaccagcaaaagaagtatgtaaggcggccaaggctgacctggtatttatggtggatggatcctggagcattggagatgaaaatttcaataagatcatcagctttctatacagcactgttggagccctgaacaagattggcacagatggaacccaagttgcaatggttcagttcactgatgatcccagaacagaatttaaactaaatgcttacaaaaccaaagagactcttcttgatgcaattaaacacatttcatacaaaggaggaaatacaaaaacaggaaaagcaattaagtatgttcgagataccttgttcactgcagagtcaggtacaagaaggggcatcccaaaggttatcgtggttataactgatggaagatcacaagatgatgtgaacaaaatctccagggagatgcaattagatggctatagcatttttgcaattggtgtggccgatgcagattactcggagttggttagcattggcagtaagcccagcgcacgccatgtcttctttgtggatgactttgacgcctttaagaaaatcgaagatgagttaattacttttgtctgcgaaacagcatcagcaacctgtccagtggtacacaaggatggcattgatcttgcaggatttaagatgatggaaatgtttggtttggttgaaaaagatttttcatcagtggaaggggtttctatggagcctggtaccttcaatgtgtttccatgttaccaactccataaagatgccctggtttcccagccaaccaggtacttgcacccagaaggattgccctccgactacacaatcagttttctattccggattcttcctgacactccacaggagccatttgctctttgggagattttaaataaaaattctgacccattggttggggttattttagacaatggtgggaaaactctaacatatttcaactatgaccagagtggggattttcaaactgttactttcgaaggacctgaaattaggaaaattttttatggaagctttcacaagctacacattgttgtcagtgagactttggtcaaagtggttattgactgcaagcaagtgggtgagaaggcaatgaacgcatcagctaatatcacgtcagatggtgtagaagtgctagggaaaatggttcgatcaagaggaccaggtggaaactctgcaccgttccagttacagatgtttgatattgtttgctccacatcatgggccaatacagacaaatgctgtgaacttccaggcctgagagatgatgagtcttgcccagaccttccccattcctgctcctgttctgaaaccaatgaagtggctctgggaccagcgggcccaccaggtggtccaggactccgaggaccaaagggccagcaaggtgaaccgggtccaaagggaccagatggccctcggggtgaaattggtctgccaggacctcagggtccacctggacctcaaggaccaagtggtctgtccattcaaggaatgcccggaatgccaggagaaaaaggagagaaaggagatactggccttccaggtccacagggtatcccaggaggcgttggttcaccaggacgtgatggctcaccaggccagaggggccttccgggaaaggatggatcctcgggacctccaggaccaccagggccaataggcattcctggcacccctggagtcccagggatcacaggaagcatgggaccgcaaggcgccctgggaccacctggtgtccctggagcaaagggggaacgaggagagcggggtgacctgcagtctcaagccatggtgagatcagtggcgcgtcaagtatgcgaacagctcatccagagtcacatggccaggtacactgccatcctcaaccagattcccagccactcctcatccatccggactgtccaagggcctcctggggagcctgggaggccaggctcacctggagcccctggtgaacaaggacccccaggcacaccaggcttccccggaaatgcaggcgtgccagggaccccaggagaacgaggtctaactggtatcaaaggagaaaaaggaaatccaggcgttggaacccaaggtccaagaggcccccctggaccagcaggaccttcaggggagagtcggcctggcagccctgggccccctggctctcctggaccaagaggcccaccaggtcatctgggggttcctggaccccaaggtccttctggccagcctggatattgtgacccctcatcatgttctgcctatggtgtgagagctccccatccagatcagccagagttcacccctgtccaagatgagctggaagccatggaactgtggggccctggagtctgatagcctcaggagaaatttgaagaccaactgcaagaactcttaaggaatcttgtttgagaaaatgttgttatgtggtttgtatgctacttttggggggcagggctcatttcagcagcctaaatctcctccttggataatgttaatattattattattattaacaaaaaatatatatttttaaaaagttcccttaatctatgacatggtagcaatgatttccctttggtgtcttaatggcatgtcagataatttgtttttccagagaagagagctcaaagaggaattgggaaaaataaattgaactctggaatcttctctctcaagtcctaaaatgaacaaacagatatgattgtgtttgagggaaatatgtccctagcaggaaaagaattcaaagaggttcaaagaatatgtcacttactcctacttgctgtaggaataaccttgctgataagaaaaaaagggacaatattggagaaactacctcttgtttaattgatctgtccaactctgagatcacttggtaactggtttcatgtgtatccaaaaatcagcatttggatttaagctttctgaatttggtagtttaagaaacagatttagtttttcagtggttttaactcatgtgaaataatgattttccaccagctctgatgcaaagagatataattttaatgaacgatttatccagcagtgtgttccaggggttgcctctccttatctacggggattactttgtacatgcagataagttttcgcaaacctatttccattttcttttgtaagcaaataaaactttaaaacaatg

SEQ ID NO: 5637 - DNA, 1830 bp, Homo sapiens
tggcgaacggctggccccgggccgcgggcctcaggcaggtccgagggtgcccaggacagggtcggggcttgaatgcctttgcttccgaaaacagcggagccgtggggcctcccccgcgccggccctgcctccaaccagccgcccaatcccggctcccatgcgcgtccacgcctccctataagataaagcgcggccgacgggctccgagcgcggcccctgggttcgaacacggcacccgcactgcgcgtcatggtgcaggcctggtatatggacgacgccccgggcgacccgcggcaaccccaccgccccgaccccggccgcccagtgggcctggagcagctgcggcggctcggggtgctctactggaagctggatgctgacaaatatgagaatgatccagaattagaaaagatccgaagagagaggaactactcctggatggacatcataaccatatgcaaagataaactaccaaattatgaagaaaagattaagatgttctacgaggagcatttgcacttggacgatgagatccgctacatcctggatggcagtgggtacttcgatgtgagggacaaggaggaccagtggatccggatcttcatggagaagggagacatggtgacgctccccgcggggatctatcaccgcttcacggtggacgagaagaactacacgaaggccatgcggctgtttgtgggagaaccggtgtggacagcgtacaaccggcccgctgaccattttgaagcccgcgggcagtacgtgaaatttctggcacagaccgcctagcagtgctgcctgggaactaacacgtgcctcgtaaaggtccccaatgtaatgactgagcagaaaatcaatcactttctctttgcttttagaggatagccttgaggctagattatctttcctttgtaagattatttgatcagaatattttgtaatgaaaggatctagaaagcaacttggaagtgtaaagagtcaccttcattttctgtaactcaatcaagactggtgggtccatggccctgtgttagttcatgcattcagttgagtcccaaatgaaagtttcatctcccgaaatgcagttccttagatgcccatctggacgtgatgccgcgcctgccgtgtaagaaggtgcaatcctagataacacagctagccagatagaagacacttttttctccaaaatgatgccttggggtggggagtggtagggggaagagctcccaccctaaggggcacacactgagttgcttatgccacttccttgttcaaaataaagtaactgccttaatcttatactcatggcttggagttaccttatattcaggtatatgtgatattttgcctggtttgttaaaattgccccatttagattccttctataattgttcttatagataagtaatttatatatgagctgtgttagtattttttcagtgtgagatctctggattctttcacaataaagctgttgaattttaacaggagtattagtacataaattttctactcaacaattccgagataggattatgcctagtttgtcatatcacagaaaaactccaagttaacttcatgttttggaagggcaggtcgtttttaaagtatttctttttttaactggatgaaaaatcttcatgttaggattaattttcttaatcacctccacactgtacagaggaaactcaagccttaaatgtttaagtaaactctgtctcagttttaggattaaaatacccaccggtggtgtgatgatgccatataccgcagggcttgcttctgtcaagtgtgactctatctcagtaattaaaataagtgctgatctac

SEQ ID NO: 5638 - DNA, 2410 bp, Homo sapiens
gagacaggaaggtggcaaaggaaggagcccatttgcatgacaataattgagccaagaatagaaagccacagggatgcaagggtgaggctggcggctgagctgggctaaacctcacaaatcagactacccagctctgctccgcaggggaagggagactgagccctgggccaggcttggcagagagggaagcgggaggacacgaccccagggcattgtgggaacactggccaggctggactttgccttcctcctcgtcctttagccgggagcctgtctttgcttgcctttgcctttgaggctctgtggctgtggggctgagtggcatcatggcggctcagaaagatctctgggacgccattgtgattggggcggggatccagggctgcttcactgcataccacctggccaaacacaggaagaggatcctcctgctggagcagttctttctaccacactcccgaggaagctcccatggacaaagccggataatccgaaaggcgtacctggaagacttttacacccggatgatgcatgagtgctatcagatatgggcccagctggagcacgaggctggaacccaattgcacaggcagactggattactgctgctgggaatgaaagagaatcaagaattaaagacaatccaggccaatctgtcgaggcagagggtagaacaccagtgtctttcatctgaggaactgaagcaacgtttcccaaatattcggttgcccaggggagaagtggggctcttggacaattccggaggagttatctatgcatataaggccctcagagccctgcaggatgcaattcgacagctaggaggcatagtgcgtgacggagagaaggtggtggagataaacccagggctactggtcacggtgaaaaccacctccaggagctaccaagctaagagcttggtcatcacagcaggtccttggaccaaccagctcctccgtcccctgggcattgagatgcctctccagaccctgcggatcaacgtgtgttactggcgagagatggttcctgggagctatggtgtgtcccaggcctttccgtgcttcctgtggctgggcttgtgtccccaccacatctacggactgcccacaggagagtacccagggctgatgaaggtcagctatcaccacggcaaccacgcagaccctgaggagcgggactgccccacagcacgcacagacatcggagacgtccagatcctgagcagctttgtcagagatcacttacctgatctgaagcccgagcctgctgtcattgagagctgcatgtacacgaatacccctgatgagcagttcattctcgatcgccacccaaagtatgacaacattgtcattggtgctggattctctgggcacgggttcaagctggcccctgtggtggggaagatcctgtatgaattaagcatgaaattaacaccatcttatgacttggcaccttttcgaatcagccgtttcccaagcctgggcaaagcccacctttgacctctggccagaagcctcccttctgtgcacaggagccagtttcacagatggagaagatgtctcagatgaagggagtgtccctgagatatcatccttttcttctgcctcgcctgaatcccccataaacaccagatgattgagtctaccttctttccttggcccgctccctttttcttctgcctcacttgaatcccccgtaaacaccagacgattgagtctaccttcttttcttggccacctccccattcacaactactttctcgctcccagaaggttgatcagatattctacaatcacagagtagcaaggacgtttgagatgggtatatcagtaagaagagggcacaagaactggctctggagaccaaagcagttgttaaaaattctctttgctgggggccgggtgtggtggctcacacctgtaatctcggcactttggggggctgagacaggcggatcacctgaggccaggaattcaagaccagcctggccaacatggtgaaaccctatctccactaaaaatacaaaattagctgggtgtggtggcgcatgcctgtaatcccagctacttgggagactgaggcaagagaatcacttgaacccgggaggtggaggtggcagtgagccgagattgcgccattgcactccagcctgggcaaaaagagtgagactctgtctcaaaaaaaaaacaaaacaaaaaaaacctctttgctggtatatttgaagagcttgggatggatttgactaaatctgccccgaggagggtgaacaaggtgatctcagagatcactactgctcttggagttccttctcctaaagctaaggccagcctccatcacaaatgcccataaaatctggctcgtctttgatgaacaataaatatttgttgaacaaataaataactgccctgca

SEQ ID NO: 5639 - DNA, 3010 bp, Homo sapiens
gactgcgtctcgggcagcatggccgagaagcggcacacacgggactccgaagcccagcggctccccgactccttcaaggacagccccagtaagggccttggaccttgcggatggattttggtggcgttctcattcttattcaccgttataactttcccaatctcaatatggatgtgcataaagattataaaagagtatgaaagagccatcatctttagattgggtcgcattttacaaggaggagccaaaggacctggtttgttttttattctgccatgcactgacagcttcatcaaagtggacatgagaactatttcatttgatattcctcctcaggagatcctcacaaaggattcagtgacaattagcgtggatggtgtggtctattaccgcgttcagaatgcaaccctggctgtggcaaatatcaccaacgctgactcagcaacccgtcttttggcacaaactactctgaggaatgttctgggcaccaagaatctttctcagatcctctctgacagagaagaaattgcacacaacatgcagtctactctggatgatgccactgatgcctggggaataaaggtggagcgtgtggaaattaaggatgtgaaactacctgtgcagctccagagagctatggctgcagaagcagaagcgtcccgcgaggcccgcgccaaggttattgcagccgaaggagaaatgaatgcatccagggctctgaaagaagcctccatggtcatcactgaatctcctgcagcccttcagctccgatacctgcagacactgaccaccattgctgctgagaaaaactcaacaattgtcttccctctgcccatagatatgctgcaaggaatcataggggcaaaacacagccatctaggctagtgtagagatgagcgctagccttccaagcatgaagtcggggaccaaattagcctttaactcataaagagagggtagggcttttctttttccatatgtcaattgtggtgttcccagaatgtatagcagttataaaaataggtgaaagaattgttagcttgtaaatactgagagattggtgatttatataaggtaatctgttagtcttaaaatagttaaaagtttgtatttttagattattatgtagtaggttagatccctcttgttttgacttccactgactcattctgaaccccctaagcacccaggccagaggcaagaacctgggctgtaactgccacctgacaccgctgactggctaaatgctttgcagaaagtgatgaccttacaccacaaccagcttctccaggtcatatgtgccttacctccagagagtctttttttttttttttctgagatggagtttcactcttgttgcccaggctggagtgcaatagcatgatctcggctcactgcaacctccgcctcctgggttcaagagattctcctgcctcagcctccccagtagctgggattacaggctcatgccaccatgcccagctaatttttgtattattattattgttttttagtagagacggggtttcaccatgttggccaggctagtcacgaactcctaacctcaggtgatccacccacctctgcctcccaaagtgctgggattacaggcatgagctaccacacctggtttggagagtcttaattaaggaaatttccctaatgttcatttattttctaaatccagaccgtgtttcagaataatccttacttgagagtagccattttcttgcctgtacttgtcagaactagaggaaatagccaagactaatgaaaaagattactctaacccttaaaagacttttaaattcactactagagtggtcattttaaaaatacatccatgttttaacttatttgagccttctttatgagtaaatgattcctccttgttctgtctttcaaaccagctaaatatttgtcacaaaagtgcttttttctcactgttgcctattttcatatatcaggttttaaatagttttaattttttaataaaattttctctacgttctatatgcaattgttatatatctatttgaatagctgaaggactaaaatacttttttaagagataacttcaggaaaccattatattttactatctgcatgctgttaactgtggtacactgtgaaatatgttgattacaaacccattcattacatagtataaggaattcacagtatattgactatatagtgtctaatgatcttgggcagatactgtcaaacttacaatatctatatagatgtaggtctttttaaatttacctagtcattcttctatcatgtatattgatgctgaaagaggaactggtcagctcctctggacaacaaattcttagtctataatattaggagacatcttctgttttgcaaatgtctgtgaatctgagcaacctggcattctgcttactggccagaaagctggcgggtgacatttgtaacatttcctctttgagactctgagttcacctagagaagtctaagcataacagctttctttcccagcacgagcctttatagctctctttagctcaaccactctgtccatccagccaatggatgtcccttcccctgtaccccaatttcaagcttattttaggaagccttgaactaccatgtatcctggctcctagctgagtttattagaggtatggagcagtgcaacttaaactcaagttgcacttacattttgaattttaaaatgatggttttatctgttgtgtgaagtggttcacccttgaggaccaggagcctccatatcctgactgaaaaccttttctgagacttagagtaacagtgcttttggttccttgagttctcctgtctccagataccaaatgaccttgacttttctgccttgtgaattcgtagtccaatcagctgaaattaaatcacttgggagggacgcatagaaggagctctaggaacacagtgccagtgcagaagtttctccaggtggcctccctttccaacaatgtacataataaagtgtatgcactttcactaa

SEQ ID NO: 5640 - DNA, 4223 bp, Homo sapiens
acacctgtctgagggggcggcggcggcggcggcggcggggcgggggctcgtagcgcctttgacacccgaggaaaagagggaggagggagagcgcgtttcatcatcggcggcggccacttataaaaacttctaggcgcgcactcgctggctcagtctccgctccgcgaatctcctccggccactgccgccgcggtcgcctctcacccgcccggccgctccagcccgaggcgccccgaccccgcgccactccgcgcccggccagccgcccgcagccatggggctcctgcccaagctcggcgcgtcccagggcagcgacacctctactagccgagccggccgctgtgcccgctcggtcttcggcaacattaaggtgtttgtgctctgccaaggcctcctgcagctctgccaactcctgtacagcgcctacttcaagagcagcctcaccaccattgagaagcgctttgggctctccagttcttcatcgggtctcatttccagcttgaatgagatcagcaatgccatcctcatcatctttgtcagctactttggcagccgggtgcaccgtccacgtctgattggcatcggaggtctcttcctggctgcaggtgccttcatcctcaccctcccacacttcctctccgagccctaccagtacaccttggccagcactgggaacaacagccgcttgcaggccgagctctgccagaagcattggcaggacctgcctcccagtaagtgccacagcaccacccagaacccccagaaggagaccagcagcatgtggggcctgatggtggttgcccagctgctggctggcatcgggacagtgcctattcagccatttgggatctcctatgtggatgacttctcagagcccagcaactcgcccctgtacatctccatcttatttgccatctctgtatttggaccggctttcgggtacctgctgggctctgtcatgctgcagatctttgtggactatggcagggtcaacacagctgcagttaacttggtcccgggtgacccccgatggattggagcctggtggctaggcctgctcatttcttcagctttattggttctcacctctttccccttttttttcttccctcgagcaatgcccataggagcaaagagggctcctgccacagcagatgaagcaaggaagttggaggaggccaagtcaagaggctccctggtggatttcattaaacggtttccatgcatctttctgaggctcctgatgaactcactcttcgtcctggtggtcctggcccagtgcaccttctcctccgtcattgctggcctctccaccttcctcaacaagttcctggagaagcagtatggcacctcagcagcctatgccaacttcctcattggtgctgtgaacctccctgctgcagccttggggatgctgtttggaggaatcctcatgaagcgctttgttttctctctacaagccattccccgcatagctaccaccatcatcaccatctccatgatcctttgtgttcctttgttcttcatgggatgctccaccccaactgtggccgaagtctacccccctagcacatcaagttctatacatccgcagtctcctgcctgccgcagggactgctcgtgcccagattctatcttccacccggtctgtggagacaatggaatcgagtacctctccccttgccatgccggctgcagcaacatcaacatgagctctgcaacctccaagcaactgatctatttgaactgcagctgtgtgaccgggggatccgcttcagcaaagacaggatcgtgccctgtcccctgtgcccacttcctgctcccggccatcttcctcatctccttcgtgtccctgatagcctgcatctcccacaaccccctctacatgatggttctgcgtgtggtgaaccaggaggaaaagtcatttgccatcggggtgcagttcttgttgatgcgcttgctggcctggctgccatctccagccctctatggcctcaccattgaccactcctgcatccggtggaactcgctgtgcttggggaggcgaggggcctgcgcctactatgacaacgatgctctccgagacaggtacctgggcctgcagatgggctacaaggcgctgggcatgctgctgctttgcttcatcagctggagggtgaagaagaacaaggagtacaacgtgcagaaggcggcaggcctcatctgaccccaccctgggccactgccctgctccagagagtggaccttgactcttccacacctgcctatactcactaatgttaacacgtcatttcctttttgtatttttaaacaagaaagaaaaccccagtcctcatttgccttccctacctcttcctcccagagtcctccccacagttcctaagggccactgtgtacccgggctgtgtgggccagaactggggggctgagtcttccctggccccttggaagaggcccccagatgcccaggctcacttcagtgttgagtcctccattgaggatgcccactgaggcagccaggcccctcaccagccctggggggaatcctaaacagagagagaaaaagggtatctgcccttcttgccaggcagctccactctcccgctgactgcccacaccctgcagagtggcaggggtgaaaggaagaaggaagtggctgagttattaatagccagagccactgggagactggggagactggctgtaacccccttcacacctgggtttggcatcagcacagactacgggaggggctggctccctccccctcagaccctcacttcctgtacctagaggccattctggatgctgccatgttgggaagtacagtctctgcccattacctgcatgcaggcaccagagcagggactgagaaaccccaaggatgggtcatctaagtgctgtccatatgaaccctggactttctgtccttagatcctcacatgttatccctgtctttctggggtacgtttcaaactgaggaagctacaacacagtgaagacccaaggaaggcctatgaaaaggtcctgatgcccaacctcccaccccttcaatgtggggacgagaccccctcatctcagagtaatgggaagaacctcccacatctccctggcagcagatgaggtggcttcacatgcacttccctgtctggacttcagcccgtattccgaggagtagagaggcagaagagatgtcagcaaagcaagtgatgaagcagagtggatgtccactgtcaccaagctggatggcaagctgcggcccacaaaacagccagtcaggttggctttcctggtttcagacatgctcataccattcccattttctcagcctcttctcactgcctccagagaggtgggtgcctgggttgagagacacagctgctacgtgatagatgttgagagacagaagccaacgaaggaggtcattcatcaacaaatatatttattggagaccgactttgtgcaaagcaatgctaatcagggttctccatggagcttccctcagctcttacctcacctccctccatttacattagggccttctcccagggtgtgctcggtgggcagtgtgggactgggggtgtgggagttggtgagagcaggaggagaggtggggacagcaagaagccacagattggcatgaaggatcctgacctgactatccatgccatccatggcccccagactgactctgcacctggccctttgccagacagctctgtctccccatgtcctctggaacagctgggcatgggtcatggccattcatgacccttaagtgccacccttcttggaagaccccctccagaagcatactggaagccacctctggaaaagcctcatatggtgatatgccaaaatatttatgtcaatgtccaaacaaagtccaatgccatgagactgaagtctttgtggaaaccactgttacagacaagcttatttccaaagccacctcatttccaaacatctcactcaggaagggaggctcaatgtaacctcaggggccagttttagcatttgaaatggttctgcttggaaaatgatgccctgcaactaaccctggtctttcccatggcaatttaaccacatttggaaggcactgccttcagctgagtttatgaacaatgaatgccaaccttcaggttctagaagattggttgcactcccaaacctttattctattatattactattaaaatattctaattttgctattgaggtaa

SEQ ID NO: 5641 - DNA, 6888 bp, Homo sapiens
ccaggagctgccttggcagtcacgccccttccttccgaggagctttctggctgcctaaactggtagaccccctgaattactcctccatctccgctctctttcgcctcctcttctcttagttctctccgcctccccctcaactaccaccacctccagtcagtctcgcctccggctatccgctgctccaccctctggcccggtatcctgcctgtccgctgccaccaaggagagcccggacggagcagcgaggaggggagcagccgggagttggggcttcccccctgcccatccctggccgctggcccgggaccgaagccacttgagcgagcagagagtcgtcaccttgtcttctttgccttcagggagctgctaagaaggacaaataagatagcagagtgaaagagcttttgtctccttagaaggaaggctgagaaactaaaggccagcgcaggacatctcattgccattgtcagccaggaactcgcagcctcacagccctacttcttctctgacctctggggggtccttgcccttgctacaatctccaccatccactagattgtctcctgcccgacaccccttggtcccaaaccagggagaccattcagctcacctgcctaggccgcagcagcatttccttcctaatcaggctcaccagggggatcattaccgtctctcccaacctggcctgagtcagcagcagcagcaacagcagcagcagcaccatcatcaccatcaccaccaacaacagcagcagcagcagccacagcagcagccaggagaagcctattcagctatgcctcgggctcagccatcctctgcttcttatcagccagtgccagcagacccttttgccattgtttccagagcccagcagatggttgagatcctctcagacgagaaccggaacttgaggcaagagttggaaggatgctatgagaaggtggcaagactgcagaaggtggagacagaaatccagcgcgtctcggaggcatatgagaacctcgtgaagtcatcctccaaaagagaggccctagagaaagccatgagaaacaagctagagggcgagattcggaggatgcatgatttcaacagggatctgagagagcgtctagagactgccaacaagcagcttgcagagaaggaatatgaggggtcagaggacaccagaaaaaccatctcgcagctctttgcaaaaaataaagaaagccagcgtgagaaggagaagctggaagcggagctggccactgcccgttctaccaatgaggaccaaagacgacacatcgaaatccgagatcaggccctgagtaatgcccaggccaaggtggtaaagctggaagaagagctgaaaaagaagcaagtgtacgttgacaaggtggagaagatgcagcaggcccttgtacagctccaggcagcatgtgaaaaacgtgagcagctagagcaccgtctccggacacgactggagagggaactggaatccctgagaatccagcagcgtcagggcaactgtcagcccaccaacgtttcagaatacaatgctgctgcactgatggagctccttcgggagaaagaggagaggattctggctctggaagctgatatgacaaagtgggagcagaaatatttggaggagaatgtgatgagacattttgctctggatgctgctgcaactgtggctgctcagagggacacaacagtcatcagtcactctcctaacaccagctatgacacagctctagaagctcgcatccagaaagaggaggaagaaatcttgatggccaataagcgttgccttgacatggagggcaggattaagaccctccatgcccagattattgagaaggatgccatgatcaaagtactccagcagcgttcccggaaggagccgagcaagacagagcagctgtcgtgcatgcggccagcgaagtctctgatgtccatttccaatgctggatcaggcttgctctcccactcatccaccctgactggctcccccatcatggaagaaaagcgagacgacaagagctggaaggggagcctaggcattctcctgggtggagactaccgtgctgaatatgtcccttccacaccctcgcctgtgccaccctcgactcccctgctctcggctcactccaagacaggcagccgagactgcagtacccaaactgaacgtgggacggaatcgaacaaaactgcagctgttgctcccatctctgttcctgctccagttgctgctgccgccactgctgccgccatcactgccactgctgccaccatcaccaccaccatggtagctgctgctccagttgctgttgctgctgctgctgctccagctgctgctgctgccccgtctccagccactgccgctgctactgctgctgctgtttctccagctgctgctggtcagattccagctgctgcctctgttgcctcagctgctgccgttgctccttctgctgctgctgctgctgctgttcaggttgctccagctgctccggctccagttccagctccggctctggttccggttccagctccagcagcggctcaggcttctgctcctgctcagactcaggcaccaacttcagctccggctgtggctccaactccagctccaactccaactccagctgtggctcaggctgaggttcctgcaagtccagctaccggtcctggaccacatcgtttgtctataccaagtttgacctgcaatccagacaaaacagatgggcctgtgttccactccaatactctggaaagaaaaactcccattcagatcctgggacaagagcctgatgcagagatggtggaatatctcatctaaacggccaaatcaagagctgcagattatcagcaaaaatgcttttaatcattttcccccttttattggttcttgttttgagggtgaggacaagggttgtggggaggggatgttttttaacaggactttttattggaacaatgtactacttgagtaataccatgtgaacaccagtctattttggtatgcttagggagtacctctaaagacagattaatcagaatgtgctctaaagcttattgtttgaatttatacgaatactgggactgttaacaggtggctatacatcgacgttttcaatgtgcttaaatttgtttaaattttccatattctagatcattttttattgaagagcacagtatgtgtggaagacagtgtataacacgtagtttggaagtgggaagctagagagaattgagtgtgtgctgttttgtatagttactatcctgtgcagcagctggagaaagcactcacctcaggcttacaaaagggaatagtttcaggagctatgtaagctggaaaaaaggtagggagttttggggtgcagaagggtactggagctaattttttcttccagtttcccagctaccctgccccagggaattgtgtttgtcttcatttcagtggtgctttggaaatggattcttttggttccctcctggaggttcatacattcatatatatgctctggagtaatttatgcatttggataattaatatattgctttcagatgctgggagagtacattaactgagtgatgcgcaacttcctctctcttagggaattagaccatcagaggccttgatggagagttgcatggggtgctatatgcagacttccatggtttgtgtgtagccatgaacacagcttgcttgcatttagtaagaccaatcagcttagtgtttatttcttctacagcacagattcactggctgggtctccagtctcaaattgccaatcatttgcaaagtgaggaaggatctttgttgacaggttgaatgctttgaatttctggtgactactttgaaataacttgttttgtttgtcaaattctaagcatatgtcttaaaaggcatttttgactatcacctccaagggaatagcttgagaaacccaaagtactatgctgcagtcgggggagaggtggattgcagcagtatcctcaactacctcttctcactgtcagtgacaccatcttggaatacctttgggaagcagcaggaaatgtgcatgtgggtagagatcaaaggaggcaatggctccaagccttgccatagggctgcctccaaggacacagaaggatgccagttgccacaggtccctgccctgtgtcacctgtctgcccttcattaaggtgagaaatctgcagatagcatcattaagatcagttttaaggggtatagggagggtgagggaagtggggggtgttaggtaagggttgggggtagaggttttgggatgtcttagttagaaaccagattaatagaagagtaggcctgatatattacatcatgagccatagtggtgggaaagaactttagcaatatagccctacctcctcattttagtgatgaggaatctgagaactggagaggttcagtgactttttgaaagtcatacaacacagctaaccattatgccaatcaccatgcttattttgggaaactctttatcttttttaaattccattttatgaaaaggcatcttcatggtccagggaatatgtatcttgtaaaatgtacctggttggagtagcttgtccagtcttgacaaactactgaatttctgtcttgcctctccttcagtgccttttaaaaggttttcccttttctgatctgcatttcaacatagagtcacataaatgtccccctgagaaaccaatcccacttctttctaggagattgggtatcttagataatcttttggggttcctctgtgagtataggaatggtatccttcctaattatcttccaaaggaattattttgtgtgtgtgcctgtgtgtgtgtagagacataaaggagggtgatgtgattttcagctagtcctttcacattttcaataatgaggtaatcatgttacatacacattagtcctcagttataaagtgaatctcagatagaaattaaaagtgcagttgtgttaagactctttcatactaccctttagtcataaggagaaaaaaacactcaaatagtagaagcagcaagtagcaaacttcaggagagctactttctatccaaataatttaaaaaacacttttcacctactcctttcatggttataacacattggcagactttttgctggctctgggagccatgattttaatcacattctgcaaggtgacaaatgtcatacattccacattgtgtggtagccatctctttagactcatgtgttttggggaaaggaagaagttcttggctgagtactattttgaactttccagaaccctctcacaccagagacagttcttctctgttcagtttccaatccccgataatttgctaaaataacattgtacatccaagagagggaagaagagtatgtcagtatattatgcagaagatagatacagccttttcagaagatctccactagtttttgttccaaaaattcaagtttatgggagaaatctcaattagccaccttttcacagttgtgtggatataacatttgggggatctttctggactcctacctatctgtgcattttaccggcacctcaggaaaggagggtgaccaggttgtcttagcttgtactgcttggtgatctctgaggaccttctaattcagttgtaccccagtgttccatgtatagaaaaacttcattagaacaaactttacttgatatgaaactcctattaacagtctttttttgaaataaaaagtagcttgagctttcttttaaaatcatgtatcttgattgttgatttaatgaaggatttccttttaatgctgcttttgagcttcaaggtaataggacagcaggaacctaaaatatctgccatcatctgccataggaaagatacccagagacccatcatgttctctttttgttgttacactgttgggtgggtataacaattggaaaatgaacaaactgattgattgtgcaaactactttttatgacaagcctaaaccctcataatgcggcagcttaaagtgtatacatatgcactaactttgatcaattatattctcatatctgttagctacacagtctcctattatctcaattgcttatgtgcatatggaatatgttacttaaaacgtgtgcattcttactgaaaatgttttcaaaggaaggtatcagctgtgggctaattgccaccaatttcagcctgccacgattcttggaaatatgtcttccaagtgccatccatcatcagtaggacaagtgtcgggagtttgtttatttttttccagtagcaacgatgggttacatggagccatgaaacctccttctggcctcccttgtgattaatggcatgtgtttgtaaaatggatagctggggttggcagatggctagagaagaatcgcctttggtttaaaatgtatgtggtcccctaatgattgtgaccccattctgtaatcaactgagctagttccaataaagttaagcaggtttaaatccactttgtgcctatcttttcactgacaataaagttagctattttaaaatgcagtaccgtgtggaaaatgctttggtgtttacccgacagaggctttatttgtgctgtatcagtgattactttcaattcagtatgcagtgaaattgcctttcaagggcagcgtgcagcagaatttgcatttgcttgaagtatggaatgtgattatagattataaagtattaagacaacaccacaggccgcatgctctaatcggtctctttatatactcaggcagcatatattaaaagctttgcatctttttatcttctggtttctagggataaaatgatggccacccaaagcagagaatttatcctttggttagcattttggaaggccccttgatattccttttgtacccttgttctgatgccaattcatcagtttt

SEQ ID NO: 5642 - DNA, 1665 bp, Homo sapiens
atgcacgcccactgcctgcccttccttctgcacgcctggtgggccctactccaggcgggtgctgcgacggtggccactgcgctcctgcgtacgcgggggcagccctcgtcgccatcccctctggcgtacatgctgagcctctaccgcgacccgctgccgagggcagacatcatccgcagcctacaggcagaagatgtggcagtggatgggcagaactggacgtttgcttttgacttctccttcctgagccaacaagaggatctggcatgggctgagctccggctgcagctgtccagccctgtggacctccccactgagggctcacttgccattgagattttccaccagccaaagcccgacacagagcaggcttcagacagctgcttagagcggtttcagatggacctattcactgtcactttgtcccaggtcaccttttccttgggcagcatggttttggaggtgaccaggcctctctccaagtggctgaagcaccctggggccctggagaagcagatgtccagggtagctggagagtgctggccgcggccccccacaccgcctgccaccaatgtgctccttatgctctactccaacctctcgcaggagcagaggcagctgggtgggtccaccttgctgtgggaagccgagagctcctggcgggcccaggagggacagctgtcctgggagtggggcaagaggcaccgtcgacatcacttgccagacagaagtcaactgtgtcggaaggtcaagttccaggtggacttcaacctgatcggatggggctcctggatcatctaccccaagcagtacaacgcctatcgctgtgagggcgagtgtcctaatcctgttggggaggagtttcatccgaccaaccatgcatacatccagagtctgctgaaacgttaccagccccaccgagtcccttccacttgttgtgccccagtgaagaccaagccgctgagcatgctgtatgtggataatggcagagtgctcctagatcaccataaagacatgatcgtggaagaatgtgggtgcctctgatgacatcctggagggagactggatttgcctgcactctggaaggctgggaaactcctggaagacatgataaccatctaatccagtaaggagaaacagagaggggcaaagttgctctgcccaccagaactgaagaggaggggctgcccactctgtaaatgaagggctcagtggagtctggccaagcacagaggctgctgtcaggaagagggaggaagaagcctgtgcagggggctggctggatgttctctttactgaaaagacagtggcaaggaaaagcacaagtgcatgagttctttactggattttttaaaaacctgtgaaccccccgaaactgtatgtgaaagttgagacatatgtgcatgtattttggaggtgggatgaagtcacctatagctttcatgtattctccaaagtagtctgtgtgtgacctgtccccctccccaaagattaaggatcactgtatagattaaaaagagtccgtcaatctcattgcctcaggctgggttgggggagccccacagctttctggctggccagtggcaatctactggccttgtccagaggctcactggagtggttctctgctaatgagctgtacaacaataaagccattgtctagtt

SEQ ID NO: 5643 - DNA, 4675 bp, Homo sapiens
ttgaagttgcttttaaacacagcttttctgctttacctgtccaggtagcctctgttttcatttcagtcttaatgaaaactttctaacttatatctcaagtttcttttcaaagcagtgtaagtagtatttaaaatgttatacttcaagaaagaaagactttaacgatattcagcgttggtcttgtaacgctgaaggtaattcattttttaatcggtctgcacagcaagaactgaaacgaatggggattgaactgctttgcctgttctttctatttctaggaaggaatgatcacgtacaaggtggctgtgccctgggaggtgcagaaacctgtgaagactgcctgcttattggacctcagtgtgcctggtgtgctcaggagaattttactcatccatctggagttggcgaaaggtgtgataccccagcaaaccttttagctaaaggatgtcaattaaacttcatcgaaaaccctgtctcccaagtagaaatacttaaaaataagcctctcagtgtaggcagacagaaaaatagttctgacattgttcagattgcgcctcaaagcttgatccttaagttgagaccaggtggtgcgcagactctgcaggtgcatgtccgccagactgaggactacccggtggatttgtattacctcatggacctctccgcctccatggatgacgacctcaacacaataaaggagctgggctcccggctttccaaagagatgtctaaattaaccagcaactttagactgggcttcggatcttttgtggaaaaacctgtatccccttttgtgaaaacaacaccagaagaaattgccaacccttgcagtagtattccatacttctgtttacctacatttggattcaagcacattttgccattgacaaatgatgctgaaagattcaatgaaattgtgaagaatcagaaaatttctgctaatattgacacacccgaaggtggatttgatgcaattatgcaagctgctgtgtgtaaggaaaaaattggctggcggaatgactccctccacctcctggtctttgtgagtgatgctgattctcattttggaatggacagcaaactagcaggcatcgtcattcctaatgacgggctctgtcacttggacagcaagaatgaatactccatgtcaactgtcttggaatatccaacaattggacaactcattgataaactggtacaaaacaacgtgttattgatcttcgctgtaacccaagaacaagttcatttatatgagaattacgcaaaacttattcctggagctacagtaggtctacttcagaaggactccggaaacattctccagctgatcatctcagcttatgaagaactgcggtctgaggtggaactggaagtattaggagacactgaaggactcaacttgtcatttacagccatctgtaacaacggtaccctcttccaacaccaaaagaaatgctctcacatgaaagtgggagacacagcttccttcagcgtgactgtgaatatcccacactgcgagagaagaagcaggcacattatcataaagcctgtggggctgggggatgccctggaattacttgtcagcccagaatgcaactgcgactgtcagaaagaagtggaagtgaacagctccaaatgtcaccacgggaacggctctttccagtgtggggtgtgtgcctgccaccctggccacatggggcctcgctgtgagtgtggcgaggacatgctgagcacagattcctgcaaggaggccccagatcatccctcctgcagcggaaggggtgactgctactgtgggcagtgtatctgccacttgtctccctatggaaacatttatgggccttattgccagtgtgacaatttctcctgcgtgagacacaaagggctgctctgcggaggtaacggcgactgtgactgtggtgaatgtgtgtgcaggagcggctggactggcgagtactgcaactgcaccaccagcacggactcctgcgtctctgaagatggagtgctctgcagcgggcgcggggactgtgtttgtggcaagtgtgtttgcacaaaccctggagcctcaggaccaacctgtgaacgatgtcctacctgtggtgacccctgtaactctaaacggagctgcattgagtgccacctgtcagcagctggccaagcccgagaagaatgtgtggacaagtgcaaactagctggtgcgaccatcagtgaagaagaagatttctcaaaggatggttctgtttcctgctctctgcaaggagaaaatgaatgtcttattacattcctaataactacagataatgaggggaaaaccatcattcacagcatcaatgaaaaagattgtccgaagcctccaaacattcccatgatcatgttaggggtttccctggctattcttctcatcggggttgtcctactgtgcatctggaagctactggtgtcatttcatgatcgtaaagaagttgccaaatttgaagcagaacgatcaaaagccaagtggcaaacgggaaccaatccactctacagaggatccacaagtacttttaaaaatgtaacttataaacacagggaaaaacaaaaggtagacctttccacagattgctagaactactttatgcatgaaaaaagtctgtttcactgatatgaaatgttaatgcactatttaatttttttctctttgttgcttcaaaatgaggttggtttaagataataataggacatctgcagataagtcatcctctacatgaaggtgacagactgttggcagtttcaaaataatcaagaagagaaatatccttagcaaagagatgactttggggatcatttgaggaatactaactctgttgcattaatgcttcaaaaaatcatcaaatgattcatgggggcctgatttgcatttgaaaaatgtttgaaattagagtctcatttgtttcaggaatgcagctacctgagttttttgtctcggcaaagtcacaaagcccatatactcacattgtgtgtctatacttgccaattaattctaaacttgtaggaaatatgccctctcttaaaggagaattttttttaaatctctgagaaatgagattctgagtttatttcagctaaaaggttgcaattcttctgaagatatctcaaatataaggttgaaagttaagtgttaataatttttgtgaatttatacacacctaaacgttaagtacacaaatattttatttgttttacaaataaggaataagtaatttataaattaagaagttacctataaaaataaaaagataacaaccctatcatatagcttatttttaaattacctgaaaaacgatattctacactgtttcctttttgactctgagttttcaaactgttacttctcccatatttctcaatccatttcactcagttgcacagtcttttaaaccctgtaattgtcataccaaagtttctttttaaaaaaaaattactttaaatgcttagtttattcaaagagcgatccaataatataaaaggaacatgtgttaaacacaataaaattttaaatggctctaaatcaagcacatcaagagtatacaagtcttaaaggctttttaatacatactcttttcccatctatgtaacccaacttgcacatttcagctgcatgtggtgaatatgcatcatatatttactttaagaggtaagattttacttgcaaaatacatgtgcaaattagggatccatcagttgatggaagagatggactctagaatattatttcttgtggttattactcctttacaaagcactttcgtctcacttgatcctcataaggaaactaaggctcagaatgagtagagctgggttcagaatctagctcttctaactccaagccatctcctctttccactgcaggaaactgcctcttttgtcagtgaaataatagaaagattgtgttagttaagtgataactgtcatttgtttgaaaatgttcgagactgaacaaatagcatttaaactgctggcatatagatgagatattgtacttttgtgcaatgtttattacctttgattaaattgtaatgtgaagcttttactaggtgaatagttcattatgtagtggaggcttcgtggttgtccattgaattgtcacagcaaaatctataagtttcttcaattctacaagatagatccatatacctttgatcacttggagactctttttttgctggtttctagataactcaggtaaatcagacctttacagagtacagggctaggtgaaagaattactgaaaaatcaccttgaaaatccgaagggctgatataccctttatgttcctgactgatgcgcagaacctgggggaaatctacagcaatatacaggttgcaatgctgataacacaacagcaatcctctcctctacgtggacttactgttgtttttttaattattattggaatgggattttagaaaatagaagttacctttgtgtgtgttttagggaaggtagagaagaatctgctctttctctgaatactgttttgaccccaggcaggaccttggaaaggccaaaacattaacagtagtacttctgttcactgaagagttatgttacatgaagataaaatggttttgtcgtgtttattattgtattttgtgttgatataaataaacatggtaatttaaacaatgaacctta

SEQ ID NO: 5644 - DNA, 6058 bp, Homo sapiens
gtttcagatttgggatattggtgtttctgttttggagaaattattctttttctttttaatttgaagaaaaatcatcagtcttggaatacagaagagaaactagaaatatacgtattttgtttcacatttgaacagtcattcttgaggaatactccatacctgagtagacagccatgtggccatcgcagctactaattttcatgatgctcttagctccaataattcatgctttcagccgtgccccaattccaatggctgtggtccgcagagagctatcctgtgagagctatcctatagagcttcgctgtccaggaacagacgtcatcatgatagaaagtgccaactatggcaggactgatgacaaaatttgtgactctgaccctgctcagatggagaatatccgatgttatctgccagatgcctataagattatgtctcaaagatgcaataacagaacccagtgtgcagtggtggcaggtcctgatgtttttccagacccgtgtccaggaacctataaataccttgaagtgcagtatgaatgtgtcccttacagagtagaccagaaagtttttctttgtcctggactactaaaaggagtataccagagtgaacatttgtttgagtccgaccaccaatctggggcgtggtgcaaagaccctctgcaggcatctgacaagatttattatatgccctggactccctacagaactgataccctgactgagtattcatccaaggatgacttcattgctggaagaccaactacaacctacaagctccctcacagggtggatggcacaggatttgtagtgtatgatggagctttgttcttcaacaaagagcgcaccaggaacatagtaaagtttgatttgcggactaggataaagagtggagaggctatcatagcaaatgccaattaccatgatacctccccttaccgatggggaggcaaatctgacatagacctggcagtagatgagaatgggctatgggtaatctatgcaacagaacaaaacaatggtaaaattgtcattagtcaattgaacccttacaccctacggatcgaaggaacatgggatactgcatatgataaaaggtcagcttccaatgcctttatgatttgtggaattctgtatgtggtcaaatctgtatatgaggatgatgacaatgaggctactggaaataagattgactacatttacaacactgaccaaagcaaggatagtttggtggatgtaccctttcctaattcataccagtacattgcagctgtggattacaaccccagggacaacctactttatgtatggaataactatcacgtcgtgaaatattctttggattttggacctctggatagtagatcagggcaggcacatcatggacaagtttcatacatttctccgccaattcaccttgactctgagctagaaagaccctctgttaaagatatctctaccacaggacctcttggcatgggaagcactaccaccagtaccacccttcggaccacaactttgagcccaggaaggagtaccaccccgtcagtgtcaggaagaagaaaccggagtactagtaccccatctccagctgtcgaggtacttgatgacatgaccacacaccttccatcagcatcgtcccaaatcccagctctcgaagagagctgtgaggctgtggaagcccgagaaatcatgtggtttaagactcgtcaaggacagatagcaaagcagccatgccctgcaggaactataggtgtatcaacttatctatgccttgctcctgatggaatttgggatccccaaggtccagatctcagcaactgttcttctccttgggtcaatcatataacacagaagttgaaatctggtgaaacagctgccaacattgctagagagctggctgaacagacaagaaatcacttgaatgctggggacatcacctactctgtccgggccatggaccagctggtaggcctcctagatgtacagcttcggaacttgaccccaggtggaaaagatagtgctgcccggagtttgaacaaggcaatggtcgagacagttaacaacctccttcagccacaagctttgaatgcatggagagacctgactacgagtgatcagctgcgtgcggccaccatgttgcttcatactgtggaggaaagtgcttttgtgctggctgataaccttttgaagactgacattgtcagggagaatacagacaatattaaattggaagttgcaagactgagcacagaaggaaacttagaagacctaaaatttccagaaaacatgggccatggaagcactatccagctgtctgcaaataccttaaagcaaaatggccgaaatggagagatcagagtggcctttgtcctgtataacaacttgggtccttatttatccacggagaatgccagtatgaagttgggaacggaagctttgtccacaaatcattctgttattgtcaattcccctgttattacggcagcaataaacaaagagttcagtaacaaggtttatttggctgatcctgtggtatttactgttaaacatatcaagcagtcagaggaaaatttcaaccctaactgttcattttggagctactccaagcgtacaatgacaggttattggtcaacacaaggctgtcggctcctgacaacaaataagacacatactacatgctcttgtaaccacctaacaaattttgcagtactgatggcacatgtggaagttaagcacagtgatgcggtccatgacctccttctggatgtgatcacgtgggttggaattttgctgtcccttgtttgtctcctgatttgcatcttcacattttgctttttccgggggctccagagtgaccgtaacaccatccacaagaacctctgcatcagtctctttgtagcagagctgctcttcctgattgggatcaaccgaactgaccaaccaattgcctgtgctgttttcgctgccctgttacatttcttcttcttggctgccttcacctggatgttcctggagggggtgcagctttatatcatgctggtggaggtttttgagagtgaacattcacgtaggaaatacttttatctggtcggctatgggatgcctgcactcattgtggctgtgtcagctgcagtagactacaggagttatggaacagataaagtatgttggctccgacttgacacctacttcatttggagttttataggaccagcaactttgataattatgcttaatgtaatcttccttgggattgctttatataaaatgtttcatcatactgctatactgaaacctgaatcaggctgtcttgataacatcaagtcatgggttataggtgcaatagctcttctctgcctattaggattgacctgggcctttggactcatgtatattaatgaaagcacagtcatcatggcctatctcttcaccattttcaattctctacagggaatgtttatatttattttccattgtgtcctacagaagaaggtacgaaaagagtatgggaaatgcctgcgaacacattgctgtagtggcaaaagtacagagagttccattggttcagggaaaacatctggttctcgaactcctggacgctactccacaggctcacagagccgaatccgtagaatgtggaatgacacggttcgaaagcagtcagagtcttcctttattactggagacataaacagttcagcgtcactcaacagagaggggcttctgaacaatgccagggatacaagtgtcatggatactctaccactgaatggtaaccatggcaatagttacagcattgccagcggcgaatacctgagcaactgtgtgcaaatcatagaccgtggctataaccataacgagaccgccctagagaaaaagattctgaaggaactcacttccaactatatcccttcttacctgaacaaccatgagcgctccagtgaacagaacaggaatctgatgaacaagctggtgaataaccttggcagtggaagggaagatgatgccattgtcctggatgatgccacctcgtttaaccacgaggagagtttgggcctggaactcattcatgaggaatctgatgctcctttgctgcccccaagagtatactccaccgagaaccaccagccacaccattataccagaaggcggatcccccaagaccacagtgagagctttttccctttgctaaccaacgagcacacagaagatctccagtcaccccatagagactctctctataccagcatgccgacactggctggtgtggccgccacagagagtgttaccaccagcacccagaccgaacccccaccggccaaatgtggtgatgccgaagatgtttactacaaaagcatgccaaacctaggctccagaaaccacgtccatcagctgcatacttactaccagctaggtcgcggcagcagtgatggatttatagttcctccaaacaaagatgggacccctcccgagggaagttcaaaaggaccggctcatttggtcactagtctatagaagatgacacagaaattggaaccaacaaaactgctaacaccttgttgactgttctgagttgatataagcagtggtaataatgtgtgtactcctaaatctttatgctgtcctctaaagacaaacacaaactctcagacttttttttttttaatgggatttttaggtcagcccaggggagaaagataactgctaaaattcccctgtaccccatcctttcttgtcctttccccttcagatggagacttcattatgttaatgaacaagatatgaagaaaatggcactcattgtggccttgttgaattatgttgtgtatgttttaacatctctgatgctgtgttactaaaattacaaggacctgctttttaaaaggccagaacaattgtctgaaattagtaacaatgctgcatctagattggagtgctgcacaaacaaacataagagcaaagcaaaactgtatcacatagggtttttggtcactcacaacctgaattcaccacagctggaatagctgtggaaaacaaaataaaacaacaaaattaataatgaaatggaggggaattctagaattatatgctaaatgcatattttatgatttgctgtattaactgatgataaaactaatggcagaaaaagaagttgagcaatttctatgtaatgtacagatactagcattgcacatatagtctgctttctgttcctccagaatttgagtcctgttaatgtagtagaaaaaaaaaaaagaaattttctttttcttttgtgctggtcttgcaagtttgtctaccagtaagagagcaaagtttccttcctttcttctctttcttcattttctttttttcttttttgccttttattcctttaaaatttcgcctggcaaaaaataaataaatggaactatcactttataagaatcattttctagtaatgcaaacaaattattttttacaaaaaaacaaaataaataaaattagacttccttccctcactatatatctttatgcagtcagaatatttccaacagtgttttttgcaaattagagcaggacaaacttttatgtttacagggcacgtctgttgtaatgcaaagcatatttggcaagcagttcatcaccaggacactagctatgattctagaagtcaaaaggtgtctatagaactagtggggcttctgcatgtgaaaaacggttttccataggcattaaagtgctgaatgctcagtctgatcaacaagtgggcacctgcactaccactttttagaggaaattcactccctcgtaagcattggaaggtcaaattattttgaagtgatttttttaaaaaaaagtcttctgtttattaacaggaaaatttatttatttgacaggattttgagtaatgtaggaatacaaaaggtaaattagcagcacatataatttttttttaatttatgatccattttgtatggtctcaaagttggatgacctcattactaatatttgttgtaaaagtgaaacttgtttgccaaccaataaacaactgattgagatttagaagatattgt

SEQ ID NO: 5645 - DNA, 773 bp, Homo sapiens
aaggcgcgcagcgctgggcgcaaagcgccagtctccgccttgcgagctcagagtgtgcccgctgcgccgccgctgtccgtacctgccgccgccgccaccgccaccatgcccaacttcgccggcacctggaagatgcgcagcagcgagaatttcgacgagctgctcaaggcactgggtgtgaacgccatgctgaggaaagtggccgtagcggctgcgtccaagccgcacgtggagatccgccaggacggggatcagttctacatcaagacatccaccacggtgcgcaccactgagatcaacttcaaggtcggagaaggctttgaggaggagaccgtggacggacgcaagtgcaggagtttagccacttgggagaatgagaacaagatccactgcacgcaaactcttcttgaaggggacggccccaaaacctactggacccgtgagctggccaacgatgaacttatcctgacgtttggcgccgatgacgtggtctgcaccagaatttatgtccgagagtgaaggcagctggcttgctcctactttcaggaagggatgcaggctcccctgaggaatatgtcatagttctgagctgccagtggaccgcccttttcccctaccaatattaggtgatcccgttttccccatgacaatgttgtagtgtcccccacccccaccccccaggccttggtgcctcttgtatccctagtgctccatagtttggcatttgcacggtttcgaagtcattaaactggttagacgtgtctcaacctttt

SEQ ID NO: 5646 - DNA, 8003 bp, Homo sapiens
atgacggaccccttcttcctgccttcaatgcctcagcggaagatccccaagggctggagcgaggagcgctgccgctggacatcctcccggggaggctgctccgacctgctgcgcggcgcgtctgagactggggactgagccaccccgccgccgccggcgccgccgccgccgcccgctccgtcgctgccgtcggtctggactggcccccacctcgctgcgccctctccccggccccggccccggctcggggcgtcccggggctcgccctgcgaccgccgcctcccgcgcgccgcgtcctcccgaccccgcggcggcgacgatgcccgggaggagggtcctgacggcggcggcgcggatggtggcggccggcgcccgggtgtgatgcgagcgtcacggtggggatgctgctggctgcgcggcgctgagggccagcgagagcgagagcccgcccggggcggaggacggactcatccggatctggctgcagcgtgggctcggagctcccccttcctctcggtctccctctcggcccccctttatttccttcttgctttgcgtctttaacacctctcgaccctgtcctccccccgccactggaagtcttcccgtctctaaatggaattagtggagcccggagcctctggtgtaacgcacagacatgatccatgggcgcagcgtgcttcacattgtagcaagtttaatcatcctccatttgtctggggcaaccaagaaaggaacagaaaagcaaaccacctcagaaacacagaagtcagtgcagtgtggaacttggacaaaacatgcagagggaggtatctttacctctcccaactatcccagcaagtatccccctgaccgggaatgcatctacatcatagaagccgctccaagacagtgcattgaactttactttgatgaaaagtactctattgaaccgtcttgggagtgcaaatttgatcatattgaagttcgagatggaccttttggcttttctccaataattggacgtttctgtggacaacaaaatccacctgtcataaaatccagtggaagatttctatggattaaattttttgctgatggagagctggaatctatgggattttcagctcgatacaatttcacacctgatcctgactttaaggaccttggagctttgaaaccattaccagcgtgtgagtttgagatgggcggttccgaaggaattgtggagtctatacaaattatgaaggaaggcaaagctactgctagcgaggctgttgattgcaagtggtacatccgagcacctccacggtccaagatttacttacgattcttggactatgagatgcagaattcaaatgagtgcaagaggaattttgtggctgtgtatgatggaagcagttccgtggaggatttgaaagctaagttctgtagcactgtggctaatgatgtcatgctacgcacgggtcttggggtgatccgcatgtgggcagatgagggcagtcgaaacagccgatttcagatgctcttcacatcctttcaagaacctccttgtgaaggcaacacattcttctgccatagtaacatgtgtattaataatactttggtctgcaatggactccagaactgtgtgtatccttgggatgaaaatcactgtaaagagaagaggaaaaccagcctgctggaccagctgaccaacaccagtgggactgtcattggcgtgacttcctgcatcgtgatcatcctcattatcatctctgtcatcgtacagatcaaacagcctcgtaaaaagtatgtccaaaggaaatcagactttgaccagacagttttccaggaggtatttgaacctcctcattatgagttatgcactctcagagggacaggagctacagctgactttgcagatgtggcagatgactttgaaaattaccataaactgcggaggtcatcttccaaatgcattcatgaccatcactgtggatcacagctgtccagcactaaaggcagccgcagtaacctcagcacaagagatgcttctatcttgacagagatgcccacacagccaggaaaacccctcatcccacccatgaacagaagaaatatccttgtcatgaaacacagctactcgcaagatgctgcagatgcctgtgacatagatgaaatcgaagaggtgccgaccaccagtcacaggctgtccagacacgataaagccgtccagcggttctgcctcattgggtctctaagcaaacatgaatctgaatacaacacaactagggtctagaaagaaaattcaagagaagaactatttatacaaacatggggactgtgaaaagaaaattctatagtgaattgtgaaaagtggacatatttctaaattcattccactgcctttatccaaacttaagaattacagacatttgttattccttcggcaagacatccccgctgcacactgatatgttcatttcgtaatttggttgctggccaccaagtgctccttagtttttaaatacattttgagattaactggaaacttgaagaagaaattagttcccgattaagactatcccaactttatttttattgtcagtttcacttttgtttctatgttgttttatgtctttgttatataattgtacattgtgtgatatgtgaaaaaaaaacacgaatttggatgaaccttgtgttacatgtacattgttttcattatatagacagcttgagaatagtgcgttcctgaatgattttgaacatgctacagtgaaaagtgacagtgtggaccatggaatcaccagctagaggttatggactatacacacctattattatattctgattaaatacaggaaaaagtaacaagtaaaattactagattgcaataaaaaaattcattttttggtctttcctgtatacccctgatttcctttttgttttatatcaaagaaagtactgagtttcagaaatcctttttgaagtcaggtattttaccattcatactctacagtagaaatgtttttgattaagcactcagcaatatgaccaaattgacagtttgagaaaataccctgcatgtcagtactggatatttgagttgggaaaatatcctttttgttagacacattgtgaaaagcatgcattgtcaaatactgttgttactcttccatttctttatgtcatatgcttgctacttacgactttttatataaatatatataaaatgtataataatttcctaatttgagttaagagaaatgttttcttccattagagtgattaaaaaactgactcacataaatacacattttatgtcaactctttccaccttttagggtacaggatgtccttcagtattgaggtttacttcccaaaatatttggcttctaaaagtttaggggaatattttcttcttttagaatagggaactctttttaaaactgctttaaaatcacaagcccttttatgaattaaaccaccattatgaattattcttattctcaggtacacataatacacctgaaagcttagtgattatgatgtgtttaacataaagtaaaatcctaaaatatattttactgctattaaattatatacacactctgtaaagtttgatttggtgagtggttattttttaaaatattcaatgtgtaatcttacaaaataaatttttaaaataagaattactatcagtatatatgcttcccaacattttcaaaactactgaattctccaggtttaaagaactctgtccttccactaacagagcagtctggtctactaaaatttggactttgcaattcaagcaggctttgcaaactagatgaattactgttatacttccctactaggaatacaatgtcatatatgttaaaaaataagcaaatagaaaataaatttttataatagaaaagtcaaagagttatcatagccattataaacactctatcttgaaaaaatgtcaagctacagaatcacttcaatgaatttgataaactagggaatcagaaaaggttttgaacatgacaaagattatttttcattgttatgctacatagttttatacacattgcttatgataaaatgtacccttttttatttggcttgactggtttatttattaccatggttccttttttgccctttaatttaaaattaatacaccaaagatttttttaaaggattaatcatatcttatattgctttctccatttagaaatcttcagaggactcctttccctttgaatgataatctcaaaagtatgatataactgtcaagattttttatttgtaacagcaataaaaatagtgaaataagttaggtgaacattttactattaatttgttctataactgtccggcatgtccgtcccctccagtttctcctgaatatacagaatgctgattccctgcttaaaaggtattttcaccagaaatctaccaatgggactttaaaaaaaaacactaaatgaagtataataataagaatgaatagctcacatatatttaacacacagcagcttcatgggaaaacaactgtattttaaatgaagaacaggcctcctcagtgataactctaaaatttctcaacaatgtacagacacagactaatcatgaaagaagataatgacgatgctgggcagtgtctggaggtagccttttctcctggcattcactctagatgctcaaacttgggagtgcagcgctctggcagagttgggagatgttctctggagggctctggcggtgcttatttatcagccagtattgaaatttgtcaatatatcaaaaacgatttagtagctatatcagaccttatcacctgaatgcagcctttggcccacattctaaaggtggtgacacacatagataaggaatgagatgtctcaagacttataagacatgttattttaataaatgattatattttttgataaagtgaattcaaatattaccaacccaagtgctttattgatttaacaagatgatttcaaataatgcattaagttagcctgctgtgttaatttcataaagctattctttttcattttattttttcaagttttcattcacttttcaaaataatggtagcatataatcacatgcaatgccaatgaatccccatattaagcttcgtacttctgtccaaatgtattgtagttgcctaatttcaaggttctaatttggaaatctgatttattttgtatgtttttatatacataccaattttaagcattatcttgcaaagtagacataggtggtgtttgatttgccataattaacttgaatttgattttgtaaccaaaatgtggctgtccacataattggagatcagtgtctttgggcttttaatggagaacaaatcacattgtggtgttgctggtttttctgtttcacatttacttttgctctagaagtatttccgtgagtctgatgactccataagttatgatcctcagtgttaagtaacttagacggttggcattactttaatattcacttaagcttctgtatcatttttttctgtatttttcccttaggaatttaattcgggtcttcctcaaattttacagctttaaaaaaattccatgaatgggttttcctcaacctcagaatatcataataaattacaagatatgaccccctggttcctattaccttgattaaagtggcggcaattaatttactgatgttttgtcagtgaaataaataatagcatcttatgaagtttgtgtatctctgatgaaaatgagtcatgtcagattccctctctgaagggaagttaaataaacaacatttttaaaattctttgaattctaaataaatatgctttgaaaagtgagttagggttttgtctaattgcactgaggcgagctagcttcggtgccatttttctctgtgcccttttccctccatggattcatttctatctattgcactctagcgtaaaggacccagccaagaaattgtaaaatagattcaacaacaaaataaacaggtcttgagttaattatcaatctctatgcacttaattaatatttcccaagcccatcttaaaggtgtaataaggtagaaaaataaaagtacactgttaaaatagccagaaatgtttttataaataatcctgctaaataaatctgaggccctttgttaatttacaattatgattcattttattaataaacttgtttgaattgtaccacaaatttaactgaattgtatcatcaaaataaataaaacagggtaataaaaataacaattagggtgactgatgtcagacactcatatcaactcatcattttcttgtagcctctgattctgtactttcttgtgtattattaaagaggtaaatgctctcttaaaatgcctctagttcctcagaggtaggaaaaataaactcaacctgctttggacttgtgtatttacttgggttggtttccagaatctccttattcctgaaacagtatgatcatgtagttaaactactcctttatatctgtaagtactgtgcagccaacatgttcttttttgtccccaacttctgccatctttccaacctctgaggcatgctattttatagtggtttgctctttgaaaaattgtttttgtgccctctcttaatagtcacagatactgacacaaaacttaaaaatgaccagaaaacaatgtataaattatttaaaataaaacattctttttatatcacattatcaaatttgtactctttattcacttttccattaagtgtgatatcaatatagctaggctgttttgagcttgcacagtctgtctaccaagctccttcctaagtactttgagggtaaaatgaagaaggcagtctaggaaggaacacaattacagagccctgtagaaggcagactgcttacaggagctgtataaggaaaattaagcccaacattatgtgctgtgttggccatcatgcaaagctgattgcaaagccctggttacctccttcatcatcttccatggaagataaaaataaattcaaatgttaattcaatagacatgatgctttataatgaagaagtttgtagcagaaacctgagaatataggtatcttcttaagatcaagagaggctttgtgaataactgaccttctaagcaggtcttgaagaatggagacaatggtcaaatagtagtgcagggagaaatttccacctagagtaattaaagcagatgtaggctcagaagatcatctaattgagctggttggaacatagacaggagacatactaagtatatttgacagagtaggtttgagtttacatcatgatttctgagtgcatggaatactatccaaaggaatttacactttattcaagggagaatattttaagatctcagcagaatggaacttaagatttctactttcagtagaagcctctgacaggtatgtttgctaaattgaatgggagtgaaatacagtagaatcaaaacagtgtagaaacaagacatgagaaagagtaacgggcagattgttagatgtccaggaatatttgtctggcttttttacttctactatactttattgtttcaaggtgatggttgactagcgaacatactgagggtcacatgccaaacaccattttgagtgttttacatgtaatttttttccttggtcatcttagcaattctatgactaattaataatatttgttgttatttattgtacagatgaggaaactgaagagttttagtaacttttttaagattacacaataaacaatgatgaatcaagctttgaagccaacctcaccaaccacaagatcaaccaacactcttcaccaatgtgtaatataaccacgttaatattcaacatagtacgtactgctgaaagaagttgatacttattcatattaaccccgtagttttgtgtttcctcatctgtaaaagtatgtattataacaccttctctccaccttacagcgtgtgaggttcaaatgaccattcattggaagatattttttatatcctataatgcattataaaaataaatcatttttcctaaa

SEQ ID NO: 5647 - DNA, 1750 bp, Homo sapiens
aactagcccagccgcgcggagcgcctgggagaggagaaggagccgacctgccgagatggaggcgaccggcacctgggcgctgctgctggcgctggcgctgctcctgctgctgacgctggcgctgtccgggaccagggcccgaggccacctgccccccgggcccacgccgctaccactgctgggaaacctcctgcagctacggcccggggcgctgtattcagggctcatgcggctgagtaagaagtacggaccggtgttcaccatctacctgggaccgtggcggcctgtggtggtcctggttgggcaggaggctgtgcgggaggccctgggaggtcaggctgaggagttcagcggccggggaaccgtagcgatgctggaagggacttttgatggccatggggttttcttctccaacggggagcggtggaggcagctgaggaagtttaccatgcttgctctgcgggacctgggcatggggaagcgagaaggcgaggagctgatccaggcggaggcccggtgtctggtggagacattccaggggacagaaggacgcccattcgatccctccctgctgctggcccaggccacctccaacgtagtctgctccctcctctttggcctccgcttctcctatgaggataaggagttccaggccgtggtccgggcagctggtggtaccctgctgggagtcagctcccaggggggtcagacctacgagatgttctcctggttcctgcggcccctgccaggcccccacaagcagctcctccaccacgtcagcaccttggctgccttcacagtccggcaggtgcagcagcaccaggggaacctggatgcttcgggccccgcacgtgaccttgtcgatgccttcctgctgaagatggcacaggaggaacaaaacccaggcacagaattcaccaacaagaacatgctgatgacagtcatttatttgctgtttgctgggacgatgacggtcagcaccacggtcggctataccctcctgctcctgatgaaataccctcatgtccaaaagtgggtacgtgaggagctgaatcgggagctgggggctggccaggcaccaagcctaggggaccgtacccgcctcccttacaccgacgcggttctgcatgaggcgcagcggctgctggcgctggtgcccatgggaataccccgcaccctcatgcggaccacccgcttccgagggtacaccctgccccagggcacggaggtcttccccctccttggctccatcctgcatgaccccaacatcttcaagcacccagaagagttcaacccagaccgtttcctggatgcagatggacggttcaggaagcatgaggcgttcctgcccttctccttagggaagcgtgtctgccttggagagggcctggcaaaagcggagctcttcctcttcttcaccaccatcctacaagccttctccctggagagcccgtgcccgccggacaccctgagcctcaagcccaccgtcagtggccttttcaacattcccccagcctcaacagtgggcatggacagggttaatgtctccagagtgtacactgcaggcagccacatttacacgcctgcagttgttttccggagtctgtcccacggcccacacgctcacttgactcatgctgctaagatgcacaaccgcacacccatacacaactacaagggccacaaagcaactgctgggttagctttccacagacataaatatagtccatctgcaatcacaagcacatag

SEQ ID NO: 5648 - DNA, 5186 bp, Homo sapiens; identical to SEQ ID NO: 322

SEQ ID NO: 5649 - DNA, 4900 bp, Homo sapiens
gtgaactgttgcaccgtgcaattgcacactataaatgtctttccttatctgtgtgtactcttatctcactgttctattttttctcctcatttatattaactctttcttacctttttttctgaacttctaggccttctctttccagaactggtggaagacaaatgaaacggccaagatggtaagaaacaagccgcatttctccttggggagactgataatttaaaaggtttgttgtgtcagaaacattcccagcttcatcaccaaccctttccttccacctctgcccactggagaccacttatatcccgaagcggacgcggcagctgaagtcaggaaaccatgcatcacattagcaggagccaactgcagactttaaactccgttcaacatgtggatgcggcagagaaatgacctgtccagacaagccggggcagctcataaactggttcatctgctccctgtgcgtcccgcgggtgcgtaagctctggagcagccggcgtccaaggacccggagaaaccttctgctgggcactgcgtgtgccatctacttgggcttcctggtgagccaggtggggagggcctctctccagcatggacaggcggctgagaaggggccacatcgcagccgcgacaccgccgagccatccttccctgagatacccctggatggtaccctggcccctccagagtcccagggcaatgggtccactctgcagcccaatgtggtgtacattaccctacgctccaagcgcagcaagccggccaatatccgtggcaccgtgaagcccaagcgcaggaaaaagcatgcagtggcatcggctgccccagggcaggaggctttggtcggaccatcccttcagccgcaggaagcggcaagggaagctgatgctgtagcacctgggtacgctcagggagcaaacctggttaagattggagagcgaccctggaggttggtgcggggtccgggagtgcgagccgggggcccagacttcctgcagcccagctccagggagagcaacattaggatctacagcgagagcgccccctcctggctgagcaaagatgacatccgaagaatgcgactcttggcggacagcgcagtggcagggctccggcctgtgtcctctaggagcggagcccgtttgctggtgctggaggggggcgcacctggcgctgtgctccgctgtggccctagcccctgtgggcttctcaagcagcccttggacatgagtgaggtgtttgccttccacctagacaggatcctggggctcaacaggaccctgccgtctgtgagcaggaaagcagagttcatccaagatggccgcccatgccccatcattctttgggatgcatctttatcttcagcaagtaatgacacccattcttctgttaagctcacctggggaacttatcagcagttgctgaaacagaaatgctggcagaatggccgagtacccaagcctgaatcgggttgtactgaaatacatcatcatgagtggtccaagatggcactctttgattttttgttacagatttataatcgcttagatacaaattgctgtggattcagacctcgcaaggaagatgcctgtgtacagaatggattgaggccaaaatgtgatgaccaaggttctgcggctctagcacacattatccagcgaaagcatgacccaaggcatttggtttttatagacaacaagggtttctttgacaggagtgaagataacttaaacttcaaattgttagaaggcatcaaagagtttccagcttctgcagtttctgttttgaagagccagcacttacggcagaaacttcttcagtctctgtttcttgataaagtgtattgggaaagtcaaggaggtagacaaggaattgaaaagcttatcgatgtaatagaacacagagccaaaattcttatcacctatatcaatgcacacggggtcaaagtattacctatgaatgaatgacaaaagaatcttctggctagggtgttagatatatttatgcatttttggttttgtttttaaatcaagcacatcaacctcaagcccgtttagcaatgaggcagtgtagatgaatacgtaaaataaatgactttaaccaagtagctataatgggacttagcactgtatgcatacttaaaaaggttttgaaaaacaaactacttgagaaatatttgtttatatttttctctaacatcatgctatgtgtcagtctgaacatctgacaacagaaatttcagttattattctagctaagttttgaaaacatttgtcatgctgtttaatagaaaactgcaaaccagagacactgactccattaataaaccatattttgtgccgttttgactgttctgaccaaatactaatgggaacaattcttgacgtttttctgttgctgattgttaacatagagcagtctctacactaccctgaggcaactctacattggaacactgaggcttacagcctgcaagagcatcagagctgaccatacatttaaacagaaatgctggtttatttgcaaaatcaccagtatattttctattgtgtctataaaaaatcagtcatttaagtacaagaatcatattttccattcctttttagaaatttattttgttgtccctatggaaatcattcacatctgacaatttatatgttaaagagttttactctctctattttggtccaatttgtatctagtggctgagaaattaaataattctaaagtatgaagttacctatctgaaaatgtacttacagagtatcattttaaaatggatgtctctttaaaaattttgttacttttaccaacaatgtaatataatttatgtatattttattaataatagtgaattccttaaaatttgttctatgtacttatatttaatttgatttaatggttactgcccagatattgagaattggttcaaatattgagtgtgtttcaatatattatctggcttatttcaacatgagtaatatgagcaaaataagttaaaacctgcgtctgatcaattttcctcatgactagaactaaaacagtaaatttggacaatattaagcctcaaataatcatctccaaactccttctaacactttttaaatcagattggaagacatggacaaatcaggttcatgtgttgcatctttatgtcctttgccaatatccaagatcatcacatatggtagatattcacatggagtttcaaattcagaatagattaccattaccttcctgcccttacacatcctactccttatttaaaagttctatttgtgacttttcatttcctgaaagtttaaaaatacaatttgagaatgtttataatacattctctcctgtcttttcacggttacgtctgttattgctgaaatacaccacattttctttgttctggtcaaggttaactcaatatctgtgtgaaagagaactactaacaacgttacaatagaggctagatttgaaaaaaaaaatctatagatctaattgatacaattgtagaacaaaatgtcaaaataatgttttaagtataagagaagatggaccaaggagagagagatcatttgaaaatctaattgtagcttttctaggctcacattcatgtactacttttagcacccttatgggctgtgctcgccccctggacagttgagctttggattatcttcctcttcaattttccctctattgacccgagtgtctccctctgcttctacagatttatagtactccttggctcttttgagtctccacttttactcactgtctctgggatttttaagatccttttcttctcttataaatcatcctcttaatgaaaattagcctaacaaaagtttggagactggaatcctactttgagccactgacttgaaataactcttttggcaagttgcctgacatcctgtcttaccaaggtggcatatttgcatttttactgcttaaaacatttttttttttttaccatctttatccaaatttatcatattgatggtaggactaacaggctttttagaagctggctttaactttgagtctcaagctacaatgctgttgggcagcctggtcttcccacgtgagggtttaactttgtttatttgcctccagttattccaaaatgcttattaaatgaaagtcccaggaacatgtttattttagtcacctttgctttttaacaattttgttttgtaatcaatgagtaattcatgatgaattatttttgactaatggatagccgaaggccaggcttttaattctaataggtaatgttcttcttttgtcttattgaaacaatgagaatactctgtgcatttcaaatgcactccgattatgctgtggttttattcacataagcacaatatgtgttttatttataacttcataacaaacttataatataataatttaccttagcagacatgcaaaagcttattcttgtgtgacttactttctttaagctaataatataaaaataaatatgtatcttaaaaatctataataaaacattagaaattaaagatatgtgctttttattttgcagatgagttcatttgcttttgtagatgtgttttcagagctaggtacagaggaatgtttgctacctttagcggtgaaaaaagaaagagagtcaagaattttgttggattgtgtttgtgtgtgcatatatttgatatcatcattatatttgtaatctttggacttgtaatcatagcctgtttattctactgtgccattaaatatactttaccttatacataacgaataaaatacctagaagtagatttatttacacactgtcttatgaaattcttatgtttatgtcagcacagaacaagcacacatttagagcattcatctgaaaattatatggaaattgaacatgggtcaaataaagatg

SEQ ID NO: 5650 - DNA, 2171 bp, Homo sapiens
attggcctgaaagacgtcattactctacggagacatgtggaaacaaaagttagagctaaaatccgtaagaggaaggtgacaacgaaaatcaaccatcatgacaaaatcaatggaaagaggaagaccgccagaaaacagaaaatgtttcaacgtgcgcaagagttgcggcggcgagcagaggactaccacaaatgcaaaatccccccttctgcaagaaaggctctttgcaactgggtcagaatggcggcagcggagcatcgtcattcttcaggattgccctactggccctacctcacagctgaaactttaaaaaacaggatgggccaccagccacctcctccaactcaacaacattctataactgataactccctgagcctcaagacacctcccgagtgtctgctcactccccttccaccctcagcggatgataatctcaagacacctcccgagtgtgtgctcactccccttccaccctcagcggatgataatctcaagacacctcccgagtgtgtgctcactccccttccaccctcagcggatgataatctcaagacacctcctgagtgtctgctcactccccttccaccctcagcggatgataatctcaagacacctcccgagtgtctactcactccccttccaccctcagctctaccctcagctccaccctcagcggatgataatctcaagacacgtgccgagtgtctgctccatccccttccaccctcagcggatgataatctcaagacaccttccgagcgtcagctcactccccttccaccctcagctccaccctcagcagatgataatatcaagacacctgccttccaccctcagcggatgatctcaagacaccttccgagcgtcagctcactccccttccaccctcagctccaccctcagcagatgataatatcaagatacctgctgagcgtctgcggattccgcttccaccatcagccgatgataatctcaagacaccttccgagcgtcagctcactccccttccaccctcagctccaccctcagcagatgataatatcaagacacctgctgagcgtctgcgggggccgcttccaccctgagcggatgataatctcaagacaccttccgagcgtcagctcactccccttccaccctcagctccaccctcagcagatgataatatcaagacacctgccgagcgtctgcgggggccgcttccaccctcagcggatgataatctcaagacaccttccgagcgtcagctcactccccttccaccctcagctccaccctcagcagatgataatatcaagacacctgccgagcgtctgcgggggccgcttccaccctcagcagatgataatctcaagacaccttccgagcgtcagctcactccccttccaccctcagctccaccctcagcagatgataatatcaagacacctgccgagcgtctgcgggggccgcttccaccctcagcggatgataatctcaagacaccttccgagcgtcagctcactccctttccaccctcagctccaccctcagcagatgataatatcaagacacctgccgagcgtctgcggggagcgtctgcgggggccgcttccaccctcagcggatgataatctcaagacaccttccgagcgtcagctcactccccttccaccctcagctccaccctcagcagatgataatatcaagacacctgccgagcgtctgcgggggccgcttccaccctcagccgatgataatctcaagacacctcccttagctactcaggaggctgaggcagaaaaaccacgcaaacccaagaggcagagggcggctgagatggaaccacctcccgaacccaagaggcggagggtcggtgacgtggaaccgtcacgcaaacccaagaggcggagggccgctgacgtggaaccatcatcacccgaacccaagaggcggagggtcggtgatgtggaaccgtcacgcaaacccaagaggcggagggccgctgacgtggaaccatcatcacccgaacccaagaggcggagggtcggtgacgtggaaccgtcacgcaaacccaagaggcggagggccgctgacgtggaaccatcattacccgaacccaagaggcggaggttgagctgagaagaggccagtgcactcaagcctgagcaataagaataaaaccgagt

SEQ ID NO: 5651 - DNA, 10750 bp, Homo sapiens
gccagagcagcggggccgggcgcgcagggcctggccggagcccccactcccaggagtttcctctgcagagccccgcgccccccgcgccgggatttcagcccgatcccctcctctccctgcgcccagcctctccccagcatgtaaagtcttctgtctctcctcggagttggcggaggcggcaactttccattctcgccgccgggggccgggcagcagcgggcgcgcgggtcagcgctcagcacggcgggcagcgccgcgctgcgcaccgccgccgaccatgagcgaggacagccgcggagacagccgcgccgagagcgccaaggacctggagaagcagcttcgcctgcgcgtgtgcgtgctcagcgagctccagaagaccgagcgggactatgtgggcacgctggagttcctggtgtcggcattcttacacagaatgaaccagtgtgcagcatcaaaagttgacaaaaatgtgacagaagaaacagtgaagatgttgttctcaaacattgaagacatccttgcagtacataaagaattcttaaaagtcgtggaagaatgcttacaccccgaacctaatgctcaacaagaagtgggaacctgctttcttcactttaaagacaagtttcgtatctatgatgaatattgtagtaaccatgagaaggcacaaaaattacttcttgaactcaacaaaataagaacaatccggacatttcttttgaactgcatgctgcttggaggacggaagaacacagatgttcccttggaaggatatttagtaacaccaatacaaagaatatgcaagtaccctcttattttgaaggagttgctgaagcggactccacggaaacacagtgactatgcagcagtgatggaagccctccaagccatgaaagctgtctgttccaacataaacgaggccaagagacagatggagaagttagaagttttagaggaatggcagtctcacattgaaggctgggaggggtccaacatcactgacacctgcactgaaatgctaatgtgtggagtcttactgaaaatttcttctggaaatattcaagaacgggtgttttttcttttcgataatcttttggtgtactgcaaaagaaaacacagacggttgaagaacagcaaggcatctacagatggacatcggtacctttttcgtggccggatcaacacggaggtgatggaagtggagaatgtggatgatggcaccgctgatttccatagcagtggacacattgttgttaatggatggaagatacataacacagcaaaaaataaatggtttgtttgtatggcaaaaacacctgaagagaagcatgaatggtttgaagctattttgaaagaaagagaacggcggaaaggtttaaaattaggaatggagcaagatacctgggtcatgatctctgaacagggtgagaaactttataaaatgatgtgcagacaaggaaatctgatcaaagaccgaaagagaaaactgactacgttccctaaatgctttcttggaagcgaatttgtgtcatggctgttggaaattggagagattcacaggcctgaggaaggcgtgcacttgggacaagcattattagaaaatggaatcattcaccatgttactgataaacatcaattcaaaccagaacagatgttatatagatttcgctatgatgatggaacattttatccaagaaatgagatgcaggacgtgatttcaaagggtgtaagattatattgtcgtcttcatagcctttttactccagtgataagagataaagattaccatttaaggacctacaaatctgtggtcatggccaacaaactgatagactggttaattgcacagggagattgccgcaccagagaagaggcaatgatatttggcgttggactctgtgacaatggatttatgcaccatgtccttgaaaaaagcgaattcaaagatgaacccctacttttccgttttttttcggatgaggaaatggagggatcaaatatgaaacatcgacttatgaaacatgacttaaaagttgtggaaaatgttatagctaagtcattattgattaaatccaatgaaggcagctatggctttggattagaagacaaaaataaagttccaataataaagttggtagaaaagggatctaatgctgagatggctggcatggaagtcgggaaaaagatttttgctattaatggtgacctagtttttatgagacctttcaatgaagtggattgcttcctgaaatcgtgtttaaacagcagaaaacctctaagagttcttgtgagcacaaagccaagagagacagtgaaaattccagattcagctgatggacttggcttccagatccggggatttggcccttctgttgtgcatgctgtaggaagaggaactgtggctgcagcagctggtcttcaccctggacagtgcattatcaaggtgaatggaatcaatgtcagcaaagagacacatgccagtgtcattgcacacgttacagcctgcaggaagtacaggcggccaacgaagcaagattccatacaatgggtttataatagcattgagagtgctcaagaagaccttcaaaaatctcactccaagccccctggagatgaagcaggggatgcttttgactgtaaagtagaagaggttattgacaaattcaacactatggccatcattgatgggaagaaggagcatgtgagtctgacagtggacaatgtccacctggaatatggtgtcgtgtatgagtacgacagcacagctggcatcaagtgcaatgtggtggaaaagatgattgagcccaaaggtttcttcagcttaactgccaagattcttgaagccctggctaaaagtgatgagcattttgtacaaaactgtaccagcctaaattctctaaatgaagtgattcctactgaccttcagagtaaattcagtgccctttgcagtgaaagaattgaacacctatgtcagagaatatccagttataaaaagttttctcgtgtactgaagaatagggcctggcctacttttaaacaggccaaatctaaaatctccccactgcacagcagtgatttctgccctaccaactgccatgtcaatgtgatggaagtttcttatcccaaaacatcaacctctttgggaagtgcatttggtgttcagttggatagcaggaagcataattctcatgataaagaaaacaaatcttcggagcaagggaaactgagccctatggtgtacattcagcacaccatcacaaccatggcggccccttcaggtctgtctctgggacagcaggatggccatggtctcaggtatctgctaaaagaagaagacttagaaacccaagacatctatcagaaactgctgggcaaacttcagactgcactgaaagaggtggagatgtgtgtttgtcaaatagatgaccttctgtcttcaataacatattctcctaaattagaacgtaagacatcagagggcataataccaacagacagtgacaatgagaagggagaaagaaacagcaaacgggtatgttttaatgtagcaggagatgaacaggaagattctggtcatgacaccatcagcaacagagactcttacagtgactgcaacagcaataggaattccatcgcctccttcaccagcatctgcagcagccagtgcagctcgtatttccacagtgatgaaatggactcaggtgatgaacttcccttaagtgttcgcatatctcatgataaacaggacaagatacatagttgccttgagcatcttttcagccaggtggattcaattaccaatctcctaaaagggcaggctgttgtgagggcctttgaccaaaccaagtatctcactccaggccgaggattgcaagaatttcaacaggaaatggaaccaaagctgagttgtccaaaaaggctacggcttcatatcaagcaagatccttggaatcttcccagcagcgtccggactcttgctcagaacatcaggaaatttgttgaagaggtaaagtgtaggctactcctggctcttcttgaatattcagatagtgagacacagctccgtagagacatggttttctgccagactcttgtggccactgtctgtgccttctctgagcagctcatggcggccttgaaccagatgtttgacaacagcaaggaaaatgagatggaaacttgggaagccagcaggaggtggctggaccagatagcgaatgcaggtgttctttttcactttcagtcacttctgtcaccaaacttgacagatgaacaagccatgttagaagatacactggttgcactatttgatttggaaaaggtttccttttactttaaaccatcagaagaggaacctctggttgcaaatgttcctcttacatatcaagcagaaggaagtcggcaagctctgaaagtttacttctacattgatagttatcattttgaacaacttcctcaacggctgaaaaatggaggagggtttaaaattcatcctgttctttttgcacaagcactagagagcatggaaggatattattacagagacaatgtttctgtggaagaatttcaagctcagataaatgcagcctcactggaaaaggtcaaacagtacaaccagaagctcagggcattctacttggacaagtcaaattcaccaccaaactccacatccaaagctgcctatgtagataagctaatgaggcctctcaacgctttggatgaactttaccgactggtagcctcgtttatcagatccaagcgcacagctgcctgtgcaaacacagcttgcagtgcttctggggttggactgctgtcagtttcctcggagctgtgcaacaggctgggcgcctgccacatcatcatgtgcagcagcggtgtgcatcggtgcaccctgagcgtgacgctggagcaagccatcattctggccagaagccacggactgccacctcgttacatcatgcaggctacagatgtgatgcggaagcagggagcaagagttcagaacacagcgaagaatttgggagtcagagaccggactccacagtctgcaccaaggctgtacaagctgtgcgagccacctcccccagctggagaagaatgaaaagaactcccaagaaaccaggcaggcagaagctcctgaatgctggactagacaaactacatgctggctaaacattctccactgaagatacatcaatgcttttttttttttttttttctgtaaatctttcttcccattgcaaacaagtagtgatcagtttatactttgatatttatgctggaaatggatagaagttcaatcagacagttcagcttcacgaactgatgtctctctgtattgacattaagtattcacttttagagtaaaatccatccctgggacataaagaaaaaaatattagagatttaaaaattaaccaccatgcctcctctcccattcattaaaatggttttattatgcttgttttcatctttcccaagtggacacatgtaataatggagagttcctcttgaagaaggccattattgaagaaacctggcgacatcttgcaaatcatcatgagaaatgttaaggacaatatagactgtgtgctatacattttcagtcccccatttgcaagagagaaagtcattaatgtgtaaaaggtggaaaagcatgctttactctttctcctaagggcttatttcttattagaggagaagaaagctgactaaggcctccagcaggactcactttcttctagctgcctttgggcatcctttattcttgtggacagctctagcaaatcaatgctatttttggtgtctgcaatgggcatggcttccttgggccatgaatactgggtgctgtgccataatggccctggggatcagggaagtgccctggggatcagggaggggaaccaggatgaagaaggggactgtaagcctattttaaaactaaacctttaagttagatacctaaaactcttaattttatgaaggctctcatatgagaggtcagactcttcaaagaatacaccatcatgagaatttttctgttaagatatatgtataagatatgaaaataaggctttatttgtactttaaaaggaccattaggggacttgtaatttatggatgcacaaggtgtattctatccttattctaaagtatatgtaatgtttatcatttctacattgatgcaataacattgtttttagcatagtaaatacagtaatatttattttaaatccataattttcaaacaaaacactcatgattgtgataattatatgggtttacactaatttagtatgtgaaatgcttttcatatctaaattatgtgcaaactattattaattttttttttattttttgaaactgagtctcactctgttacccagactggagtgcggtggtgcaatcttggctcactgcaacctccacctcctgggttcaagccattctcttgcctcagcctcccaggagctgggactacaggtgtgcaccaccatgctcagctaatttttgtatttttagtagagacgtgttttcaccatgttggccaggctggtcttgaactcctgacatcaagtgatccacccacctcagcctcccaaagtgctaggattacaggcgtgagccgctgctcccggcccattattaaattttaatttatgaaatttgatcatggttttcaaactattattaaaacctttatcattaaccattatgtattgaataacaaaaataccatgttacatgtgtaggcaatatgtgtatactactaggtaaggtaataataattgttatttggcacagaagctctagagacttttgtgagaagtccatatacaatgaaaaacaaggaacctaacatcagagttttcaagaaaaagttgaacattttgaatttaataaagatatctttacaaaaataaccttcaaggatttaacatttgtaggactaataaaggaacacagctgattagctagcaagtcctttcatattgtcatgactgttttctcatcaccatcctggaagcagtaatcctcattagaggcatgcaagggtcattaaaatgatttcagttgtactttgccatatttcatggggcaaattatcagctatattgtggtatttataagctaacatattttatatttttaaggatctactttcttcataatagaatgtgcttcatattatttttagggttaaacataagtgtgtcgtctatcatgcttggtacttactaaatgctcaaaaattagtaatggtttatattaacatcagtcactctaacttctgatcgtaataaaaattgtagctaacacttattaagggattactacatgcccagtaatacctccaaatgctttgcctgtattctgttgttattgcttcacttaatcctcataataatgacgtgacatggtactctttttatcgcgcccatttttagagttgaggaaccaaagcaaagaataacccagtgacttgcacaaagtcacatgattgacaaggggtagaaccaaaatttgaacccaggaagtctgccttcttaatgcattatgctacttttccttatcaatataagaactattgtaatattacgatgatttgtaagtaaatttggagttatgcggcatgtgttgtcattaaattatacatcttgtattaaaaaacggtgaatggaaatatgtaaatgctttaattatatgaaaattatagtgtttcctggacattttacaactctggatgcacattttgaggtaactcaacagtgttgcaatctgaaaaactattttgtatcatgttcctcctcatcaaaaataacagttttagatagtacatctcatacaactttattataattccaacacagtggtaagagtaaaaaacatacctaatggatgaatgaataatgacaattttttcaatgccatatgtacctccatgtgacattgggcattaaatggccttgaggttttaggatgtgtttaccttaatgctacatgctcctctataaccagtgcaccttcaaatactgctaaaacctgctaacttcttccaggttctgagcatggacaactcccaccgccccccaacctaaaagggaaggtcatgcatagaaagtttggattttaacttagagcctgactcaaaaataattgtgaactaaaaattcatagtcaatactttttaagcattctattatctcctataattttttctaatattaattccaaatattacaaaatttaatgtgatattaaagtatgaaaaatttgagaagattagaattttacatgtatttccattcctatttaaagagagaaaatggggagataatttctgtgctagttttacttatattggatatataatattgaatttatagtataagctttattttatcagttcgcaaatctgaagtctcatactgttttctgtctctttaaaacacattcttctggtggcttgggttcattgtgcattcattggccactcttcttgcagcaaattttaaatcaatttaaaattaggtaaactttttatgatactataatatatatgacgttgaaatgacattggttctgagtctattaatttaaattttgggatcattacattcagaatgaaatgaaattgaccttgatactaactttgagagccaaaaaaatgaatgggtaaacaaagcctaagggtcatgttaattaatttaacaaaacacactattttcagtcctttgggcttgtacattttatagacaaaattagcatttattgatttggaagtgttcaattgagagtaaatgactctgtgttttgaaactaatacctttgcatttaaaatactgaagtattattttgttagttgaagtagatcttttcctgtgtagcatgatttaatgcagagcagttattcacttatacttctgaaaagccataatattgaaatttaaaatgaatagtcttactttaaggtcacttttactttacattttactttaaaggtcgtttttagactttatgcactagtggtattgaaactaacctttaatatttgactaaattgcttgtgaatttttggaaactatgtttaatttttaaagacattgttatgtgaattatcttactaaattatcacttaagaactctctcatagcagtaatttcattaacacatatatatactaaccaatttgctaaatgaattgtcggttgtcctgcttaagtactagggccaagctttgaaatgacttaaagtgatctgaattttgattgagaaaaataatctgtcttctatcgaatgtttgaacttttagtgatgagcctcagcaaagtttcaccctgcatgaagcagaacaggtgggggaaaattacaagaggggtctgtaccaaaaatggccccaggatattccattgaacaaatattgaccattatcttcctaggtgctacaactccatactagtcattacagttagtctttggtttcacaaaaatgttactgcttcaaaggcttggcattaacagtgatgtcagcattcatactgccaacagtctgctggtcatacatggaagactgttaaagtgtggtctgtgcatcattgagcaattgttatgtagacacaaggcctgcttcactcaggatagcttgctcctctcgctgagaagagatacctgaagtctactaagtctactaaatgagatatatatgtgtatgtatatgcctatatatattattatatttactagtgtttgtgataatgttataaaaattaataagattgttttgttttgtatgaatgtacgacaaatcgagttgttcaatgtattgaatgaatgtcttactgtaagcatcagagctgtccaaccatgtgtaaatgtacctggtcttttgatcactgacactactttgctgttcaatctggaatcaactgacctggctctgccattgagaaataactaatttagaacaaaattgttaaattttaaaattgcatttctactagaaatagctttggagagttaattttaggtgcgaataacaggataaatgctatctgatcaagcattcatccgaaaaatgtttttgagaattcactttgtgcaaggcacagctgttggggctggtatatgtgtggacatgtttgatttgaaaaccttcgtggtgtctctgtgtgttattgatcatctgtgtcttttgcttaaaatggcattatttgtaacacaaacctaatatcatatatacaaatatactgtatgtagccaagaacactaaattggtaagacgctttagaaaatatgcatttgaatttgaatatctaatgcctcaagcaaatttattagagtttcagatgaatatatatttttgtaactggcaagtaaatgagtagaacagagctttttgcctaaaaatatttttataagtactcatttacatagtattcattattttaaatgacaaaatatcaaattggttctataaatagtaattgttttgaatatatccatacttaacatcatatgaaatccaaaatttaatgataaatttcatctggatgtgttattataaaagtcatctttttttcctttgtaaaatatccatgtaacatagcttccattactccatattttatgtatggttaaaattatcaaagtgcattatgtattttatattgtttatttttgtctgcatgaaagattggaatagtaaccgtgtatgataaatgttaataataataaagtgaaatgtagtatgacc

SEQ ID NO: 5652 - DNA, 3481 bp, Homo sapiens
ctttaaatcgcggcgcccagcggttctgcgtctcagttcccgagcctgggagcaaccgcagcttctagtatccagactccagcgccgccccgggcgcggaccccaaccccgacccagagcttctccagcggcggcgcagcgagcagggctccccgccttaacttcctccgcggggcccagccaccttcgggagtccgggttgcccacctgcaaactctccgccttctgcacctgccacccctgagccagcgcgggcgcccgagcgagtcatggccaacgcggggctgcagctgttgggcttcattctcgccttcctgggatggatcggcgccatcgtcagcactgccctgccccagtggaggatttactcctatgccggcgacaacatcgtgaccgcccaggccatgtacgaggggctgtggatgtcctgcgtgtcgcagagcaccgggcagatccagtgcaaagtctttgactccttgctgaatctgagcagcacattgcaagcaacccgtgccttgatggtggttggcatcctcctgggagtgatagcaatctttgtggccaccgttggcatgaagtgtatgaagtgcttggaagacgatgaggtgcagaagatgaggatggctgtcattgggggtgcgatatttcttcttgcaggtctggctattttagttgccacagcatggtatggcaatagaatcgttcaagaattctatgaccctatgaccccagtcaatgccaggtacgaatttggtcaggctctcttcactggctgggctgctgcttctctctgccttctgggaggtgccctactttgctgttcctgtccccgaaaaacaacctcttacccaacaccaaggccctatccaaaacctgcaccttccagcgggaaagactacgtgtgacacagaggcaaaaggagaaaatcatgttgaaacaaaccgaaaatggacattgagatactatcattaacattaggaccttagaattttgggtattgtaatctgaagtatggtattacaaaacaaacaaacaaacaaaaaacccatgtgttaaaatactcagtgctaaacatggcttaatcttattttatcttctttcctcaatataggagggaagatttttccatttgtattactgcttcccattgagtaatcatactcaactgggggaaggggtgctccttaaatatatatagatatgtatatatacatgtttttctattaaaaatagacagtaaaatactattctcattatgttgatactagcatacttaaaatatctctaaaataggtaaatgtatttaattccatattgatgaagatgtttattggtatattttctttttcgtctatatatacatatgtaacagtcaaatatcatttactcttcttcattagctttgggtgcctttgccacaagacctagcctaatttaccaaggatgaattctttcaattcttcatgcgtgcccttttcatatacttattttattttttaccataatcttatagcacttgcatcgttattaagcccttatttgttttgtgtttcattggtctctatctcctgaatctaacacatttcatagcctacattttagtttctaaagccaagaagaatttattacaaatcagaactttggaggcaaatctttctgcatgaccaaagtgataaattcctgttgaccttcccacacaatccctgtactctgacccatagcactcttgtttgctttgaaaatatttgtccaattgagtagctgcatgctgttcccccaggtgttgtaacacaactttattgattgaatttttaagctacttattcatagttttatatccccctaaactacctttttgttccccattccttaattgtattgttttcccaagtgtaattatcatgcgttttatatcttcctaataaggtgtggtctgtttgtctgaacaaagtgctagactttctggagtgataatctggtgacaaatattctctctgtagctgtaagcaagtcacttaatctttctacctcttttttctatctgccaaattgagataatgatacttaaccagttagaagaggtagtgtgaatattaattagtttatattactctcattctttgaacatgaactatgcctatgtagtgtctttatttgctcagctggctgagacactgaagaagtcactgaacaaaacctacacacgtaccttcatgtgattcactgccttcctctctctaccagtctatttccactgaacaaaacctacacacataccttcatgtggttcagtgccttcctctctctaccagtctatttccactgaacaaaacctacgcacataccttcatgtggctcagtgccttcctctctctaccagtctatttccattctttcagctgtgtctgacatgtttgtgctctgttccattttaacaactgctcttacttttccagtctgtacagaatgctatttcacttgagcaagatgatgtaatggaaagggtgttggcattggtgtctggagacctggatttgagtcttggtgctatcaatcaccgtctgtgtttgagcaaggcatttggctgctgtaagcttattgcttcatctgtaagcggtggtttgtaattcctgatcttcccacctcacagtgatgttgtggggatccagtgagatagaatacatgtaagtgtggttttgtaatttaaaaagtgctatactaagggaaagaattgaggaattaactgcatacgttttggtgttgcttttcaaatgtttgaaaacaaaaaaaatgttaagaaatgggtttcttgccttaaccagtctctcaagtgatgagacagtgaagtaaaattgagtgcactaaacaaataagattctgaggaagtcttatcttctgcagtgagtatggcccgatgctttctgtggctaaacagatgtaatgggaagaaataaaagcctacgtgttggtaaatccaacagcaagggagatttttgaatcataataactcataaggtgctatctgttcagtgatgccctcagagctcttgctgttagctggcagctgacgctgctaggatagttagtttggaaatggtacttcataataaactacacaaggaaagtcagccactgtgtcttatgaggaattggacctaataaattttagtgtgccttccaaacctgagaatatatgcttttggaagttaaaatttaaatggcttttgccacatacatagatcttcatgatgtgtgagtgtaattccatgtggatatcagttaccaaacattacaaaaaaattttatggcccaaaatgaccaacgaaattgttacaatagaatttatccaattttgatctttttatattcttctaccacacctggaaacagaccaatagacattttggggttttataataggaatttgtataaagcattactctttttcaataaattgttttttaatttaaaaaaaggatta

SEQ ID NO: 5653 - DNA, 3329 bp, Homo sapiens
gggaggaggcagtgggagggcggagggcgggggccttcggggtgggcgcccagggtagggcaggtggccgcggcgtggaggcagggagaatgcgactctccaaaaccctcgtcgacatggacatggccgactacagtgctgcactggacccagcctacaccaccctggaatttgagaatgtgcaggtgttgacgatgggcaatgttttgttgccgctgcgtctcgccagattgaggcatcccctccgacatcactggagcatatctggaggggtggacagttctccacagggagacacgtccccatcagaaggcaccaacctcaacgcgcccaacagcctgggtgtcagcgccctgtgtgccatctgcggggaccgggccacgggcaaacactacggtgcctcgagctgtgacggctgcaagggcttcttccggaggagcgtgcggaagaaccacatgtactcctgcagatttagccggcagtgcgtggtggacaaagacaagaggaaccagtgccgctactgcaggctcaagaaatgcttccgggctggcatgaagaaggaagccgtccagaatgagcgggaccggatcagcactcgaaggtcaagctatgaggacagcagcctgccctccatcaatgcgctcctgcaggcggaggtcctgtcccgacagatcacctcccccgtctccgggatcaacggcgacattcgggcgaagaagattgccagcatcgcagatgtgtgtgagtccatgaaggagcagctgctggttctcgttgagtgggccaagtacatcccagctttctgcgagctccccctggacgaccaggtggccctgctcagagcccatgctggcgagcacctgctgctcggagccaccaagagatccatggtgttcaaggacgtgctgctcctaggcaatgactacattgtccctcggcactgcccggagctggcggagatgagccgggtgtccatacgcatccttgacgagctggtgctgcccttccaggagctgcagatcgatgacaatgagtatgcctacctcaaagccatcatcttctttgacccagatgccaaggggctgagcgatccagggaagatcaagcggctgcgttcccaggtgcaggtgagcttggaggactacatcaacgaccgccagtatgactcgcgtggccgctttggagagctgctgctgctgctgcccaccttgcagagcatcacctggcagatgatcgagcagatccagttcatcaagctcttcggcatggccaagattgacaacctgttgcaggagatgctgctgggagggtcccccagcgatgcaccccatgcccaccaccccctgcaccctcacctgatgcaggaacatatgggaaccaacgtcatcgttgccaacacaatgcccactcacctcagcaacggacagatgtgtgagtggccccgacccaggggacaggcagccacccctgagaccccacagccctcaccgccaggtggctcagggtctgagccctataagctcctgccgggagccgtcgccacaatcgtcaagcccctctctgccatcccccagccgaccatcaccaagcaggaagttatctagcaagccgctggggcttgggggctccactggctccccccagccccctaagagagcacctggtgatcacgtggtcacggcaaaggaagacgtgatgccaggaccagtcccagagcaggaatgggaaggatgaagggcccgagaacatggcctaagggccacatcccactgccacccttgacgccctgctctggataacaagactttgacttggggagacctctactgccttggacaacttttctcatgttgaagccactgccttcaccttcaccttcatccatgtccaacccccgacttcatcccaaaggacagccgcctggagatgacttgaggccttacttaaacccagctcccttcttccctagcctggtgcttctcctctcctagcccctgtcatggtgtccagacagagccctgtgaggctgggtccaattgtggcacttggggcaccttgctcctccttctgctgctgcccccacctctgctgcctccctctgctgtcaccttgctcagccatcccgtcttctccaacaccacctctccagaggccaaggaggccttggaaacgattcccccagtcattctgggaacatgttgtaagcactgactgggaccaggcaccaggcagggtctagaaggctgtggtgagggaagacgcctttctcctccaacccaacctcatcctccttcttcagggacttgggtgggtacttgggtgaggatccctgaaggccttcaacccgagaaaacaaacccaggttggcgactgcaacaggaacttggagtggagaggaaaagcatcagaaagaggcagaccatccaccaggcctttgagaaagggtagaattctggctggtagagcaggtgagatgggacattccaaagaacagcctgagccaaggcctagtggtagtaagaatctagcaagaattgaggaagaatggtgtgggagagggatgatgaagagagagagggcctgctggagagcatagggtctggaacaccaggctgaggtcctgatcagcttcaaggagtatgcagggagctgggcttccagaaaatgaacacagcagttctgcagaggacgggaggctggaagctgggaggtcaggtggggtggatgatataatgcgggtgagagtaatgaggcttggggctggagaggacaagatgggtaaaccctcacatcagagtgacatccaggaggaataagctcccagggcctgtctcaagctcttccttactcccaggcactgtcttaaggcatctgacatgcatcatctcatttaatcctcccttcctccctattaacctagagattgtttttgttttttattctcctcctccctccccgccctcacccgccccactccctcctaacctagagattgttacagaagctgaaattgcgttctaagaggtgaagtgattttttttctgaaactcacacaactaggaagtggctgagtcaggacttgaacccaggtctccctggatcagaacaggagctcttaactacagtggctgaatagcttctccaaaggctccctgtgttctcaccgtgatcaagttgaggggcttccggctcccttctacagcctcagaaaccagactcgttcttctgggaaccctgcccactcccaggaccaagattggcctgaggctgcactaaaattcacttagggtcgagcatcctgtttgctgataaatattaaggagaattca

SEQ ID NO: 5654 - DNA, 1756 bp, Homo sapiens
ataaacaaggaacccgactggttagacagattttgtttttcttcttcccgcgcgctttagctccctgtcctttggtcgcatttgtgggcgcgcggcacgcagccgggaggccgaggactcggagttcacctgcaggaaagtatgcctcagactcctcccttttcagcaatgtttgacagcagtggttacaatcgaaacctctatcagtctgcagaggacagctgtggagggttgtattaccatgacaacaacctcctctctggatccctggaagcactcatccagcacttagtacctaatgtggattactatccagataaccagatgagaaaaattgcacccaaaatccttcaactcctcacggaatggacggaaacatttccctatgattttcgggatgaaagaatgatgagaaacttaaaagatctggctcaccgaatagccagtggcgaagagacatacagaaagaatgtccagcaaatgatgcagtgtctgatccgcaagcttgctgcgctcagccagtacgaagaagtcctggcaaaaatcagctccacatccacagatcggctcacagttctcaagaccaagccacagtctatacaaagggatatcattactgtctgcaacgacccttacacgttggcccagcagctgactcatatagagctggagaggctcaattatattgggccagaagaatttgttcaggcgttcgtgcagaaggaccctttggataatgacaagagttgctacagtgaacggaagaaaacacgaaacttagaagcttacgtggaatggtttaatcgcctcagctacttggttgctacagaaatctgtatgcctgttaagaaaaaacaccgagcaagaatgattgagtatttcattgacgtagctcgggagtgttttaacattggcaacttcaactccttgatggcgataatctctggtatgaatatgagcccagtctctcgactaaaaaaaacttgggccaaagtgaagactgcaaaatttgacattcttgagcatcagatggacccttcaagcaatttctataattatcgaacagctcttcgtggggcagcacaaaggtctttaactgctcatagtagtagagaaaagattgtgataccattcttcagtctcttaatcaaagatatttatttcctcaatgagggttgtgccaaccgccttcccaatggccatgtcaattttgagaaattttgggaactggccaaacaagtgagtgaatttatgacatggaaacaagtggagtgtccatttgagagggaccggaagatcttgcagtatctgctcacagtaccagtcttcagtgaagatgctctctacttggcttcttatgagagtgaaggacctgaaaatcatatagagaaagacagatggaagtctttaaggtcgagcctcttaggcagagtttaacacatgggagctgcctgcctgctgctgctgctgcttcctgcagatcatggaggggctggcctttgttttctggcatctcgtaccacgaacactcatgaagaccctgcagtcattggagcacccgggtcagcaaagcacacaagctcactcaagaccagatggagaacttatttcctgcagctgacagatagactcagattttgtgagactgaaatgttcactgaagacacttgagaaagaatcctctaaaaatcccggctctgcacattattcatctcctggaatttccatgtgaatcacagctctgcacctggatgga

SEQ ID NO: 5655 - DNA, 3852 bp, Homo sapiens
gagcggcggcggcggggcgctggggcggagactgcgacccggagccgcccggactgacggagcccactgcggtgcgggcgttggcgcgggcacggaggacccgggcaggcatcgcaagcgaccccgagcggagccccggagccatggccctgagcgagctggcgctggtccgctggctgcaggagagccgccgctcgcggaagctcatcctgttcatcgtgttcctggcgctgctgctggacaacatgctgctcactgtcgtggtccccatcatcccaagttatctgtacagcattaagcatgagaagaatgctacagaaatccagacggccaggccagtgcacactgcctccatctcagacagcttccagagcatcttctcctattatgataactcgactatggtcaccgggaatgctaccagagacctgacacttcatcagaccgccacacagcacatggtgaccaacgcgtccgctgttccttccgactgtcccagtgaagacaaagacctcctgaatgaaaacgtgcaagttggtctgttgtttgcctcgaaagccaccgtccagctcatcaccaaccctttcataggactactgaccaacagaattggctatccaattcccatatttgcgggattctgcatcatgtttgtctcaacaattatgtttgccttctccagcagctatgccttcctgctgattgccaggtcgctgcagggcatcggctcgtcctgctcctctgtggctgggatgggcatgcttgccagtgtctacacagatgatgaagagagaggcaacgtcatgggaatcgccttgggaggcctggccatgggggtcttagtgggcccccccttcgggagtgtgctctatgagtttgtggggaagacggctccgttcctggtgctggccgccctggtactcttggatggagctattcagctctttgtgctccagccgtcccgggtgcagccagagagtcagaaggggacacccctaaccacgctgctgaaggacccgtacatcctcattgctgcaggctccatctgctttgcaaacatgggcatcgccatgctggagccagccctgcccatctggatgatggagaccatgtgttcccgaaagtggcagctgggcgttgccttcttgccagctagtatctcttatctcattggaaccaatatttttgggatacttgcacacaaaatggggaggtggctttgtgctcttctgggaatgataattgttggagtcagcattttatgtattccatttgcaaaaaacatttatggactcatagctccgaactttggagttggttttgcaattggaatggtggattcgtcaatgatgcctatcatgggctacctcgtagacctgcggcacgtgtccgtctatgggagtgtgtacgccattgcggatgtggcattttgtatggggtatgctataggtccttctgctggtggtgctattgcaaaggcaattggatttccatggctcatgacaattattgggataattgatattctttttgcccctctctgcttttttcttcgaagtccacctgccaaagaagaaaaaatggctattctcatggatcacaactgccctattaaaacaaaaatgtacactcagaataatatccagtcatatccgataggtgaagatgaagaatctgaaagtgactgagatgagatcctcaaaaatcatcaaagtgtttaattgtataaaacagtgtttccagtgacacaactcatccagaactgtcttagtcataccatccatccctggtgaaagagtaaaaccaaaggttattatttcctttccatggttatggtcgattgccaacagccttataaagaaaaagaagcttttctaggggtttgtataaatagtgttgaaactttattttatgtatttaattttattaaatatcatacaatatattttgatgaaataggtattgtgtaaatctataaatatttgaatccaaaccaaatataattttttaacttacattaacaaacatttgggcaaaaatcatattggtaatgagtgtttaaaattaaagcacacattatctctgagactcttccaacaaagagaaactagaatgaagtctgaaaaacagaatcaagtaagacagcatgttatatagtgacactgaatgttatttaacttgtagttactatcaatatatttatgcgttaaacagctagttctctcaagtgtagaggacaagaacttgtgtcagttatcttttgaatccataaatcttagctggcattagttttctatgtaatcacctacctagagagagttgtaaattatatgttaacatgttatctggttggcagcaaacactaaagccaataaaggaaaaacagtaaatgttccgaaagcagagaaaagcaaccaaacatattgttatgaactaaaagctttccctttaagatgcatacttgtcttactggatgaagaaaattgagggtacatgtaccttatactgtcaaggttgtttaaacatgataaggttaatcgccatctacttcaagttttagaaaaggaaacaagaagctgaaaacagctgctctgactttaatatctgactatatctttgatctgtttgcaggtcatccaagtgttttctaggaatatatttattttaggttgtctgaaactactattttttagactcctgaaagttgttcacatcaatgtgaagacaaattttaaatgaaaatgaagaatgaaattatgtcttgaatcatatattaagaagtaaaaataatagtgatcaggcagaaaagaaaaatggaacatctaaaaatgtatgtgctaactatatcatccagtgtgcagtgttgtgtatttttctaagcatgacaacattgatgtgccttttcagtgtaacagcaaatactgttagtgaacattgtcaatttatgtcattttgttaagagatatgactggagtgtgcagtgtggaatgtctctaatactacttgtgaatcctgcagttctataatcataaacaaaaattacttagtttcgttaagctaagattgtgtttgtgttaacttcgacatcaaggagcaaagaactttagaacagactcctcaatcttgtgactttcttattctctaggaaagtaacacttcgtttcatgaagcttttctgtggggcttcgattatttcaagtctggtttctaagtgcagtgtgtttgaagcaaacgaacttccaactcacttatttggcattgggcaacttggccaagtctgccactttggaagatggctctggaggaaactctcatatggctaaaaaggcaggctagtttcttacttctacaggggtagagccttaaaaaagaacgtgctacaaattggttctctttgagggtttctggttctccctgcccccaataccatatactttattgcaattttatttttgcctttacggctctgtgtctttctgcaagaaggcctggcaaaggtatgcctgctgttggtccctcgggataagataaaatataaataaaaccttcagaactgttttggagcaaaagatagcttgtacttggggaaaaaaattctaagttcttttatatgactaatattcttggttagcaagactggaaagaggtgtttttttaaaatgtacataccagaacaaagaacatacagctctctgaacatttattttttgaacagaggtggtttttatgtttggacctggtaatacagatacaaaaactttaatgaggtagcaatgaatattcaactgtttgactgctaagtgtatctgtccatattttagcaagtttacttaataaatcttctgaaccatg

SEQ ID NO: 5656 - DNA, 4070 bp, Homo sapiens
ggcgaaaaagtttcttttgcagacaagaaggggcttcggcgagccgacgctgctcaagctgcaactctgttgcagttggcagttcttttcggtttccctcctgctgtttgggggcatgaaagggcttcgccgccgggagtaaaagaaggaattgaccgggcagcgcgagggaggagcgcgcacgcgaccgcgagggcgggcgtgcaccctcggctggaagtttgtgccgggccccgagcgcgcgccggctgggagcttcgggtagagacctaggccgctggaccgcgatgagcgcgccgagcctccgtgcgcgcgccgcggggttggggctgctgctgtgcgcggtgctggggcgcgctggccggtcagacagcggcggtcgcggggaactcgggcagccctctggggtagccgccgagcgcccatgccccactacctgccgctgcctcggggacctgctggactgcagtcgtaagcggctagcgcgtcttcccgagccactcccgtcctgggtcgctcggctggacttaagtcacaacagattatctttcatcaaggcaagttccatgagccaccttcaaagccttcgagaagtgaaactgaacaacaatgaattggagaccattccaaatctgggaccagtctcggcaaatattacacttctctccttggctggaaacaggattgttgaaatactccctgaacatctgaaagagtttcagtcccttgaaactttggaccttagcagcaacaatatttcagagctccaaactgcatttccagccctacagctcaaatatctgtatctcaacagcaaccgagtcacatcaatggaacctgggtattttgacaatttggccaacacactccttgtgttaaagctgaacaggaaccgaatctcagctatcccacccaagatgtttaaactgccccaactgcaacatctcgaattgaaccgaaacaagattaaaaatgtagatggactgacattccaaggccttggtgctctgaagtctctgaaaatgcaaagaaatggagtaacgaaacttatggatggagctttttgggggctgagcaacatggaaattttgcagctggaccataacaacctaacagagattaccaaaggctggctttacggcttgctgatgctgcaggaacttcatctcagccaaaatgccatcaacaggatcagccctgatgcctgggagttctgccagaagctcagtgagctggacctaactttcaatcacttatcaaggttagatgattcaagcttccttggcctaagcttactaaatacactgcacattgggaacaacagagtcagctacattgctgattgtgccttccgggggctttccagtttaaagactttggatctgaagaacaatgaaatttcctggactattgaagacatgaatggtgctttctctgggcttgacaaactgaggcgactgatactccaaggaaatcggatccgttctattactaaaaaagccttcactggtttggatgcattggagcatctagacctgagtgacaacgcaatcatgtctttacaaggcaatgcattttcacaaatgaagaaactgcaacaattgcatttaaatacatcaagccttttgtgcgattgccagctaaaatggctcccacagtgggtggcggaaaacaactttcagagctttgtaaatgccagttgtgcccatcctcagctgctaaaaggaagaagcatttttgctgttagcccagatggctttgtgtgtgatgattttcccaaaccccagatcacggttcagccagaaacacagtcggcaataaaaggttccaatttgagtttcatctgctcagctgccagcagcagtgattccccaatgacttttgcttggaaaaaagacaatgaactactgcatgatgctgaaatggaaaattatgcacacctccgggcccaaggtggcgaggtgatggagtataccaccatccttcggctgcgcgaggtggaatttgccagtgaggggaaatatcagtgtgtcatctccaatcactttggttcatcctactctgtcaaagccaagcttacagtaaatatgcttccctcattcaccaagacccccatggatctcaccatccgagctggggccatggcacgcttggagtgtgctgctgtggggcacccagccccccagatagcctggcagaaggatgggggcacagacttcccagctgcacgggagagacgcatgcatgtgatgcccgaggatgacgtgttctttatcgtggatgtgaagatagaggacattggggtatacagctgcacagctcagaacagtgcaggaagtatttcagcaaatgcaactctgactgtcctagaaacaccatcatttttgcggccactgttggaccgaactgtaaccaagggagaaacagccgtcctacagtgcattgctggaggaagccctccccctaaactgaactggaccaaagatgatagcccattggtggtaaccgagaggcacttttttgcagcaggcaatcagcttctgattattgtggactcagatgtcagtgatgctgggaaatacacatgtgagatgtctaacacccttggcactgagagaggaaacgtgcgcctcagtgtgatccccactccaacctgcgactcccctcagatgacagccccatcgttagacgatgacggatgggccactgtgggtgtcgtgatcatagccgtggtttgctgtgtggtgggcacgtcactcgtgtgggtggtcatcatataccacacaaggcggaggaatgaagattgcagcattaccaacacagatgagaccaacttgccagcagatattcctagttatttgtcatctcagggaacgttagctgacaggcaggatgggtacgtgtcttcagaaagtggaagccaccaccagtttgtcacatcttcaggtgctggatttttcttaccacaacatgacagtagtgggacctgccatattgacaatagcagtgaagctgatgtggaagctgccacagatctgttcctttgtccgtttttgggatccacaggccctatgtatttgaagggaaatgtgtatggctcagatccttttgaaacatatcatacaggttgcagtcctgacccaagaacagttttaatggaccactatgagcccagttacataaagaaaaaggagtgctacccatgttctcatccttcagaagaatcctgcgaacggagcttcagtaatatatcgtggccttcacatgtgaggaagctacttaacactagttactctcacaatgaaggacctggaatgaaaaatctgtgtctaaacaagtcctctttagattttagtgcaaatccagagccagcgtcggttgcctcgagtaattctttcatgggtacctttggaaaagctctcaggagacctcacctagatgcctattcaagctttggacagccatcagattgtcagccaagagccttttatttgaaagctcattcttccccagacttggactctgggtcagaggaagatgggaaagaaaggacagattttcaggaagaaaatcacatttgtacctttaaacagactttagaaaactacaggactccaaattttcagtcttatgacttggacacatagactgaatgagaccaaaggaaaagcttaacatactacctcaagtgaacttttatttaaaagagagagaatcttatgttttttaaatggagttatgaattttaaaaggataaaaatgctttatttatacagatgaaccaaaattacaaaaagttatgaaaatttttatactgggaatgatgctcatataagaatacctttttaaactattttttaactttgttttatgcaaaaaagtatcttacgtaaattaatgatataaatcatgattattttatgtatttttataatgccagatttctttttatggaaaatgagttactaaagcattttaaataatacctgccttgtaccattttttaaatagaagttacttcattatattttgcacattatatttaataaaatgtgtcaatttgatgccaa

SEQ ID NO: 5657 - DNA, 1238 bp, Homo sapiens
taagatgcggaggagggtgacgcactagctctccagttcgcccgttcctggcctgacccccaccaaggcccataccgcagtaggctcctcgggctgcccctcggttgacaatggtctccaggatggtctctaccatgctatctggcctactgttttggctggcatctggatggactccagcatttgcttacagcccccggacccctgaccgggtctcagaagcagatatccagaggctgcttcatggtgttatggagcaattgggcattgccaggccccgagtggaatatccagctcaccaggccatgaatcttgtgggcccccagagcattgaaggtggagctcatgaaggacttcagcatttgggtccttttggcaacatccccaacatcgtggcagagttgactggagacaacattcctaaggactttagtgaggatcaggggtacccagaccctccaaatccctgtcctgttggaaaaacagcagatgatggatgtctagaaaacacccctgacactgcagagttcagtcgagagttccagttgcaccagcatctctttgatccggaacatgactatccaggcttgggcaagtggaacaagaaactcctttacgagaagatgaagggaggagagagacgaaagcggaggagtgtcaatccatatctacaaggacagagactggataatgttgttgcaaagaagtctgtcccccatttttcagatgaggataaggatccagagtaaagagaagatgctagacgaaaacccacattacctgttaggcctcagcatggcttatgtgcacgtgtaaatggagtccctgtgaatgacagcatgtttcttacatagataattatggatacaaagcagctgtatgtagatagtgtattgtcttcacaccgatgattctgctttttgctaaattagaataagagcttttttgtttcttgggtttttaaaatgtgaatctgcaatgatcataaaaattaaaatgtgaatgtcaacaataaaaagcaagactatgaaaggctcagatttcttgcagtttaaaatggtgtctgaggttgtactattttggccaagtctgtagaaagctgtcatttgattttgattatgtagttcatccagcccttgggcattgttatacaccagtaaagaaggctgtactcaagaggaggagctgacacatttcacttggctgcgtcttaataaacatgaatgcaagcattggca

SEQ ID NO: 5658 - DNA, 3022 bp, Homo sapiens
ggacaggacggcttccgggatttggcggggcctttgtctctagctgctgcgggagctccaggtctagtctttactgctctgtgtattctgctcctagaggcccagcctctgtgactccgttatctgcaggtattgggagatgcacagctaagatgccaggaccacctggaagcctagaaatgggaccactgacatttagggatgtggccatagaattctctctggaggagtggcaatgcctggacactgcacaacggaatttatataggaaagtgatgtttgagaactacagaaacctggtcttcctgggtattgctgtctctaagcctcacctgataacctgtttggagcaaggaaaagagccctggaataggaagagacaggagatggtagccaaacccccagttatatattctcatttcactgaagacctttggccagagcatagcataaaagattcttttcaaaaagtgatactgagaggatatggaaaatgtggacatgagaatttacaattaagaataagttgtaaaagtgtggatgagtctaaggtgttcaaagaaggttataatgaacttaaccaatgtttgagaactacccagagcaaaatatttcaatgtgataaatacgtgaaagtctttcataaattttcaaattcaaacagtcataagaaaagaaatactggaaagaaggttttcaaatgtaaagaatgtggcaaatcattttgcatgctttcacatctaacacaacatataagaattcacactagagagaattcttacaaatgtgaggaatgtggcaaagttcttaactggttctcagagcttattaaacataagggaattcatatgggagagaaaccctacaaatgtgaggaatgtggcaaagcctttaaccaatcctcaacccttattaaacataagaaaattcatattgaagagaaacccttcaaatgtgaagaatgtggcaaagcctttagtttattctcaatccttagtaaacataagataattcatactggagacaaaccttacaaatgtgatgaatgtcacaaagcctttaactggtttgcaacccttactaaccataagagaattcatactggagagaaacccttcaaatgtgaagaatgtggcaaagactttaaccagttttcaaaccttactaaacataagaaaattcatactggagagaaaccctacaaatgtgaagaatgtggcaaagcttttaaccagtttgcaaaccttactagacataagaaaattcatactggagagaaatcctacaaatgtgaagaatgcggcaaagcttttatacagtcctcaaaccttactgaacatatgagaattcatactggagagaaaccctacaaatgtgaagaatgtggcaaagcttttaatgggtgctccagccttactcgacataagagaattcacactagagagaatacctacaaatgtgaagaatgtggcaaaggctttactttattttcaacccttactaaccataaagtaattcatactggagagaaatcctacaaatgtgatgaatgtggcaatgtttttaactggcctgcaactcttgctaatcataagagaattcatgctagagagaaaccctacaaatgtgaagaatgtggcaaagcttttaaccggtcctcacaccttactagacataagaaaattcatactggtgagaaactctacaaacctgaaaaatgtgacaataattttgataacacctaaaacttttctaaacataaaagacaccatcctgttgagaaaccctaaaaatgtgaagaatttgacaaagccttccaatgattgttacacttgcttgtaggtaagataatttatattggagaaaactttataagtgtaaagaatgtgacaaaacttaaccaatactcacatcttattgcacaggaaagcatttttacttgagaaagattgtacaagtataaagaatgtgaaaaagtcattgatatcttttcacatcttactcaacaccagagtttatacttattaaaagcattataaatgcaattactgtcaaaagaaatttcagaaaacataacactttaaagtgaagaagcgtgtttattttgaagacaaacataacaaatataaggagcataggagggttgtagtacctttacttgtattacaaatcttattgtacgcattttgtactagagaaaaacactgaagcagttgctcaaactttgttcaacatcagggaatttatattggagaaaaatcctgcaaatgtaatgaatttggaaaaacattttttttcaaaaactacggcgtagaaaacatgaatttatattgaaatgtgtttttgcagatgcagtaagtatgaaaaatatttaatccaaaattgagtctatgtaaatattaaataatttacagtagaaataactaaggcactgacactttagacattacactaaaacagagtgttgagtataaaaaaatctataagttgttagattatttgtaaataactttaaaaggagtagaagattctttggagagttataattacattgaaagtatactttttttcttgaaaaaattatggcttatttgaaaagtaaataatgatgaaattcaactctcaaattactttatttcattcctattgtattcacatgtgaaagcatgtgataaattgttgctgtgtcagatataggagagattcttttttattagatgggcattatttatggttttttctgtggaagagtatgggcattaaaatgtaaggtttatgatgaaaatctaagtggagaggccctgttagtttacttttcatattgagtgatgcatgaggtaggtgtttggagtaatattctgcatcatagagaaaagcatttttaattttactttaaattaaatgtaattaaattactagtgaatcattttactaattgtacttttatgctataaatgcagtacatttgaaaatttttagattatgtataagcttaattttataattaaacatttctttaaca

SEQ ID NO: 5659 - DNA, 1171 bp, Homo sapiens
agctcgcccaccgcccgccccagcagtggctgcaccatgcacgtgaacggcaaagtggcgctggtgaccggcgcggctcagggcataggcagagcctttgcagaggcgctgctgcttaagggcgccaaggtagcgctggtggattggaatcttgaagcaggtgtacagtgtaaagctgccctggatgagcagtttgaacctcagaagactctgttcatccagtgcgatgtggctgaccagcaacaactgagagacacttttagaaaagttgtagaccactttggaagactggacattttggtcaataatgctggagtgaataatgagaaaaactgggaaaaaactctgcaaattaatttggtttctgttatcagtggaacctatcttggtttggattacatgagtaagcaaaatggaggtgaaggcggcatcattatcaatatgtcatctttagcaggactcatgcccgttgcacagcagccggtttattgtgcttcaaagcatggcatagttggattcacacgctcagcagcgcccaccattgattgccaatggattgataacactcattgaagatgatgctttaaatggtgctattatgaagatcacaacttctaagggaattcattttcaagactatgatacaactccatttcaagcaaaaacccaatgaacagcttatgtgttagccatagctgaaaataagcacaaatagcttatattcagatcctatcttcatttgaatatagcttttaaatgaaatgttacagtttgaagttttccttcatgcacttggtgataaacgttttctaaatttttagttaagtatatggataaaaagttatgaactattaaaaatgtgatgtggaccaaaggctaggttgtaatcttgatagtctaaaaaatgatcaaaacaaatgattttcaaggaatattcaatattctgcctttcagaaagtgtatttatatctgtgcttcataaatattaatgttcttcagaacatcattttaaaggagatacttgaattgttatttaaatcaaaccagatgtaaaacactcacatacaagttcatactttaaaagaggaaagctacttaacaatgacaaatatttcacaataataatttttacttatataccatctttcaactgaacatttcagttcttcca

SEQ ID NO: 5660 - DNA, 4711 bp, Homo sapiens
cgagactcagccagaggagtacggattaagtggccgaagaaagaggagtgaggcaggggagcgaggcggacgctccgagcgcatcggactcacctgggccggcggcgaccggcgagtacgagtggactcttgccctccgcagcatgcgccccgcctgctaagtcgccgccgtctcgccctcacctagcaccgccaatcccgcctggatggagtcccctctgggttcccattggctcctgtgagtgcttgggtgtcgggagcctgtttttggcgaggggaaccaacttttgaagttcgcccagaagactgcgttccagccccagttccccggcagcgggacccggcgaagacgcgaccgcggcgcgagtcaccatgggaagcaaaggtgtctaccagtaccactggcaaagccacaatgtcaagcacagtggtgtggacgacatggtgctactgtccaagatcacagagaactccatcgtggagaatctgaagaagagatacatggatgactacatttttacatatataggatctgtattaatctcagtcaaccctttcaagcagatgccatattttggggaaaaggaaattgaaatgtaccaaggagcggcacagtatgaaaacccaccacatatctatgcccttgcagataatatgtacagaaacatgatcattgacagagagaaccagtgcgtcattatcagtggtgaaagtggtgctggaaaaacagtggctgccaaatatatcatgagctacatctccagagtgtctggaggagggaccaaagtccagcacgtgaaggacattatcctgcagtccaacccgctgctggaggccttcgggaacgccaagaccgtccggaacaacaactccagccgatttggaaaatactttgaaatccagttcagtccaggtggggaaccagatggtggaaagatctccaacttccttctggaaaaatctagggtggtgatgaggaacccaggagagcggagttttcacatattttaccagctcatcgagggcgcctctgcagagcagaaacacagccttggcatcaccagcatggactattattactacctgagcctctcgggctcatacaaggttgatgacattgacgacaggcgggagtttcaggaaactctgcacgccatgaatgtgattgggatctttgcagaagagcaaacgctggtgttgcagatagtggcgggtattctccacctgggaaacatcagcttcaaagaagttggcaactacgcggctgtggagagtgaagagtttttagcttttcctgcatatctgctagggataaaccaggaccggttgaaagaaaagctaacaagccggcagatggatagcaagtggggaggcaaatccgaatccatccacgtgaccctcaacgtagagcaggcctgttacacccgggatgcgctcgccaaggccctgcacgcccgggtctttgatttcttggtagattccatcaataaagccatggagaaagaccatgaagaatacaacattggcgtcctagacatctatggctttgaaatattccagaaaaatggctttgaacagttttgtatcaattttgttaatgaaaaactgcagcagatttttattgaactgacattaaaggcagaacaggaagaatatgttcaagagggaataagatggacacccattgagtactttaataataaaatcgtatgtgacctcatagagaacaaagtgaaccctcctggcatcatgagcatcctggatgacgtgtgcgccacgatgcatgcggtgggtgagggggcagatcagacgctgctccagaaacttcagatgcagattgggagtcatgagcacttcaacagttggaaccaaggcttcatcattcatcattatgctgggaaggtatcctatgacatggatggcttttgtgaaaggaaccgggatgtgctttttatggatctcatcgagcttatgcagagcagcgagctgcctttcataaagtctttatttccggaaaatctgcaggctgacaagaaagggcgcccaactactgccggaagcaaaataaagaaacaagccaatgaccttgtgagcaccctgatgaaatgtacgccccactacattcgctgcatcaagccaaacgaaaccaagaagcccagagactgggaggaaagcagggtaaagcatcaagtcgaatatttgggtctgaaagagaacattcgagtgagaagagctggctatgcctatcggcgcatcttccaaaaattcctacagaggtatgccattctgaccaaagccacctggccttcttggcagggagaggagaagcaaggcgtcctgcacctgctgcagtcggtcaacatggacagcgaccagttccagctggggaggagtaaagtgttcatcaaagcccccgagtctctatttcttttagaagagatgagagagagaaagtatgatgggtatgctcgagtgatacagaaatcatggaggaaattcgtggcccggaagaaatacgttcaaatgagagaagaagcctcagacctcttattgaacaagaaggagagaaggagaaacagtattaacaggaactttataggggattatattgggatggaagagcacccagaactccagcagttcgtgggcaagagggagaagattgatttcgcagacacagtcaccaagtatgacaggaggttcaagggtgtaaagcgagacctgctccttaccccaaagtgcttgtacttaatcggacgagaaaaagtcaaacagggcccagacaagggcctggtgaaagaagtcctgaagcggaaaatcgagatagaacggatcttgtctgtgtccctcagtactatgcaggatgacatttttattctccatgagcaagagtatgacagtttgcttgaatctgtcttcaaaactgaattcctaagcctcttagcaaagcgttacgaggagaagacccagaagcaactacctctgaaattcagcaatacgcttgaactgaagttgaaaaaggaaaactggggcccctggagtgcagggggctcccggcaagtgcagttccaccaagggtttggggacctggctgtcctcaagcccagtaacaaagtgctgcaggtcagcatcggacctggactgcccaagaactcccgtcctaccagaaggaacactacccaaaatacaggttattccagtgggactcaaaatgccaactacccagtgagagctgcccctcctcccccaggataccatcagaacggagtcatcagaaaccagtatgtgccatatccccatgctcctggaagccagaggtccaatcagaaaagcctgtacacctccatggcccgcccgcccttgcctcggcagcagtctaccagttcagaccgagtgtcacagacgccagagagcctggatttcctcaaggtcccggaccagggagctgcaggggtcaggagacaaacaaccagtcggcctcccccagcagggggcagacccaagccccagcccaagcccaagcctcaggtgccacagtgcaaggctttgtatgcctatgacgctcaggacacagacgaactcagctttaatgccaatgacattattgatattatcaaagaagatccttctggctggtggacgggtcgactacgaggcaagcagggcctgttccccaacaactatgtgaccaagatctgaggtgcccgtgactctgacacatggggcagaggagctccaggcacagaccaggggaggggatatttaggggctccccttacaatccacaatgagcaattgcttctccaaggcctggagctattctggtaccttccccatggaggacactgaaaaggctgggttggggacagggagtatcactccataagtgatcctaaaaggtagcctcttcataggaacccaggaggacaaaaccaccatgcattaagatttatttattgtatttaaacctggtgagaggacaagtgaggtctgctcagaccttgtaggcttctatcaaaacagcaccctgcttgctcaccaggcctagagaatggctgtaggtggccgctgacaagtgcctttagttgaagagcacatttctttcatctctcttgtccatacctgatagacacattcctctctgccaccttccttcagggaggacccgccctctgcagactgggcttagcgtgagcaggcacttcccatgtacgtgccaagggtaagctggcctgctgagcccagggcgacagaggggcactggtttacactttgccgggaccatcagggccgccaagcaggtcaggggctgggggctgggggctgggctgctggctttgctttctctgggtcttcaattagaatgtggctggcccatattggtttgtgtttaaatgctgtacttactacaagaaggatcttttttcaagctgtacatttataaaaacagatcatatactgtatatataaaaatcttgagatggtagaaacatgtatgaatgtactaagtagtattccactgtactcattcataaggtaggttttcttacaaaactcacaccaggtacttaaagatgtgctctgcttttttccaactacggagtgtcactgctttctaggtcagtccctgcagactcttctcaactctttccctataggaaacttactccgcgtcctgcccccacctcctaaataaataaaggaatcggcg

SEQ ID NO: 5661 - DNA, 4444 bp, Homo sapiens
agtccagacaaccggcttccagctggggctggggaaagggggttggaggggtgcgccccccccccacgccccttaggggtgggggacgcgggctcagagttccagggacccaggaatgcccccccgccagccccctcggcaggcggggggagggctcagccgggagtttggcaaactcctccccgcgttgagtcattcgcctctgggaggtttaggaagcggctccgggtcggtggccccaggacagggaagagcgggcgctatggggagccggacgccagagtcccctctccacgccgtgcagctgcgctggggcccccggcgccgacccccgctgctgccgctgctgttgctgctgctgccgccgccacccagggtcgggggcttcaacttagacgcggaggccccagcagtactctcggggcccccgggctccttcttcggattctcagtggagttttaccggccgggaacagacggggtcagtgtgctggtgggagcacccaaggctaataccagccagccaggagtgctgcagggtggtgctgtctacctctgtccttggggtgccagccccacacagtgcacccccattgaatttgacagcaaaggctctcggctcctggagtcctcactgtccagctcagagggagaggagcctgtggagtacaagtccttgcagtggttcggggcaacagttcgagcccatggctcctccatcttggcatgcgctccactgtacagctggcgcacagagaaggagccactgagcgaccccgtgggcacctgctacctctccacagataacttcacccgaattctggagtatgcaccctgccgctcagatttcagctgggcagcaggacagggttactgccaaggaggcttcagtgccgagttcaccaagactggccgtgtggttttaggtggaccaggaagctatttctggcaaggccagatcctgtctgccactcaggagcagattgcagaatcttattaccccgagtacctgatcaacctggttcaggggcagctgcagactcgccaggccagttccatctatgatgacagctacctaggatactctgtggctgttggtgaattcagtggtgatgacacagaagactttgttgctggtgtgcccaaagggaacctcacttacggctatgtcaccatccttaatggctcagacattcgatccctctacaacttctcaggggaacagatggcctcctactttggctatgcagtggccgccacagacgtcaatggggatgggctggatgacttgctggtgggggcacccctgctcatggatcggacccctgacgggcggcctcaggaggtgggcagggtctacgtctacctgcagcacccagccggcatagagcccacgcccacccttaccctcactggccatgatgagtttggccgatttggcagctccttgacccccctgggggacctggaccaggatggctacaatgatgtggccatcggggctccctttggtggggagacccagcagggagtagtgtttgtatttcctgggggcccaggagggctgggctctaagccttcccaggttctgcagcccctgtgggcagccagccacaccccagacttctttggctctgcccttcgaggaggccgagacctggatggcaatggatatcctgatctgattgtggggtcctttggtgtggacaaggctgtggtatacaggggccgccccatcgtgtccgctagtgcctccctcaccatcttccccgccatgttcaacccagaggagcggagctgcagcttagaggggaaccctgtggcctgcatcaaccttagcttctgcctcaatgcttctggaaaacacgttgctgactccattggtttcacagtggaacttcagctggactggcagaagcagaagggaggggtacggcgggcactgttcctggcctccaggcaggcaaccctgacccagaccctgctcatccagaatggggctcgagaggattgcagagagatgaagatctacctcaggaacgagtcagaatttcgagacaaactctcgccgattcacatcgctctcaacttctccttggacccccaagccccagtggacagccacggcctcaggccagccctacattatcagagcaagagccggatagaggacaaggctcagatcttgctggactgtggagaagacaacatctgtgtgcctgacctgcagctggaagtgtttggggagcagaaccatgtgtacctgggtgacaagaatgccctgaacctcactttccatgcccagaatgtgggtgagggtggcgcctatgaggctgagcttcgggtcaccgcccctccagaggctgagtactcaggactcgtcagacacccagggaacttctccagcctgagctgtgactactttgccgtgaaccagagccgcctgctggtgtgtgacctgggcaaccccatgaaggcaggagccagtctgtggggtggccttcggtttacagtccctcatctccgggacactaagaaaaccatccagtttgacttccagatcctcagcaagaatctcaacaactcgcaaagcgacgtggtttcctttcggctctccgtggaggctcaggcccaggtcaccctgaacggtgtctccaagcctgaggcagtgctattcccagtaagcgactggcatccccgagaccagcctcagaaggaggaggacctgggacctgctgtccaccatgtctatgagctcatcaaccaaggccccagctccattagccagggtgtgctggaactcagctgtccccaggctctggaaggtcagcagctcctatatgtgaccagagttacgggactcaactgcaccaccaatcaccccattaacccaaagggcctggagttggatcccgagggttccctgcaccaccagcaaaaacgggaagctccaagccgcagctctgcttcctcgggacctcagatcctgaaatgcccggaggctgagtgtttcaggctgcgctgtgagctcgggcccctgcaccaacaagagagccaaagtctgcagttgcatttccgagtctgggccaagactttcttgcagcgggagcaccagccatttagcctgcagtgtgaggctgtgtacaaagccctgaagatgccctaccgaatcctgcctcggcagctgccccaaaaagagcgtcaggtggccacagctgtgcaatggaccaaggcagaaggcagctatggcgtcccactgtggatcatcatcctagccatcctgtttggcctcctgctcctaggtctactcatctacatcctctacaagcttggattcttcaaacgctccctcccatatggcaccgccatggaaaaagctcagctcaagcctccagccacctctgatgcctgagtcctcccaatttcagactcccattcctgaagaaccagtccccccaccctcattctactgaaaaggaggggtctgggtacttcttgaaggtgctgacggccagggagaagctcctctccccagcccagagacatacttgaagggccagagccaggggggtgaggagctggggatccctcccccccatgcactgtgaaggacccttgtttacacataccctcttcatggatgggggaactcagatccagggacagaggccccagcctccctgaagcctttgcattttggagagtttcctgaaacaacttggaaagataactaggaaatccattcacagttctttgggccagacatgccacaaggacttcctgtccagctccaacctgcaaagatctgtcctcagccttgccagagatccaaaagaagcccccagctaagaacctggaacttggggagttaagacctggcagctctggacagccccaccctggtgggccaacaaagaacactaactatgcatggtgccccaggaccagctcaggacagatgccacacaaggatagatgctggcccagggcccagagcccagctccaaggggaatcagaactcaaatggggccagatccagcctggggtctggagttgatctggaacccagactcagacattggcacctaatccaggcagatccaggactatatttgggcctgctccagacctgatcctggaggcccagttcaccctgatttaggagaagccaggaatttcccaggaccctgaaggggccatgatggcaacagatctggaacctcagcctggccagacacaggccctccctgttccccagagaaaggggagcccactgtcctgggcctgcagaatttgggttctgcctgccagctgcactgatgctgcccctcatctctctgcccaacccttccctcaccttggcaccagacacccaggacttatttaaactctgttgcaagtgcaataaatctgacccagtgcccccactgaccagaactagaa

SEQ ID NO: 5662 - DNA, 1169 bp, Homo sapiens
gggaacaaagcaagaaaaatcagagcaatttgggaagtaaacagaaactggaaagggagagggaaagaagagtggggaggacccaggttgggggggccctctccagtcccacccagtttagggaatgcccctgccctctcccccaccccccttcacctggctcttaaagggcccggcccctggccggcggctacttaagacagaggggcggcggcgggcagcagctgcgctgcgactgctctggaaggagaggacggggcacaaaccctgaccatgaccccccacaggctgctgccaccgctgctgctgctgctagctctgctgctcgctgccagcccaggaggcgccttggcgcggtgcccaggctgcgggcaaggggtgcaggcgggttgtccagggggctgcgtggaggaggaggatggggggtcgccagccgagggctgcgcggaagctgagggctgtctcaggagggaggggcaggagtgcggggtctacacccctaactgcgccccaggactgcagtgccatccgcccaaggacgacgaggcgcctttgcgggcgctgctgctcggccgaggccgctgccttccggcccgcgcgcctgctgttgcagaggagaatcctaaggagagtaaaccccaagcaggcactgcccgcccacaggatgtgaaccgcagagaccaacagaggaatccaggcacctctaccacgccctcccagcccaattctgcgggtgtccaagacactgagatgggcccatgccgtagacatctggactcagtgctgcagcaactccagactgaggtctaccgaggggctcaaacactctacgtgcccaattgtgaccatcgaggcttctaccggaagcggcagtgccgctcctcccaggggcagcgccgaggtccctgctggtgtgtggatcggatgggcaagtccctgccagggtctccagatggcaatggaagctcctcctgccccactgggagtagcggctaaagctgggggatagaggggctgcagggccactggaaggaacatggagctgtcatcactcaacaaaaaaccgaggccctcaatccaccttcaggccccgccccatgggcccctcaccgctggttggaaagagtgttggtgttggctggggtgtcaataaagctgtgcttggggtc

SEQ ID NO: 5663 - DNA, 1584 bp, Homo sapiens
ggctctgcagaggcagcggttggaggcgcggtgggtgtctgcgggggtctcgcggggcggctgcggtgtttcaccgggaaaggctcgaggagagcgcggctcacgagagataacccagctgtgctccctggaaccttcaatttcaaggcctccctgcctctactaggcgccttagctcactatggggaaccacttgactgagatggcgcccactgcctcctccttcttgccccacttccaagccctgcatgtcgtggtcattgggctggactctgctggaaagacctccctcctttaccgcctcaagttcaaggagtttgtccagagtgtccccaccaaaggcttcaacaccgagaagatccgggtgcccctcgggggatcgcgtggcatcaccttccaagtgtgggacgtcggggggcaggagaagctgcgaccactgtggcgctcttatacccgccggacagacggtctagtgtttgtggtggacgctgcggaggctgagcggctggaggaagccaaggtggagttgcaccgaatcagccgggcctcggacaaccagggcgtgccagtgctggtgctggccaacaagcaggaccagcccggggcactgagcgctgctgaggtggagaagaggctggcagtccgagagctagcagccgccactctcactcatgtgcaaggctgcagcgctgtggacggtctgggcctgcagcagggccttgagcgcctctatgagatgatcctcaagaggaagaaggcagctcggggtggcaagaagagacggtgacccaagccccccctccctttcctcccacctagtaggggtctgcacacttggacagcagggtgggaccagcctgtgacctctcagtcagactggggtgcaggacctgtccacctcaatgaaggagagaggagcatggggtgtcccgttttggtgccacactggggtggggatgggagatgggatgtctttgcatatctctctcatcctctctggagaagtgggcgctgcaggactgtggagacgtaaatgtaaactgtgactctacctcgaccctgtttcttatttttcttctctggctaaaaatttttaattggatgtgtttgggggcggggggatggaagtgacttggagaatgtgtttgggatgaaataactatctccccttcctctgtcccccaactggggagtctccccaggctgcttttctaggaataccagtcacatagtttttatttttgtgtctgtgaaagtgccaagaacccctccccacatttgtagatccatgaccctttttataagctgtgtgtgtcctctgtattattgttattaactattttttagcatttgcctgtaagttattaaagactgataactgtagctcttaccttggtctggggcattttcctctccttatcttgccccagagacaattcaagatttctatatggggttgtggcgcagggggagggagatttatcttgaagctgaatttgcaaagcaagcacttataaaaattagattgtgtgttacgggatggcttgtgaaaattataggggggagtggaaaacccctcaagct

SEQ ID NO: 5664 - DNA, 5415 bp, Homo sapiens
acagaaggagaacttgaagcagaatggctgcaagatgtgggtttatcaactctgatctcaggtgatgaagaggaagatggcaaagccttgctctccacattgactcgaacccaagcagctgccgtgcaaaagagataccatacctatacccaaaccatgaggaaaaaggataagcaatctatcagggatgtcagagacatttttggagtcagtgaatctcctcctcgtgatacctgtggcaaccacactaatcagctggatggcaccaaggaagaaagagagcttccaagagttatcaagacaagtggttccatgccagatgatgcttctctcaacagtactaccctgtctgacgcatcccaggataaagaagggagttttgcggttcccaggagtgactctgtggctatacttgagaccattccagttctaccagttcattccaatggatcaccggagcctggacagccagttcagaatgcgataagtgatgatgattttctggaaaagaacattccaccagaggctgaagagctgtcatttgaagtgtcttattcagaaatggttacggaggctctaaaaagaaataaacttaagaaatcagagattaagaaagaagactatgttttaactaaatttaatgttcagaaaaccagatttggcttaactgaagcaggagatctgtctgctgaagacatgaagaaaatccgccatctctctctgattgaattgactgccttttttgatgcctttggaattcaactgaaaaggaacaaaacagagaaagtaaaaggacgagacaatgggatttttggagttccacttacagtcctcctggacggtgaccgaaagaaagaccctggagtgaaagttcccctggtattacaaaaattttttgagaaagttgaggaatcaggtctggaatctgaaggaatttttcgactttcaggatgtactgctaaagtcaagcaataccgtgaagaacttgatgccaagtttaatgctgataaatttaaatgggacaaaatgtgccatagagaagctgcagtaatgttgaaagcgtttttcagagaactacccacctctctcttccctgtggaatatatacctgccttcatcagtctaatggaaagagggcctcacgtcaaagtacagtttcaagccttacacctcatggtcatggcgctgcctgatgccaacagagatgcagctcaggccctcatgacattcttcaataaagtgattgccaatgaatcaaaaaaccgaatgagtctgtggaacatttctacagtgatggcaccaaaccttttcttcagtagaagcaaacactctgattatgaagaattactgttagcaaacactgcggcccacatcatccgcctaatgcttaagtaccagaagattttgtggaaggttccatctttcttaatcactcaagtaagaagaatgaatgaagccacgatgctattgaagaagcagctcccaagtgtcaggaagctgctcaggaggaagaccctcgagcgggagactgcaagccccaagacttcaaaggtactgcaaaaatcaccctcggcaagacgaatgtctgacgtgccggaaggagtcatacgggtccatgctccacttctctccaaggtgtccatggccattcaactcaacaatcaaaccaaagccaaagacatattggcaaaatttcaatatgaaaacagtcatggttcatcagaatgtattaagattcagaaccaaaggttatatgaaattggaggaaatataggagagcattgcttggatccagatgcttatatattggatgtatatcgtataaatcctcaagcagaatgggtgattaaaccccaacaaagttcttaaaatatcctcgagagagctgctatcatgtattatatgccaaaaagatcctacattttggtagggaaaaaacaacactgtgtttgacgtatttgttcctacagcattctcagtatttctggccctcagcagtgggcattgtaagcatgaactatggaagaggcgccggttcaccaattcaactgaagctttctcatgacttttttttttataaaagtaaaggaaagatgatgtggtccttccagaagaaagaccaatctagaatatggaactctaatcacttctagtatttcaacttcctagcagaaatgaacttggccctagacctagggataagcaatgttctttatgtagccaatgctacgaaacaaaagaggtgaaagagacccttttttatacttaatgtacatatattgactttttgagcaagaatgccagaaatagccttcatttctaccctgcaaaataatccagatctgctttctaaaatgaatcagtttctaaagtgaaacatgcaatatttatgctctgactgactcctgaattggaagaggaagaacttctgtttacagaaaactgtattgttatatatgtcaggctgtgtattgtgactatcagcattctggtgcaaatgaacttttctccatcatcgactgtggaaaattgatacttttaaagcatattcttctatgagcacaggtcctcctagtgaagcttagtttgacaaagggtgtcatatgctttcctaacctgatttgtagttaacattcacagagcctacattttctcattacggttatgatgctcagtatctttccaagtgccaggcacgggcttccttttctgatcaaacataccattttttatatttcacaactatagacagtcacttctgcagtcccaatttaaaaatgcagaactgctttatccaagaatgctgaaaaatactgttctatccaggtttcctaaactataaaagcagattttgcttttgtttgttaatcataggcatggccgagcattgtggattagcctgaggcttaaaatcagatgcatgtctggtaagatgaccactgtctcactatcaagagcctgcagagccattttccagacctgtgattgcccagaacacatagtccccacgtttctaatttggagcaaatctaaaaggtgctgagggattggacagctctgactttcctcgagactatggatatagtccttctcagattagctggaaatggggacagagttctcatttatcccagatatatacattggcttttttggaatctatagattgagattttgatgaatttatattggttttaatgagacccaaatgactctctcttaacaattcaagcagtagacaaagttgctcacaaatacagaaaacatctttttgtctacttcgcaagtctcaaaacgtgataatatttaagcccatttgtagaagaaatcttgtatatactattattacaccttgatatctatacaaaacatcacttgtattaaaatatatagataactttctggcatttagaattttgttccattcatttaatttgttcatctgagaatttttttttttgcctgaaaacccattaaaagaaaacgtgccttctgtataagtttatgtttattcctacattttattcatttttaatgtatgggtaattggtggcacatgactttacataatgactttctagactctgaaaaaaatgcttttatcatttttgcaattcagacaagggtaaacattttactttatgtaattgccacatcccaagatgtaaaacggcagtaatttatgaccacgtatggaagaaattcttcaaatagctaccttacatttctgcgtatatatgaaaactgaatgatatttctcagtgtatttccttgcatttgaatggttcaattctgttgtgtttatgtagaaaattcacaaatctgttcatttaattttttaatttgagaatttttatttcttttgactgaaaacacattagaacctatgagtaaattctgaaggttttaagatttacttcagcttgtcaccagtttcaaataaatccctaataggtaacaagtaaaatacaaattcttgtctactttcatgtggttttaaatggcagggacttcgctgagtcagtaagtataatcactctagtttattcaaggatgtgtggcaactttcaacttccatacgtatatatgtatgtatggaaggccatgtcaatactagtatcattggatataactttgattcttaatcagagggcaaattcattagagaagaatttttagtagatacacagactaatatttgtgtggaggttcttttgaccaattttattcctaagaataaacaaacccctacagttaaaatgcaaagatgcctgtcatctaagtattgaaagaatttttgccttatcaagagttgttttttaaaaatttaataaattcataaaaaagactcatatctttgcaaacaaaagaagggcagatactgggcttctacatgctatccttaagagcttctccccctcacccattcctagtgctcttggtatacacttgggaaaataatgtcctccaggagaaagtgttagagggaactaacattttaggaatgcttattcagaaaaaaatcctagagttgattcattgttttcctccatcctgcaaaagaagatccctttgttaagcagctcacttggaaatatgattcttggagtcaatgatctctaaacaaactggattatcaactatttacaacgtctatacagtataaactacctcacttgcctttcttgggaaaaaaaaaatgaatggactttaacaattgttgttacaaactgtgcctgaatcttattatttaaatcacttcagttagctttcagtgtatgtttaataatatacatttaatgatgaaaaatattttcagcaaagctttaaaaccagaaatactgtgtaactgtgatctatgtggtatactctgagagaattctgtgtcctgctcattgtcttgagtttctaaccatgtgcagatgcaagcgttcaggagtaggaattaatgtccatcttttctttcaggcattttcatctgctgtccacgtatttcacttgactgaaagctcatatgagttaaaatgtcccttcttcctagcgagcatatttcaactgttcttcataaatgtttatgtgccttaaaagactttatgttaaaggattaaatagtttctctgacaggcagtttttaactgttttccacaaataaaaataatatgtcatgggattaaaatgtttgttttcaagcatttttaacagttttacacacttacatacaccttaattaaaaatttttttctgtcagacatttaccaactattttctaaaactaatttgacaaatcatgacactagaaaacgccaatgttttatgtctttgcccatctcaaaagctaatattgattcttctgttccatcagctttcattgttaagtagaatatgtatgttgcattttatccataagaaataaag

SEQ ID NO: 5665 - DNA, 2333 bp, Homo sapiens; identical to SEQ ID NO: 993

SEQ ID NO: 5666 - DNA, 3786 bp, Homo sapiens
agatcgcaagtcctgcaaacttacgtggcatttctgaagtcatcagaggaggtagagatgcagtttcagagcttaaaagaattttatgaaaccgaaatccctcagaaggagcaggatgatgctaaagccaagcattgttctgactcggctgagaagcagtggcagctatttttaaagaagagttttataacacaagatctagggcttgagttccttaatttaataaatatggcaaaagagaacgagatattagatgtgaaaaatgaagtgtacctcatgaagaacaccatggaaaaccagaaagcagaacgggaagaacttagcctccttcggctggcatggcagcttaaagccacggaaagcaagcctggaaaacagcagtgggcggcattcaaagagcaacttaaaaagacttctcacaacttaaaacttcttcaggaagcacttatgcctgtgtctgcacttgacctcggagggagcctccagttcattttagatctacgacaaaaatggaatgacatgaagcctcagttccagcaattgaatgatgaggttcagtacattatgaaagaatcagaggagttaactggcagaggagcccctgtaaaagaaaagtctcaacaactgaaggaccttattcacttccatcaaaaacagaaagagagaatccaggattacgaggatatcctgtacaaggtggtccagttccatcaagtcaaggaagagctgggacgtctcatcaaatcaagagagctggagtttgtagagcagccgaaggaactgggtgatgcccatgatgtgcagattcacctccggtgctctcaggaaaagcaagcccgtgtagaccatctccacagactggccctttccttaggagtcgacatcatctcatcagtgcagcggcctcactgctctaatgtttctgcaaagaacctacagcagcagctggagctccttgaggaggacagcatgaagtggcgtgccaaagctgaggagtatggacggaccctgtcccgtagtgtggagtactgcgccatgagagacgagataaatgagctcaaagactcattcaaagatatcaaaaagaaattcaataatttgaagtttaattacactaagaaaaatgaaaaatctcggaatctgaaggcgcttaaatatcaaattcagcaagttgatatgtatgctgaaaaaatgcaggctttgaaaaggaaaatggaaaaagttagtaataaaacctctgattctttcttaaattatccaagtgataaagttaatgtccttttggaagtcatgaaggatttgcaaaaacatgtggatgactttgacaaagttgtgacagattacaagaagaatttggacctgactgagcatttccaggaggtgatagaagagtgtcatttttggtacgaagatgcaagtgccacagttgtaagagttggaaaatattccacagagtgcaagacaaaggaagctgtgaaaattctccaccagcagtttaataagtttattgcaccctcagtgccgcagcaagaagaaaggattcaggaggccactgaccttgctcagcacttatatggtttggaagaaggacagaaatatattgagaaaatagtgacaaaacacaaagaggttcttgaatctgtgactgaattatgtgagtccctcacagagctcgaagaaaaactgaagcagggagatgttttaaagatgaatccgaatttggaagacttccattatgattacattgacttgctaaaggaaccagcaaaaaataagcagacaatattcaatgaagaaaggaataaggggcaggtgcaggtggcagatcttttgggcatcaatggaacaggggaagagcgactaccacaagacctgaaggtgtccactgacaaggagggtggcgtccaggacctgctcctgcctgaagacatgctctcaggggaagaatatgagtgtgtctcacctgatgacatctccttgcctcctctcccaggaagccctgagtcccctcttgcaccatctgacatggaggtggaagagcctgtcagctcctccctcagccttcacataagcagctatggggtgcaggctgggaccagcagcccaggggatgcccaggaatctgttcttccaccacctgttgcctttgcggatgcatgcaatgataagagagaaacattttcaagtcattttgagaggccttacctccagttcaaagctgagcccccactaacctccagaggattcgtggaaaagagtactgccttacacagaatcagtgctgaacatccagagagcatgatgagtgaagtgcatgagagagctttacagcagcaccctcaggctcagggtggtttgctagaaacacgggagaaaatgcatgctgataataacttcactaaaacccaagataggctgcatgcttcctctgatgcattctcgggcctcaggtttcaatcaggcaccagcaggggctatcagaggcaaatggttcctcgagaagagattaaaagcacatcagcaaagagcagcgtggtcagcctagctgaccaggcacctaatttctccaggctcctgtctaatgtaactgtcatggaaggttctccagtgactttggaagttgaagtaacaggatttccagagcctacactgacatggtgggtagcctataatgacaagccataaatggaaacaaattcaatcacagagaaaaatcattctgtgagcactaactgaaaggtttagggctagctgattaatattctatgacactgcaactctgcatgattcaatctcacatcagacccctctcattttagtagcagcatagttaatacctttaagaaaaataaaaggtaaccatataaagtactaataatttaacaaatttccaaagcactgtaggttggttgtgcttgttttcttctgtgtttaacattccacatttctaaagattgtgggttgaaattattttttattgtctatttccatataagcatggcatctgcttgctttaactacctttatgcaattgaaaatataagaatttgtttttatttccctttactctcatttacctctttcatctttttcctctttccaacagagtcacacgtgtcatctttgtaacattttgttttactaggatttctttttacaaattttttcaatgtgagaggtggaatataaatatttctgtcacagttcctccaggtgacaggcaataaactcatttttgaaaggtagtataataactgagctgtaaacaatatgatttcactctggagacatcattattttttagcctctttttttcagtaaaagcaaactgtagaatactggttttggatcacctactattggtaacaaaagcagttctttctcaatatgtgggttacttttaaacatttagaaaattctcatccttaagtaaatttatttcaggacaaagttacaaatctgcaaaagccagtttatacttataaactaagattaagtaaaatagcatttattgatcacaatgtttcagtagatattaaatgatcagtttcagttattgtgtgtgcccattgatggtacttgaaatatgaaccagttatctaaggaacttatgagaaaactttggtttctcaaattatttaaaaaactgcacttgtgctatattagtgcagtcacttttgctttttgttttattgtctttactgttgcatgttttttacaaatcaagagtgtcatatttatgaattttaaagatatttaattcattattaaatctcagttcactcc

SEQ ID NO: 5667 - DNA, 7943 bp, Homo sapiens
agttgtacgttcgaaacctgtcgccgtcacttgcgcgtttggcattatccattgtcaccgcggaggaacgagcgctcgagatatcatcagtgcccgcaaatctccgcgccaaggcgctgagctactcctttccgaggtgcgcctctggtcctccgtccctggtgcccagcagcggcgaggcggcatctccgctcccgccgccgtgtccaccgagccctgggatcagggtggcagttctcaacgatgggcaggagggacctcggcggcgacccctaaaacaataccatgccccgggatccccgctgctgccgcgccagcgtcttccctttccacctccctgaccctgtcggattcggatgagcccattgcaaggagaagacgcagccgtcagattgcagattgagcttaaccaagaagttcgtaggctaatcaaggctggcttgacctacaaaagaagaagagagttctgcctgcccacttgggcttgtgttgacacggctgataacttgccatcacctgttgccagtgtggaaaaattctccctgttgaattttttgcacatggaggacagcagcaaagagggcaacacaggctgataagaccagagacagcagggagattattttaccatacgccctcaggacgttccctctagctggagttctggacttcaacagaaccccatccagtcattttgattttgctgtttattttttttttctttttctttttcccaccacattgtattttatttccgtacttcagaaatgggcctacagaccacaaagtggcccagccatggggcttttttcctgaagtcttggcttatcatttccctggggctctactcacaggtgtccaaactcctggcctgccctagtgtgtgccgctgcgacaggaactttgtctactgtaatgagcgaagcttgacctcagtgcctcttgggatcccggagggcgtaactgtactctacctccacaacaaccaaattaataatgctggatttcctgcagaactgcacaatgtacagtcggtgcacacggtctacctgtatggcaaccaactggacgaattccccatgaaccttcccaagaatgtcagagttctccatttgcaggaaaacaatattcagaccatttcacgggctgctcttgcccagctcttgaagcttgaagagctgcacctggatgacaactccatatccacagtgggggtggaagacggggccttccgggaggctattagcctcaaattgttgtttttgtctaagaatcacctgagcagtgtgcctgttgggcttcctgtggacttgcaagagctgagagtggatgaaaatcgaattgctgtcatatccgacatggccttccagaatctcacgagcttggagcgtcttattgtggacgggaacctcctgaccaacaagggtatcgccgagggcaccttcagccatctcaccaagctcaaggaattttcaattgtacgtaattcgctgtcccaccctcctcccgatctcccaggtacgcatctgatcaggctctatttgcaggacaaccagataaaccacattcctttgacagccttctcaaatctgcgtaagctggaacggctggatatatccaacaaccaactgcggatgctgactcaaggggtttttgataatctctccaacctgaagcagctcactgctcggaataacccttggttttgtgactgcagtattaaatgggtcacagaatggctcaaatatatcccttcatctctcaacgtgcggggtttcatgtgccaaggtcctgaacaagtccgggggatggccgtcagggaattaaatatgaatcttttgtcctgtcccaccacgacccccggcctgcctctcttcaccccagccccaagtacagcttctccgaccactcagcctcccaccctctctattccaaaccctagcagaagctacacgcctccaactcctaccacatcgaaacttcccacgattcctgactgggatggcagagaaagagtgaccccacctatttctgaacggatccagctctctatccattttgtgaatgatacttccattcaagtcagctggctctctctcttcaccgtgatggcatacaaactcacatgggtgaaaatgggccacagtttagtagggggcatcgttcaggagcgcatagtcagcggtgagaagcaacacctgagcctggttaacttagagccccgatccacctatcggatttgtttagtgccactggatgcttttaactaccgcgcggtagaagacaccatttgttcagaggccaccacccatgcctcctatctgaacaacggcagcaacacagcgtccagccatgagcagacgacgtcccacagcatgggctccccctttctgctggcgggcttgatcgggggcgcggtgatatttgtgctggtggtcttgctcagcgtcttttgctggcatatgcacaaaaaggggcgctacacctcccagaagtggaaatacaaccggggccggcggaaagatgattattgcgaggcaggcaccaagaaggacaactccatcctggagatgacagaaaccagttttcagatcgtctccttaaataacgatcaactccttaaaggagatttcagactgcagcccatttacaccccaaatgggggcattaattacacagactgccatatccccaacaacatgcgatactgcaacagcagcgtgccagacctggagcactgccatacgtgacagccagaggcccagcgttatcaaggcggacaattagactcttgagaacacactcgtgtgtgcacataaagacacgcagattacatttgataaatgttacacagatgcatttgtgcatttgaatactctgtaatttatacggtgtactatataatgggatttaaaaaaagtgctatcttttctatttcaagttaattacaaacagttttgtaactctttgctttttaaatcttaaaaaaaaaaaagttgctgaagtactgtacagggttgtacaatgagaacccaatgccaaggcaaaaagaacgagtgatttttccttaggatacacatcaaccactttgctgttgaagctgtcagaataaattcctggtggtcagatgaaagggcagattaaatggactcatcagggtaagaggaataatatgggtaaaacaagaaatggcccgatagtttcacactattcctatacctccaggtccggaagacaggtaaaaaattctataatgtaagaatggaggtagttaccctgatttgaccctgtgtgggaaatgctgaaagcaccaggaggaagccggttcccgtgagataagttaacccggcctgacagaatcaagaaaattgagatgagatttgaaaggacccgaaaatgcaggggttggctttctgactgggaacttaaaaatcactcttcatgcttccctggtcctatgtgataacagagttagagacttgagtctgatttcagtcatcttcagggaccagtctgatgttgtagcaagaagactccctttaaaagtgttactgttcaaatcatatatcaggttgaatcacattcaacagagatatattctagaatacttttttagaagaggctaataaagggaagaattatattgaatggaattatttttgataatgagaattatttgggtagattcactgaggctatgtcaacatgatatttagaccaacaggtgatcaatgtttggaaaatacaacaatgacttatttaaaaattacccttcctgctatttagacaaaaacaactgatcagtggttctgttatgtcagctgactttgttagtatcatgttgaaatagcttgaagtaatatcttttatccccttgcaaattcttgtcttccaatcatctcccatatattttcataattagttgtttatgacacctttgtttttctccctctgttcagtatttcaaggaaaattatggatgccagtcttggctgcacaagatatccattacgtacttatacattttaaaatgagtactaattttcactgctaataattctgtaaggacacatcaaagctggccaaaataatgaattttttttaaaaagcaatacctggtttccaccttggactgactttgatcctgttccacttttgaaattttatttgttccttttccatcgtggatgttcctctactttggcaattgtggagggctaatcaatcttatgttagcaggacaacccatgaaaaacaagtcagagagtgaaggctttttcccctaatcctggcagagcagggcgtagaaaagagaggatgtccgtgcttaattctagatacttttgagacaacaccttcagaaaacacataatttaatctttgccatccttagatagagaagggctatagatcacatacgttatcaaaaactactcccttggaaaaaatatctttcgaaaatcaaatttaaacatttcactctgtgctgcatatttcttttaccattgaccattattatagggacccatgaagtaaatgtcacaatcatcttactagctctctctctctcagcaaaataaaactgtgatgtgtcttctttgtaaaagtttaggtataaaatgctatgcaactttttctttatagtaagagctttattttctttaataatatagcccaacttatatgttttaatctcccttgtccctcagaataagcagaaaatataactgcagctgtatgtcgtagacacaagaattgaaactgtgcagtcagtagagctgaacttagctatgaattaatttaaattaattctaaagtgactctggtttccattttagtctattagctagagggttttggctgttgctttttttaaagttaggtccacacagtgaagggaaaagagtctgtgaaggtgatcagtgtagcagtaagacatctaaaatcaagacaatgacatgggggctttgtgtacttagctggataattcccttctactgtcctcttccccttggctgtgtagataaaattgtgcattcaaatgatggtactttgacttttgagggtttttatttctgttattcacaaaatactcattctcatttatgtatattgtatgtttaacccccagtgggatttctggctgctgaaaccactttgggccaggaagaacaaggatgaagaggttcctgtcatttcttatggggttcacagaattatttggggcttaaatggtacaatggagacagtcatgtgcaatgcttaagatggtctgacagggtcccttttgctggaggtgttcctgaagagattgaacctagtaacaggctttattttcaccttgtgtacaacatggcaaagactgctaagattaaaatccgtctcccatttgttacagcctcacctgcaccaggatagaaagcacgtgatggaatctgtgatgtctaatgtgtcttatgaaaattgccaaacaactgtccctggggattctgctttgattggcatttttagtcatgggaatgtatatttgctgatatatctgctctgtgtttgggcctctcttgctgtcattatgatgtattttgagatgattagtcaagagtcaaggttgcgagtacaggccaagaccatgggaaaaaaagccatgctcactggccaataaagagcttgatgctgcctggccaaatgaggtgactcagatagaatctgatcccattcagagcttggtaaatgtcactgtacagaagacattgaaaaggaagaggcatagtcatgatcaaaaggatatattgacagttatctatagccagggtagttgttaatacctgcttgtttggggagatatgtttgattatagagagactctgggccaccctcaaacaccgtcagatgcattagcagcccactgcatgggacaatcgcaggcagatacgaggaatgtatcccctgcctattttccttgtgtaacaaatggaaaacattctcccctgtgagaaataatgcaatttctaattatctggatgttcgttgaaaatatattagacattctccctgaggttaaaaacaaaaagtacgtgaccagtctggtaagaagtattaatgaagtagctaatattacagcttcattttctactagcacctatcataatggtcttagtcatttcacacaaatcagaacttccttccccaccagggaggacaacatcttcatgctgtgattgaagcatccattcagaacacgaggcaatattgcagtccacagggaatggatgcttcacttgatctccggaccttggctgcagaggccatcgcagcttttgaaaagtgaaggggttaattcccattggtgtctttgcttatagcatttttctctaacctataacaaggagacattacattttactttagaacatgagaatagcagttttgctcatgacttaccattccagctgcatgggaaagcaaagcagaaaacagtgccccaaatggaaaaaagatactcacacagaacaaaacagttcttggtcttgttcttggtcttgtcaaaccttgcctgatgctctttctaaagtcaaaatatgaatgctaagaaggcataacctacatccttctctgatttcttcagcagggtcaaaagacagttactagcaatggggaatgcttgtcactgtggagaaagagttttgtatatgtctgataccgttgttataacaaaacaaatttttttactatagttttttgttttctacctgcacacccaccagaagagcacaaagcaaggccattgcaacaggcatttaaaaattattatcaaacatgcacatgcttgtacacacacacacacacacacacaaacaggggcatttgtaaaggtgtccctggaatgtaagatttataatgtttaaggcaaggtgaaggcattgccaagtgtgtgtcgctcataggactagtgtatattcactgaaagttaacctgatgatttgttattgtttgaaccatatgctgatttgcttctggtttctgtttagtgtgttctctctgataaggggctgaaagattctgcatcacacatcctctgagacctaccatgtcgcacactttgttaatgacaaacttcactctacactatacagtaccttgttgatatattcagtaaagtcttattttaaaagaaaaccacattgtgtttatctgagtaagttcattgggatacagtcaatacttgtgctgttaatgtagaagaaatgacgcaggagggcaggaataaaagaggtaataggactttcgtattctcctatcatgaatatgacttgcatttctaaaggccatttgatcctttttgtgtgaggagtttatatgaaatcctcatgttcttttaaatttcccaactaaattgtgtgttcctacgaataccttttaggtatgcacacatacacagagcatcttattttatactggtgaaatctatgttgtttaggatacagataatgtcattgtatttatcctatcagaataggcttttcccctatttcaaaatagatgctattggctttattttttatttttaaattttttttaaacacggtcttaccatgttgcccaggctggtctcaaactcctagatgcaagcaatcatcccacctcgatcacccaaagtgctgggagtacaggcagaggacaccatgcccagccacgctattggttttaaatgtcagatttctttaagaattctcatagtacttttctgccgcagaatttatagcacatctgtccatcctttcaataggcactcaaggaaatgtatctattcatatgctcaacttcaattgattagtctcatatgatttttcagaaccccttttgctaacccctcttggccatttcattaataatgtatttgacagagattgaatcaggaaataaattcatgacatttcagttaa

SEQ ID NO: 5668 - DNA, 11202 bp, Homo sapiens
cagagcataaccttcggtggcaggacaaatcaggccagcacgcagtctgccaagtcctgctcgctccctgtcaagaaaaacagctggatccatttctaatcaacacttcccaacgcaacacttctgagtctctgaaggagaccagagcttgaaactttccagacttccaacagacatcgagtgcaaaaggatatttaggttgtctttgcacaaatctggttgatttgagagataaagggggggggaaccagtgtgactttcacctaagaagtcacatgaacatatttcacatttgaactacataatgaatgatggttattgaaatagcccaaacctctaccacagagcgagggatatagctcaaggggcaaccaggcagtcgcagaaccaaggaatggatgactacaagtatcaggacaattatgggggctatgctcccagtgatggctattaccgcggcaatgagtccaacccagaagaagatgcacagagtgatgtcaccgaaggccatgatgaggaagacgagatctatgagggcgagtaccagggtatccctcacccagatgatgtcaaggccaagcaggccaagatggcgccctccagaatggacagccttcggggccagacagacctgatggctgagaggctggaagatgaggagcagttggcccaccagtacgagaccatcatggatgagtgtggccatggccgcttccagtggatcctctttttcgtcttgggtttggccctgatggccgatggggtggaagtgttcgtggtgagttttgccctgcccagtgcagagaaggacatgtgtctgtccagttccaaaaaaggaatgctagggatgatagtctacttgggaatgatggcgggcgccttcatcctgggaggcctggctgataagctgggaaggaagcgagtcctcagcatgtctctggccgtcaatgcctccttcgcctccctctcttccttcgtgcagggatatggagccttcctcttctgccgactcatctcaggcatcggtattgggggtgctctaccgattgtttttgcctatttttctgaattcttgtctcgggagaagcgaggagaacacctcagttggctgggcatcttctggatgactgggggcctgtacgcatctgccatggcctggagcatcatcccacactatggctggggcttcagcatggggaccaattaccacttccatagctggagagtgtttgtcatcgtctgtgctctgccctgcaccgtgtccatggtggccctgaagttcatgccagagagcccaaggtttctgctagagatgggcaaacatgatgaagcctggatgattctcaagcaagtccatgacaccaacatgagagctaaggggaccccagagaaagtgttcacggtttccaacatcaaaactcccaagcaaatggatgaattcattgagatccaaagttcaacaggaacctggtaccagcgctggctggtcagattcaagaccattttcaagcaggtctgggataatgccctgtactgtgtgatggggccctacagaatgaatacactgattctggccgtggtttggtttgccatggcattcagttactatggactgacagtttggtttcctgatatgatccgctattttcaagatgaagaatacaagtctaaaatgaaggtgttttttggtgagcatgtgtacggcgccacaatcaacttcacgatggaaaatcagatccaccaacatgggaaacttgtgaatgataagttcacaagaatgtactttaaacatgtactctttgaggacacattctttgacgagtgctattttgaagacgtaacatcaacagatacctacttcaaaaattgtaccattgaatcaaccatcttttacaacacagacctctacgagcacaagttcatcaactgtcggtttatcaactccaccttcctggagcagaaggagggctgccacatggacttggagcaagataatgacttcctgatttacctcgtcagcttcctgggcagcctgtctgtcttacccgggaacatcatttctgccctgctcatggatagaattggaaggctcaagatgattggtggctccatgctaatctctgcagtctgctgcttcttcctgttttttggcaacagtgagtctgcaatgatcggctggcagtgcctgttctgtgggacaagcattgcagcctggaatgctctggatgtgatcacagtggagctgtatcccaccaaccagagagcaacagccttcggcattctcaatggattatgcaaatttggcgccatcctgggaaacaccatctttgcttcttttgttgggataaccaaagtggtccccatccttctggctgctgcttctctggttgggggtggcctgattgcccttcgactgccagagactcgagaacaggtcctgatgtgaacaacctatgggaaaaggaaaggtcgagagaatcttgtccaggacactgaaatgcatccacacttcctgcctatcacggtccggaggacaccttggatagcacgggaggagaagttgactttgtgacccctagtttaggacccacttcagctgtcaatatgtttgtaactcaggtgactgatttgggggtgccctgagccacccttagaatcacagagctgcgtgtttaacttcaagtcttcccagtccaaggcagggagaggattctccagtgagtgcacacactatgcgaggagcaagcatttctctaagtcaagtgcaaggacttaacttgcgtttgaaaaggaattagagggtcagaaacacccaggttcctccagaaagctccttggagcccaacaacttaacaaatcaacttggctggaagttagagtcattatatgaagattgggcttgaagtatatatttttgcatttaaaagtatcacctatcatattttccactcgaaaattgacatagtagcattgaggatactctgatctagaaagccaagtatttgagcaacatctatagagatctacttttctcctatgtctcctaggctttccatgataattaggtaatacatttaagaaggatatttatttctgttttgctctattcaaagaaacggaatgggatagttattctgtaaactaagtttgtatataactttatttgggtttaatttccacaactggtatctgcaaatattgccagcattttagccatattttgggagaacttggtgtttgaggtcccaggaaatgaggtctgatcaaatgaaatgcaagcacaatttcttacagccatttaactttctgttgggaggatgaattaacaaactcacattgtgcagtctgcttaatccaggcacttttctttgtgcaggtgtagtgagtagttacttctctcccttacacagatgacttgtgaaactcaagctcaccatcttcagtgctggcattttactttgccactacccaaaaacaatgtgagatgtgttcagtggcctctggtactctttgcaggcaagaatcaaacaacatggggactgagggaaggatggggaagtgtagccacagttcttccaaatgtaaatactttttgtttgttctagtggtaaaatgcaaatgcaatccatatttgttaggatggtcaggtctcatgagaaatctatgctatgtgtccagagcttttgaaacagagtccattggagtgggagttagggagtgtagtggatgccaaatatgtttttcttcagtgcttaagagaactgtttcctgaagtccagctttgaacataaacaggggtgtgggttgggggaggagcttaggacaaacctctctgatgaaggtcagcaatagactgaagtcttgactgcatggaagaggaaaaacatcagaactgtctgacaatggaggggacagtgagctacgcacaactgccagcggaggtgaacttgcacctgcccaggccggatgaacatcagcctgcaagaactagttgtttgagttgatttgcagtgctctcaatgggcaagtgccacattttccctggcagagatctccaaaaatttaaaacagaataataatggctatatcgagtgttttctcagtattggagaaatgcttaggtcctatgatagcttcgggacatctttctgtaattttcctcaattaacgggttggtaggggtaaatcttatgacacctttccaccgtcgatttgagatcagttttaatggttaaaatgtttactctccttctgtcaaccctcacctttttatttacacccctccctttttttctgtacagggagagaagacatattgactctgactggacaccctgattcctccaaatatatataccactgtgtattaatctttctctcagtgttttataggagtactaacatttattgctctgtcaataatgaaaggctcgatgtaatatagctgtaatttactttccatatgaatacagtggctaggttcataaaagagaattgtgtgagtctgggattaccacatctaaaacattattctttaatgggataatacaattcattgagcagctaccacttaaaaaacttgcaggacagttagagcctgcatttctagttaagatggatcttgtaaatttaaaattggattaacattggagtgctggggtggctgcaataatttgggggctaactccatttggtttccaagatctcacttctgcattatctttatggctctttaaaccagccacctagccaatcaagggcaattcccatctcatccatcactcaggtctttgtaaagggtgcagccaagctctgcagacttttgcaggattgtctagcctgagtaccgggctacttcttaaatgccgtcactcctgctgagataaatgcgtctttaaaaatagtctctgtggcaggtcactgggggacaatgtacagcattctggccatccacttctttttcacttcatgttctaccccaagagactcccgatgtcggctgtggagggttaaagggatgaggctttcctttgtttagcaaatctgttcacagttcttgatgatgtattttatgatgcccagcttggaaatagttgctttccatagtctcaactgtattgtgtcatctcctgatgctgatttttgatcttttgttttattaaaaataattagtgaaagaggtgtgcctatctgtgaagtttgtagtacatcatcctgaggtcatgtaacaagtaaaccccaacccagcgttccctcctacgttgtgttagttcattaaaactaaataataaaaataactgtaagaaaaccttaaggactggggttagagattattttcaggcactaaggtctcttctgtattccaaaattgattgaatcagctgggagaaacattgagaatcgcttccttcaacttttattttgcaacatggggaccttgagaggttaaacgatgtggcccagattacatgtaatgtgaggagtgggcgagaaggcctaaggtgatgctctcatgacagttctggggaagcctgcagtttggggaatgggacaatgtgacaaatactcgccattccctgagaccattcattgactattcccttgatggctttactataatgagaggaagcatcagtttaaacataaaaagattagtatttatccatccatttattcattcagcaaatccttattgagccctgaccatgggccagtctctctgccaagccctggggacacagtgatgaaaaaactggccacagtttctgcttcctgcctcattccacttgcagtgagcggatattaaattggccataaacaccgagtacgatgaccttacaatccgcaaactgcacctttcatgtgtaaaaggattgctactactttacttgtcagctgtggatttccaaatgtggtggctccctcttatttttttttctttgaggagtgtaccaattttttatctttataaaccaggtaagggaaatgatgcccttgcccattttctacagacctaatcgatttttacctaatcagttttacagaaagggttacatggaagaagagataggggccaggaatgcaagagggacattggtgagtggggtaagaatccccgtagccctgggaaaggtgtctccacttccacatctggcttttctagggggcatctgtgctaactgacctgggattatgttggatggcatatgactgcaaattcaaagaaaccaatttataataagtttatagtaagttaaaggtttgttttactctcatgtgaagggaatctggaggaaggaaagccagggctggagtggctgcctttgatcatgggagcacactccttctgcccgatcattgggagcacactccttctgcctgatcgttgggagcacactcctgcctgatcatgggcgcacgttccttctgcctgatcgttgggagcacactccttctgcctgatcatgggagcacactccttctgcctgatcattgggagcacgctccttctgcctgatcgttgggagcacactctttctgcctgatcgttgggagcacaccccttctgcctgatcattgggagcacactccttctgcctgatcatgggcacacgctccttctgcccgatcatgggcacacgctccttctgcccgatcgttgggagcacactccttctgcccaatcattgggctcacgctccttctgcccgatcgctgggctcacgctccttctgcccgatcttgggcgcacgctccttctgcccgatcgttgggcgcacgctccttctgcccgatcgttgggcgcatgctccttctgcccgatcgttgggagcacgctcattctgcccgattgttgggagcacgctccttctgcccgatcgttgggcgcacgctccttctgcccgatcgttgggcgcacgcttcttctgcctgatcgttgggcgcacgctccttctgcctgatcgttgggcgcacgctccttctgcctgatcgttgggagcacgctccttctgcctgattgttggaagcacgctccttctgccttcagactccttgatttttagtgcagtttccatcactgaggctgcctcatgggctgagatggctgttgaagcactgaacctcacatccacaattcaggcaggaagcagaaggaagggcaatgggcaaaggggctgtgccttgcagccgatccagcctccctttgctgcagaggaggcagggaaatgcggtatttactgggaacattgctgcccctcctccaaattgagggtcttggctcgaaggacaaaagccagaaaggataggtggattagtgcttcttaaacttttgcgtgcatcagaatcacccagaaagatgttaaaactcactcttcaaggccccatccccagagattcggattctggggatttggaatctggggtggggtctgaagaatctgcattttttaacaaactcccaggtgacatagatggcatcaattctcaagccatattttgagtagcactgacactcttccaataggtggtactttgacttgtcagggaagttctattgctctgataacttaaaaccaacccaaccagaagctcacaaaaactagcagcctgtgaaaaatgatcaccattttcctagagctccgagacaactagtggtagtgcaacagtaacccaaaaatgtcaatgaaaatatttccttccccagaaactgcttggtttcactcaggtcctgtccttatgggcctgtgtctggttgcagggcttgaagtatttcggaagctcagcagaggttgaaccctttcccctgggggttggtgatctttgttttggccatttccacctggtgaagattttcatagacaaatatgcttgtggcatcctgtaattcattgtgccttatgatggacctctgattctataagcttccccctagctagggatgcacgggggtgatcaagacatgactagatgtgaacctgacctgcagacagtccacctgaacgtgcctggaaatgtctcccgaaaaggatgaaaagcctcctcctttagacaaggaagacagagtggagcaaatttctctacatagatctcattcgaaaacaaatttacagaatgcagaatggctactgtgtgtcttgtgctatgctaggtctctctctctctaagtggactctgaccctgtccaaaacattgtgcttttgcatgtagctgtgtcgcatttaggcccagctctaagaaccgtttggaaataaatcacatagagcctttgattgtgaggcaggcttaaagtacattttgtttgatttgcagaggcatggtgaggaatttatatgcatggctgttgtggcagcagcgagatttccaaaaagatgaatgatgaaatgaaacagactgaagctatctcacaaatgttaaatggagaaataaaagttgttatagtcattgctaattacagaatgagcaagagatttatttagcaggaccatactatgccccctggaaggttcagtttatgagctggagcacaaggatttactgtcatttcacctgaaaacacacatttagctgtccatttacctttaatcctacaggcttaaaatactttaaaatttcagagaccattaatatgtattcctttagaaagcaaaggtctttcagaagctgtcctctaccaaagttaatgtggtcaccacatttgatgattttgctaggtagggaggtttatttaatcacagctactgtcactcaggaggatgagccatttaaaaatggtggccctgtcctccacttcttacctaccatatataatctcagtaattcagatttctctaaatcagcattagtgatcatttcaatagggtatgaacaaaaggcctataaaaatagctttccaattcgccaccaaaaatgcaaaaatgacaagtaagtgaggtaacgcatgagctaaatagcttgatttagtcactctaaaatgtgggtgtgtatatatacatacatatatatacacacacacattatgttatacaccataaatatatagaagttttacttgtcaattaaaactataaataaagtggctttccagaaaaattagatattggactctatcacaaaggaattgcataaaaatacttacaaacataactataagcaattgatgagcaaattacaaatgactgttttttattaaaacattcctccaaaagaacggcaaagcaaatcccatagacacccaaaatactaaaagtgacaaaacaatacttctttaaaaatgtattttatgatctatttattgatattctaatggttttaagaaggataattttccaaaacctaaatgctacacattttacagtggcaatatcaaccttatcatgagctaaagatttgcaatcagaacattggtagagtgcattgctgagttataacaagtgtctcaggacgaggatatttggtaggtatccttaaatatatagatgcttaccagtaggtttaatagaagatttctgaaaggtagcgcaagtttttatttcattatttttatttttatttttttgagacagagtctcactctgtcatctaggctggagtgcagtggtgcaatcttggcttgctgcaatctccacctcccaggttcaagcgattctcccacctcagcctcccgagtagctgggattacaggcatgcgccaccatgcctggctaatttttgtatttttagtagagacggggtttcgccatgttggccaggctcgtctcgaactcctggcctcaagtgatctgcccgcctcagcctcccaaagtgctgggattacaaatgtgagctactatgcctggtcccaacttcttaaaattaaattttggggaagttcatggagatatttttgacatgtaaaagtagaaaacaaaccatccatagtgtgtgcatatatacacacaaggtttggtttaatatacttgctgtgcactagtcagttttgattcaggttacataagggataaaatatagaaagacattttaaagtttgaaatatgtgctaagtagttagagatttggcagttttgccacatttcaaatgggccaaacattaaaataacttatccatgaatttcaggtttcaaggaaggaggaatatctgactatttttttttgtgtgtgagatttggtctcagctttttggtccatctgaatcctggaagtccccaactctaccagaccaaaagggtgtctctattttttgttgttacttctctgttcttgatgtaatgagttaagtagatgaaagagattaaggtgcagggaagggctcttaaaagtttaatgtttcagctttccatagtcattcatacttgtgaatcttcttcctcttctacttcaaagtagccaaaacttggaaagttcaaattaatctttgggctccaaagagcaattctgaaggattaacaggtttcattctctccagtgggaggtggcctagacaggtgccggttttggggagaggtgagagtacccagatgtgggtgactatttcctgttcttccctgaaagtcaggccagtggtctcgaatcattcccacagcaactgctacaaaagtgactatcttaatcctttggctagatgggatacctcttctaccttttcagaggtgagctgttgagtagtaatgtccgctacaacaccacgctcccggaatggtggttcctaagagcaaagtcagttaatacaatttctccaggtatccagctatctccaggtgtgcggtcctgtgaagcactctaagaactgtaaaaaatatttcataggtatagaaggcatttgtaatactgttggttcaaatgtgctgacatgtagccagtggaggaagatgtttctttggaagcctgccatctttctgtaacgcaccttcaacctgagataattaagagtcattacgtttcccagtcccatgtcacattgaccagtcctgtggtcctatggctaagcggaggacacggccacaagctgtgagtcatgaaaaggagggtgcaggtgataggcaaagggacccattagccagtttacaatgactggcaactgaccagatagagcttaccgtatgtccatgtagagttgctcatattagtctgtaaataattctatgcatagtgaatgcagcttctgaattattaaactgatgctataaatgtgaactgacaaaaccc

SEQ ID NO: 5669 - DNA, 2548 bp, Homo sapiens
ccctccctcccttcttccctcccttcctccataccaacctccctccctctctggagctcctgctctctccctctccctcctctcccgtgctccctccctccctccctctttccctccctcctctcctctccctctcctctcctgctatagagggctccgacagcagttcccagccagcgtgttcagcctgcctgcctgcctgcctctgtgtgtgtgtgagcgtgtgtgcgtgcgtctactttgtactgggaagaacacagcccatgtgctctgcatggacgttactgatactctgtttagcttgattttcgaaaagcaggcaagatgtccagcacaccacatgaccccttctattcttctcctttcggcccattttataggaggcatacaccatacatggtacagccagagtaccgaatctatgagatgaacaagagactgcagtctcgcacagaggatagtgacaacctctggtgggacgcctttgccactgaattttttgaagatgacgccacattaaccctttcattttgtttggaagatggaccaaagcgatacactatcggcaggaccctcatcccccgttactttagcactgtgtttgaaggaggggtgaccgacctgtattacattctcaaacactcgaaagagtcataccacaactcatccatcacggtggactgcgaccagtgtaccatggtcacccagcacgggaagcccatgtttaccaaggtatgtacagaaggcagactgatcttggagttcacctttgatgatctcatgagaatcaaaacatggcactttaccattagacaataccgagagttagtcccgagaagcatcctagccatgcatgcacaagatcctcaggtcctggatcagctgtccaaaaacatcaccaggatggggctaacaaacttcaccctcaactacctcaggttgtgtgtaatattggagccaatgcaggaactgatgtcgagacataaaacttacaacctcagtccccgagactgcctgaagacctgcttgtttcagaagtggcagaggatggtggctccgccagcagaacccacaaggcaaccaacaaccaaacggagaaaaaggaaaaattccaccagcagcacttccaacagcagcgctgggaacaatgcaaacagcactggcagcaagaagaagaccacagctgcaaacctgagtctgtccagtcaggtacctgatgtgatggtggtaggagagccaactctgatgggaggtgagtttggggacgaggacgaaaggctaatcactagattagaaaacacgcaatatgatgcggccaacggcatggacgacgaggaggacttcaacaattcacccgcgctggggaacaacagcccgtggaacagtaaacctcccgccactcaagagaccaaatcagaaaaccccccaccccaggcttcccaataagatgatcggcaccagaatccactgtcaataggcccgtgggtgatcattacaattgcaaatctttacttacaggagaggaaacagaagagataaaaacttttccatgcaaatatctatttctaaaccacaatgatctgattttctttcttctttctttttttctaattgagaggattattcccagtaagcttccatgaccctttcttggaggccttcacaggtaatacagatactggcactgattgtaattaaaatgagagaaaactctagcgcatcttctggcacggttttaacaacgtgtttgtgttgaatttcctttttatgcatcaaacgaaggccatattgtccataaatgctcagtgctcaggatctcattaatatgccgaacctaactacagatgactttttaatattgtaaaatattttctgctttttgacttgcatctgagagtttcttgtttcagtaaaaaaagaaaagacaaaaaaatcagctttggaaagtaatttaaatgtaccttattttttttttctttatgttttctttcattgggcaacagctaagagggcccagcaaggtaatttatggttgagctgatgtcaattggttcttgtcttgagtcgactcaatttagcccaagtgctgaaacaagaaatgtcatttttttcatcaaagacaccagggcagatttttaagtaaagaaagacaattggacccttaagaatttatgcatttgtaaagttgctgttgatccaaatattttcaagccatgtaatccattggttttgtgggcagtttaataaacctgaacctttgtgtgttttctaattgtacctgagttgaccatcctttctttttatagtatatttcttgtatgatattttgtaaagctctcacctggttcttttatggggacttttcgtttttgggcaactccagtgtatttatgtgaaactttataagagaattaatttttccatttgcatattaatatgttcctccacacatgtaaaggcacagtggctccgtgtgttaaaaaacagctgtattttatgtatgctttactgataagtgtgccaataataaactgtgttaatgaccaaa

SEQ ID NO: 5670 - DNA, 3732 bp, Homo sapiens
ccgacgacctcactcagctgcgttacgcgccgctccggctgccggccgcgcgccttgcccgccggctcccgcccgcaatcggcggctcagggcggacccgggtctctgcgttctcgcgagaagcgcggcgctgcggggccgtgggcgcctgagcccgcgcggccctcgagggccgaatatggggggatgcacggtgaagcctcagctgctgctcctggcgctcgtcctccacccctggaatccctgtctgggtgcggactcggagaagccctcgagcatccccacagataaattattagtcataactgtagcaacaaaagaaagtgatggattccatcgatttatgcagtcagccaaatatttcaattatactgtgaaggtccttggtcaaggagaagaatggagaggtggtgatggaattaatagtattggagggggccagaaagtgagattaatgaaagaagtcatggaacactatgctgatcaagatgatctggttgtcatgtttactgaatgctttgatgtcatatttgctggtggtccagaagaagttctaaaaaaattccaaaaggcaaaccacaaagtggtctttgcagcagatggaattttgtggccagataaaagactagcagacaagtatcctgttgtgcacattgggaaacgctatctgaattcaggaggatttattggctatgctccatatgtcaaccgtatagttcaacaatggaatctccaggataatgatgatgatcagctcttttacactaaagtttacattgatccactgaaaagggaagctattaacatcacattggatcacaaatgcaaaattttccagaccttaaatggagctgtagatgaagttgttttaaaatttgaaaatggcaaagccagagctaagaatacattttatgaaacattaccagtggcaattaatggaaatggacccaccaagattctcctgaattattttggaaactatgtacccaattcatggacacaggataatggctgcactctttgtgaattcgatacagtcgacttgtctgcagtagatgtccatccaaacgtatcaataggtgtttttattgagcaaccaaccccttttctacctcggtttctggacatattgttgacactggattacccaaaagaagcacttaaactttttattcataacaaagaagtttatcatgaaaaggacatcaaggtattttttgataaagctaagcatgaaatcaaaactataaaaatagtaggaccagaagaaaatctaagtcaagcggaagccagaaacatgggaatggacttttgccgtcaggatgaaaagtgtgattattactttagtgtggatgcagatgttgttttgacaaatccaaggactttaaaaattttgattgaacaaaacagaaagatcattgctcctcttgtaactcgtcatggaaagctgtggtccaatttctggggagcattgagtcctgatggatactatgcacgatctgaagattatgtggatattgttcaagggaatagagtaggagtatggaatgtcccatatatggctaatgtgtacttaattaaaggaaagacactccgatcagagatgaatgaaaggaactattttgttcgtgataaactggatcctgatatggctctttgccgaaatgctagagaaatgactttacaaagggaaaaagactcccctactccggaaacattccaaatgctcagccccccaaagggtgtatttatgtacatttctaatagacatgaatttggaaggctattatccactgctaattacaatacttcccattataacaatgacctctggcagatttttgaaaatcctgtggactggaaggaaaagtatataaaccgtgattattcaaagattttcactgaaaatatagttgaacagccctgtccagatgtcttttggttccccatattttctgaaaaagcctgtgatgaattggtagaagaaatggaacattacggcaaatggtctgggggaaaacatcatgatagccgtatatctggtggttatgaaaatgtcccaactgatgatatccacatgaagcaagttgatctggagaatgtatggcttcattttatccgggagttcattgcaccagttacactgaaggtctttgcaggctattatacgaagggatttgcactactgaattttgtagtaaaatactcccctgaacgacagcgttctcttcgtcctcatcatgatgcttctacatttaccataaacattgcacttaataacgtgggagaagactttcagggaggtggttgcaaatttctaaggtacaattgctctattgagtcaccacgaaaaggctggagcttcatgcatcctgggagactcacacatttgcatgaaggacttcctgttaaaaatggaacaagatacattgcagtgtcatttatagatccctaagttatttacttttcattgaattgaaatttattttggatgaatgactggcatgaacacgtctttgaagttgtggctgagaagatgagaggaatatttaaataacatcaacagaacaacttcactttgggccaaacatttgaaaaactttttataaaaaattgtttgatatttcttaatgtctgctctgagccttaaaacacagattgaagaagaaaagaaagaaaaaacttaaatatttatttctatgctttgttgcctctgagaataatgacaatttatgaatttgtgtttcaaattgataaaatatttaggtacaaataacaagactaataatattttcttatttaaaaaaagcatgggaagatttttatttatcaaaatatagaggaaatgtagacaaaatggatataaatgaaaattaccatgttgtaaaaccttgaaaatcagattctaactggatttgtatgcaactaagtatttttctgaacacctatgcaggtcttatttacagtagttactaagggaacacacaaagaattacacaacgttttcctcaagaaaatggtacaaaacacaaccgaggagcgtatacagttgaaaacatttttgttttgattggaaggcagattattttatattagtattaaaaatcaaaccctatgtttctttcagatgaatcttccaaagtggattatattaagcaggtattagatttaggaaaacctttccatttcttaaagtattatcaagtgtcaagatcagcaagtgtccttaagtcaaacaggttttttttgttgttgtttttgctttgtttccttttttagaaagttctagaaaataggaaaacgaaaaatttcattgagatgagtagtgcatttaattattttttaaaaaactttttaagtacttgaattttatatcaggaaaacaaagttgttgagccttgcttcttccgttttgccctttgtctcgctccttattctttttttggggggagggttatttgcttttttatcttcctggcataatttccattttattcttctgagtgtctatgttaacttccctctatcccgcttataaaaaaattctccaacaaaaatacttgttgacttgatgttttatcacttctctaagtaaggttgaaatatccttattgtagctactgtttttaatgtaaaggttaaacttgaaaagaaattcttaatcacggtgccaaaattcattttctaacaccatgtgttagaaaattataaaaaataaaataattttagaaa

SEQ ID NO: 5671 - DNA, 3527 bp, Homo sapiens
agagagcccgaaaggaccagacgcccaggtcgcccgcatcccgctgccgcaggagagagacagcgcgccccggccctgctccccaggcttcgcccgggcgccctcaactctgtccccagagactgagcacctgtcctccgcctcggcctctgctgagagccctctcctctggagcacacaccacccctgcagcccaagaagagtcccagccccacgccggctaccaccatggcggagaccaacaacgaatgtagcatcaaggtgctctgccgattccggcccctgaaccaggctgagattctgcggggagacaagttcatccccattttccaaggggacgacagcgtcgttattggggtttcttactttgaaatttacctggacaaaattcgtgaccttctggatgtgaccaagacaaatctgtccgtgcacgaggacaagaaccgggtgccatttgtcaagggttgtactgaacgctttgtgtccagcccggaggagattctggatgtgattgatgaagggaaatcaaatcgtcatgtggctgtcaccaacatgaatgaacacagctctcggagccacagcatcttcctcatcaacatcaagcaggagaacatggaaacggagcagaagctcagtgggaagctgtatctggtggacctggcagggagtgagaaggtcagcaagactggagcagagggagccgtgctggacgaggcaaagaatatcaacaagtcactgtcagctctgggcaatgtgatctccgcactggctgagggcactaaaagctatgttccatatcgtgacagcaaaatgacaaggattctccaggactctctcgggggaaactgccggacgactatgttcatctgttgctcaccatccagttataatgatgcagagaccaagtccaccctgatgtttgggcagcgggcaaagaccattaagaacactgcctcagtaaatttggagttgactgctgagcagtggaagaagaaatatgagaaggagaaggagaagacaaaggcccagaaggagacgattgcgaagctggaggctgagctgagccggtggcgcaatggagagaatgtgcctgagacagagcgcctggctggggaggaggcagccctgggagccgagctctgtgaggagacccctgtgaatgacaactcatccatcgtggtgcgcatcgcgcccgaggagcggcagaaatacgaggaggagatccgccgtctctataagcagcttgacgacaaggatgatgaaatcaaccaacaaagccaactcatagagaagctcaagcagcaaatgctggaccaggaagagctgctggtgtccacccgaggagacaacgagaaggtccagcgggagctgagccacctgcaatcagagaacgatgccgctaaggatgaggtgaaggaagtgctgcaggccctggaggagctggctgtgaactatgaccagaagtcccaggaggtggaggagaagagccagcagaaccagcttctggtggatgagctgtctcagaaggtggccaccatgctgtccctggagtctgagttgcagcggctacaggaggtcagtggacaccagcgaaaacgaattgctgaggtgctgaacgggctgatgaaggatctgagcgagttcagtgtcattgtgggcaacggggagattaagctgccagtggagatcagtggggccatcgaggaggagttcactgtggcccgactctacatcagcaaaatcaaatcagaagtcaagtctgtggtcaagcggtgccggcagctggagaacctccaggtggagtgtcaccgcaagatggaagtgaccgggcgggagctctcatcctgccagctcctcatctctcagcatgaggccaagatccgctcgcttacggaatacatgcagagcgtggagctaaagaagcggcacctggaagagtcctatgactccttgagcgatgagctggccaagctccaggcccaggaaactgtgcatgaagtggccctgaaggacaaggagcctgacactcaggatgcagatgaagtgaagaaggctctggagctgcagatggagagtcaccgggaggcccatcaccggcagctggcccggctccgggacgagatcaacgagaagcagaagaccattgatgagctcaaagacctaaatcagaagctccagttagagctagagaagcttcaggctgactacgagaagctgaagagcgaagaacacgagaagagcaccaagctgcaggagctgacatttctgtacgagcgacatgagcagtccaagcaggacctcaagggtctggaggagacagttgcccgggaactccagaccctccacaaccttcgcaagctgttcgttcaagacgtcacgactcgagtcaagaaaagtgcagaaatggagcccgaagacagtggggggattcactcccaaaagcagaagatttcctttcttgagaacaacctggaacagcttacaaaggttcacaaacagctggtacgtgacaatgcagatctgcgttgtgagcttcctaaattggaaaaacgacttagggctacggctgagagagttaaggccctggagggtgcactgaaggaggccaaggagggcgccatgaaggacaagcgccggtaccagcaggaggtggaccgcatcaaggaggccgttcgctacaagagctcgggcaaacggggccattctgcccagattgccaaacccgtccggcctggccactacccagcatcctcacccaccaacccctatggcacccggagccctgagtgcatcagttacaccaacagcctcttccagaactaccagaatctctacctgcaggccacacccagctccacctcagatatgtactttgcaaactcctgtaccagcagtggagccacatcttctggcggccccttggcttcctaccagaaggccaacatggacaatggaaatgccacagatatcaatgacaataggagtgacctgccgtgtggctatgaggctgaggaccaggccaagcttttccctctccaccaagagacagcagccagctaatctcccacacccacggctgcatacctgcactttcagtttctaagagggactgaggcctcttctcagcatgctgcaaacctgtggtctctgatactaactccctccccaacccctgttgttggactgtactatgtttgatgtcttctcttacttactctgtatctctttgtactctgtatctatatatcaaaagctgctgctatgtctctcttctgtcttattctcaagtatctactgatgtatttagcaatttcaaagcatagtctaccttccttatttggggcaatagggaggagggtgaatgtttcttctttctcatctactcgtctcacactgagtggtgttagtcactgagtagaggtcacagagatgacaaaaggaaaaatgggagctagagggttgtgacccttcatacacacacgcacgcacgcacacaaacatgcacacacgcatgcacacacacaaag

SEQ ID NO: 5672 - DNA, 5190 bp, Homo sapiens
attgcagtatctttcagcttccagtcttatctgaagactccggcaccaaagtgaccaggaggcagagaagaacttcagaggagtctcgtcttgggctgcccgtgggtgagtgggagggtccgggactgcagaccggtggcgatggccactctcccagcagcagaaacctggatagacgggggtggaggcgtgggtgcagacgccgtgaacctgaccgcctcgctagctgccggggcggccacgggggcagttgagactgggtggctgcaactgctggaccaagctggcaacctctcctcctccccttccgcgctgggactgcctgtggcttcccccgcgccctcccagccctgggccaacctcaccaaccagttcgtgcagccgtcctggcgcatcgcgctctggtccctggcgtatggtgtggtggtggcagtggcagttttgggaaatctcatcgtcatctggatcatcctggcccacaagcgcatgaggactgtcaccaactacttccttgtgaacctggctttctccgacgcctccatggccgccttcaacacgttggtcaatttcatctacgcgcttcatagcgagtggtactttggcgccaactactgccgcttccagaacttctttcctatcacagctgtgttcgccagcatctactccatgacggccattgcggtggacaggtatatggctattattgatcccttgaaacccagactgtctgctacagcaaccaagattgtcattggaagtatttggattctagcatttctacttgccttccctcagtgtctttattccaaaaccaaagtcatgccaggccgtactctctgctttgtgcaatggccagaaggtcccaaacaacatttcacttaccatattatcgtcattatactggtgtactgtttcccattgctcatcatgggtattacatacaccattgttggaattactctctggggaggagaaatcccaggagatacctgtgacaagtatcatgagcagctaaaggccaaaagaaaggttgtcaaaatgatgattattgttgtcatgacatttgctatctgctggctgccctatcatatttacttcattctcactgcaatctatcaacaactaaatagatggaaatacatccagcaggtctacctggctagcttttggctggcaatgagctcaaccatgtacaatcccatcatctactgctgtctgaataaaagatttcgagctggcttcaagagagcatttcgctggtgtcctttcatcaaagtttccagctatgatgagctagagctcaagaccaccaggtttcatccaaaccggcaaagcagtatgtacaccgtgaccagaatggagtccatgacagtcgtgtttgaccccaacgatgcagacaccaccaggtccagtcggaagaaaagagcaacgccaagagacccaagtttcaatggctgctctcgcaggaattccaaatctgcctccgccacttcaagtttcataagctcaccctatacctctgtggatgaatattcttaattccatttcctgaggtaaaagattagtgtgagaccatcatggtgccagtctaggaccccattctcctatttaccagtcctgtcctatataccctctagaaacagaaagcaatttttaggcagctatggtcaaattgagaaaggtagtgtataaatgtgacaaagacactaataacatgttagcctccacccaaaataaaatgggctttaaatttattctttgaaaactctaaattattatatgcaatgaacaaaaatatgtcaggaaaatacttgtaaactcgccagtctatctcatttacaaattgcaatatacatttgtgacattaaaatgatatatagtttttccaagagattaaagaatctttaaaacataatattgtaagtgaagggaaacaaaatctgtataaaatctgtataaaataggcttttttgcctagagatataaaatgggaaaaaaagttaaatgattcattttcccactagagtaatggaaaattaacctcaagaagtaggaactgaaaatctttgctcaagaaaactcattttgtagaatgtaaagatttaaagatttaaagatttcttccatggcatttaactgaaaaggaaatctagttaaatcattaggcaaatgtatatttcattctcttgattttttttctgagaaagtgaaattttaaaaaattatatactttttgaccattacttatttttgaataccaagctaaaaagtagtcagttaagaccctaaaaatatgaagaaaattcctatcattttttatttttcacagattttttaaatagctagattataaaacagtaaaggtacattccaataaatagaggaagaatactatttatgttctcttcctctcccctcactgaaaatagaataaggactaggagaaaatatcttcaaaggcaactccttagggaaaaaaagtcacaagtgtgacaaaagactatatggttgaaaaataccaatatatgttacatatgagtaaactaggcaaggtgtagacaagtgaattacctcttagaaaacgaatctgcacaatagtttggatacatgtaaactaataacagctgagcaagagggtgagtttaacacacatccttccacagaaagaccttttctttcatttgcttagattattcagaagtcttaccagaaagaaatgagataatagtcctaagaaagcatcacatttactacaagaagatatatactagcacatttctgagactcataacataacaagaaatacttttaagtgtaaaaagtaacatccaggcctcagtgcttacagatcatctttccttgaattagggatactgttaatcctgctcaagaaagcagaaactttttgagaatgtgaatgtgtagtacaaacttctcctttaaactcttcagtttgatttttaaagatatttgtctaaaataatactctctaacaaacactttactgttgtgcctccaccgatattaaaacaaaatatttttgaagaacagaataaaagcaaatattcaatggcaaatcatggtctatttctcaaatctcttccctattttgaagccaaaaccagaaatatccaattgttacaaaaagttcggagtctaaacaagctaaacatatgtgttccagctgaatttcttctgatgataccaataaacaaagagacacacacacacacacacacacatacaaatgtgcctacacattcaatcatttaatgaatgcaacaacttcaaagaattaaaatcaaatactgaaatgataagtggtcattacagcattgccatatgctcaataaagtctgtgaagcttgtgtgcatgttttaaataagcaaatttaatatatagtatctaattgtttgaatataatgtttttgaatgttcattcttaaaacatatatttatcatacaatgttaaagtgtcaagaaaaagcctaatatgtaaaaagttattattttcttaaatttatgaatgatatggtactagcattaattaatgttttagacatatggaaccatattcagctgtaaaatatgaatatgaagtttagccctcaaatttaatgtcatcagccactaccaaagtatcatacatttgaaaaatataactcctggccctcacatattagagaaattcagtagaattttctaagacatttatttctaaggaaaaatactggcctcgtcagttggattgttggtttgctttggcttctgtgaacatacatattgttgtgttgcttaccgagcacctcccttctagtgtgacagaaatacccagacagtattttttcaatgctttccagaaaaaaactggcatcattcactcactactcatggcccttaaactgagacctataggcagaattttttaagttcaaaaatttaaacgacaataataaaacaagagtgaaatataaaagagaagatttttcactcttttgtctgcattttgacaataagaattacagaataatgcacaaaatcaaattcagtgagattcatttttaaataaagtcatcccagtgttttcatatttgctaagcttggaaagaatctgccttcaaaatttactctaccctctgtttctaaagttcagtatgaatctttccattgtttgaaggcaaacactggctcagactactaggcagatggttaaaacagcccaggtttttttacttagatcagtatcagaaaaattcaaaatatttttaaacaaatatgaaagaatcaaaaaggcttacatcattgtaagtattctcttttaaacaaaatacattaaatcaaaaataaacattgcttactattttgcatctggacaaagtacaagatattgaaattacctgtatgggaaaatattaaagcggacataattgttacagaattcactctcacacttttttattttttaccaagtacagcacactgttgcattattccatcttctaacttcatgatggtgacatttctgacccagcagctgaattcatgtccttttccaaatcctgccaatgtcttagaaacagtgaactgagcaatttcagagtgaaccccgcccttacaaagcacataaagaataccaagaagcttggtatcaagcctatgaaatacaaaataaatgtgaaaaataaatgctggccagctcaacatttgaatttagtttttgcaaatgcaaaatttcctctaaaaatttatgattagtacctggtaaactatttcatcaaatagaaaagcaggagacttacaaacatttctcacacttctaacagtaacaatttcctacttatcattgataatatgtcaaaagctaaggaaatccagaatgacatggaccatgtagaacaataaggttggaataatttcccttagggccaagcaggaatagagaataaagttcagaagggctgtacaaggtcattagttttgtgttttcatacatatatatatatatatgaaaaatctgtttatataagaagtaaatgtatataaagtttgtagtgaataaagtattttcaagttgtggtaattatattgaatatgtttaatgtatttacaccctttgcatatgtgataatgtgacagatttaatttctattttttctttaaaaacattaaaactaatattaaaagtaaaa

SEQ ID NO: 5673 - DNA, 6163 bp, Homo sapiens
atctgatcctgggctcccagctggagaggcggaggcagctccagggggctggaagtggaagcgcagcggcagaaggagagggagagagaaagagagagaggctaattaaaaaaggatactccgagggaagagagcaagggcggtgcgccgccaaggaccaactagcggcggagcttcgatcttgcctaggcgcggagagctcccaacctgggctggaaccttgcccagcacaggtggctgctacaccccatgtaaaaagcggaaaataaaatgaagattttccagcgcaagatgcggtactggttgcttccaccttttttggcaattgtttatttctgcaccattgtccaaggtcaagtggctccacccacaaggttaagatataatgtaatatctcatgacagtatacagatttcatggaaggctccaagagggaaatttggtggttacaaacttcttgtgactccaacttcaggtggaaaaactaaccagctgaatctgcagaacactgcaactaaagcaattattcaaggccttatgccagaccagaattacacagttcaaattattgcatacaataaagataaagaaagcaagccagctcaaggccaattcagaattaaagatttagaaaaaagaaaggatccaaagcccagagtcaaagttgtggacagaggaaatgggagtagaccatcttcaccagaagaagtgaaatttgtctgtcaaactccagcaattgctgacattgtaatcctggtcgatggttcatggagtattggaagattcaacttcagactggttcggcatttcttggaaaacctggttacagcattcgatgtgggctcagagaagacacgaattggtcttgcacagtatagtggtgaccccagaatagaatggcacttgaatgcatttagcacaaaagatgaagtgattgaagctgtccgaaacctcccatataaaggaggaaatacactaacaggtcttgctttgaactacatttttgaaaatagcttcaaaccagaagcaggatcaaggactggagtatccaaaattggcattttaatcacagatggaaaatcccaagatgacattattccaccatctagaaatcttcgtgagtctggtgtagaactgtttgccataggggtgaaaaacgcggatgtgaatgagctgcaggagatcgcctctgaaccagacagcactcatgtgtacaatgttgccgaattcgatctgatgcacacagttgtggagagtctgaccaggactctctgctctagagtggaagaacaggacagagaaattaaagcctcagcccatgccatcactgggccgcctacggagttgattacttctgaagtcactgccagaagctttatggttaactggactcatgccccaggaaatgtggaaaaatacagagttgtgtattatcctaccaggggtggaaaaccagacgaggtggtggtagatggaactgtatcttccacagtgttgaaaaacttgatgtctttaactgaatatcagatagcagtctttgcaatctatgcccacactgctagtgaaggcctacggggaactgaaactacacttgctttaccgatggcttctgaccttctactgtacgacgtgactgagaacagcatgcgagtcaaatgggatgcagtgcctggggcctcaggttacctgatcctttatgctcctctaacagagggcctggctggggatgaaaaagagatgaaaattggagagacccacacagatattgaattgagtgggttgttgcccaatacagaatacacagtcacagtttatgccatgtttggagaagaggccagtgatcctgttacgggacaagaaacaacattggctttaagtccaccaagaaacctgagaatctccaatgttggctctaacagtgctcgattaacctgggacccaacttcaagacagatcaatggttatcgaattgtatataacaatgcagatgggactgaaatcaatgaggttgaagtcgatcctattactaccttccctctgaagggcttgacacctctcacagagtatactattgctattttctccatctatgatgaaggacagtcagagcctctgactggagtttttaccaccgaggaagttccagcccagcaatacttagaaattgatgaggtgacgacagacagttttagggtgacctggcatcccctctcagctgatgaagggctacacaaattgatgtggattccagtctatggggggaagactgaggaggttgtcctgaaagaagagcaggactcacatgttattgaaggcctggagcccggtacggagtatgaagtttcactattggccgtacttgatgatggaagcgagagtgaggtggtgactgctgtcgggaccacacttgacagtttttggacagaaccagctacaaccatagtgcctaccacatctgtgacttcagttttccagacgggaatcagaaacctagttgtaggtgatgaaactacttctagcctgcgggtaaaatgggacatttctgacagcgatgtgcagcagtttagggtgacctacatgacagctcaaggggaccctgaggaagaagtcataggaacggttatggtgcctggaagccagaacaacctccttctgaagcctctgcttcctgatactgaatacaaagtcacagtgactcccatctacacggatggcgaaggcgtcagcgtctccgctcctggaaaaaccttaccatcctcggggccccagaacttgcgggtgtccgaggaatggtataaccggttgcgcattacgtgggaccccccatcttccccggtgaaaggctatagaattgtctacaaacctgtcagtgttcctggtccaacactggaaacgtttgtgggagctgacattaacaccatccttatcacaaacctcctcagcggaatggactacaatgtgaagatatttgcctcccaggcctcaggcttcagcgacgccctgacaggcatggtgaaaacattgttcttgggtgttaccaatctccaagccaaacatgttgaaatgaccagcttgtgtgcccactggcaggtacatcgccatgccacagcctatagggttgttatagaatccctccaggataggcaaaagcaagaatccactgtgggtggagggacaaccaggcattgcttctatggacttcagcctgattctgaatataaaatcagtgtttatacaaagctccaggagattgaaggacctagtgtgagcataatggaaaaaacacaatcacttcctacacgaccaccaacttttcctccaaccattccaccagcaaaagaagtatgtaaggcggccaaggctgacctggtatttatggtggatggatcctggagcattggagatgaaaatttcaataagatcatcagctttctatacagcactgttggagccctgaacaagattggcacagatggaacccaagttgcaatggttcagttcactgatgatcccagaacagaatttaaactaaatgcttacaaaaccaaagagactcttcttgatgcaattaaacacatttcatacaaaggaggaaatacaaaaacaggaaaagcaattaagtatgttcgagataccttgttcactgcagagtcaggtacaagaaggggcatcccaaaggttatcgtggttataactgatggaagatcacaagatgatgtgaacaaaatctccagggagatgcaattagatggctatagcatttttgcaattggtgtggccgatgcagattactcggagttggttagcattggcagtaagcccagcgcacgccatgtcttctttgtggatgactttgacgcctttaagaaaatcgaagatgagttaattacttttgtctgcgaaacagcatcagcaacctgtccagtggtacacaaggatggcattgatcttgcaggatttaagatgatggaaatgtttggtttggttgaaaaagatttttcatcagtggaaggggtttctatggagcctggtaccttcaatgtgtttccatgttaccaactccataaagatgccctggtttcccagccaaccaggtacttgcacccagaaggattgccctccgactacacaatcagttttctattccggattcttcctgacactccacaggagccatttgctctttgggagattttaaataaaaattctgacccattggttggggttattttagacaatggtgggaaaactctaacatatttcaactatgaccagagtggggattttcaaactgttactttcgaaggacctgaaattaggaaaattttttatggaagctttcacaagctacacattgttgtcagtgagactttggtcaaagtggttattgactgcaagcaagtgggtgagaaggcaatgaacgcatcagctaatatcacgtcagatggtgtagaagtgctagggaaaatggttcgatcaagaggaccaggtggaaactctgcaccgttccagttacagatgtttgatattgtttgctccacatcatgggccaatacagacaaatgctgtgaacttccaggcctgagagatgatgagtcttgcccagaccttccccattcctgctcctgttctgaaaccaatgaagtggctctgggaccagcgggcccaccaggtggtccaggactccgaggaccaaagggccagcaaggtgaaccgggtccaaagggaccagatggccctcggggtgaaattggtctgccaggacctcagggtccacctggacctcaaggaccaagtggtctgtccattcaaggaatgcccggaatgccaggagaaaaaggagagaaaggagatactggccttccaggtccacagggtatcccaggaggcgttggttcaccaggacgtgatggctcaccaggccagaggggccttccgggaaaggatggatcctcgggacctccaggaccaccagggccaataggcattcctggcacccctggagtcccagggatcacaggaagcatgggaccgcaaggcgccctgggaccacctggtgtccctggagcaaagggggaacgaggagagcggggtgacctgcagtctcaagccatggtgagatcagtggcgcgtcaagtatgcgaacagctcatccagagtcacatggccaggtacactgccatcctcaaccagattcccagccactcctcatccatccggactgtccaagggcctcctggggagcctgggaggccaggctcacctggagcccctggtgaacaaggacccccaggcacaccaggcttccccggaaatgcaggcgtgccagggaccccaggagaacgaggtctaactggtatcaaaggagaaaaaggaaatccaggcgttggaacccaaggtccaagaggcccccctggaccagcaggaccttcaggggagagtcggcctggcagccctgggccccctggctctcctggaccaagaggcccaccaggtcatctgggggttcctggaccccaaggtccttctggccagcctggatattgtgacccctcatcatgttctgcctatggtgtgagagatctgatcccctacaatgattaccagcactgaagtggaaatcctccactctggttccattggccccagacatttagctgtggatacagaactgtcctgtcaaccaccaccaccaccaagcccctgcccctaacaatggacactctgcttccctgcttcttctgcatccctgccttcccactttcaaacctcttgcccactctgctccaaacatgatggagtgataacatcggaacttaaccaaatcatatatgtctattttaatagacactgactgctccatgtcagcctggatagaggtatatgatcgtgtgccaagaatttatcccagactcccctgtgtgacagcttcataataaagttacttaactgtgcctcttcctccttcctctccccacacaggatggatgggcatctttctccttgaccaccctactctcccttcctcccctgatcacctcccctccctgctcttccctggtgatggacttctaacatgagattttttaaaaaaatttctatttcttttataattttgctgagttttcagggtttcttctgtaaataaaacataatatttaaa

SEQ ID NO: 5674 - DNA, 630 bp, Homo sapiens
ccctgagggccctttctctttccatctcaggaactcaaacatgaccaggaagatcttcacaaataccagggagcggtggaggcagcagaatgtcaacagcgcctttgccaagctgaggaagctcatccccactcaccctccagacaaaaagctgagcaaaaatgaaacgcttcgcctggcaatgaggtatatcaacttcttggtcaaggtcttgggggagcaaagcctgcaacaaacgggagtggctgctcaggggaacattctggggctcttccctcaaggaccccacctgccaggcctggaggacagaactctgcttgagaactaccaggttccttcacctggtccaagccaccacattccttagtgtggctctggctgtcatctcccagggcagcacttgcccagaaatcactgcctgtggacagacttttgcatgttccagagttgacctgatgataactcgtgaagcatgaattctagcttcctgggaggtggctcagagacagctgcagggagctgaaagaagccatgaggaatgtcacttgtgggccgccaccccccagggatgtcaggtagagcggcctacctctgcctattttaaatccaggttctgcataagacttttgg

SEQ ID NO: 5675 - DNA, 8226 bp, Homo sapiens
ggagcaggagcctcgctggctgcttcgctcgcgctctacgcgctcagtccccggcggtagcaggagcctggacccaggcgccgccggcgggcgtgaggcgccggagcccggcctcgaggtgcataccggacccccattcgcatctaacaaggaatctgcgccccagagagtcccgggagcgccgccggtcggtgcccggcgcgccgggccatgcagcgacggccgccgcggagctccgagcagcggtagcgcccccctgtaaagcggttcgctatgccggggccactgtgaaccctgccgcctgccggaacactcttcgctccggaccagctcagcctctgataagctggactcggcacgcccgcaacaagcaccgaggagttaagagagccgcaagcgcagggaaggcctccccgcacgggtgggggaaagcggccggtgcagcgcggggacaggcactcgggctggcactggctgctagggatgtcgtcctggataaggtggcatggacccgccatggcgcggctctggggcttctgctggctggttgtgggcttctggagggccgctttcgcctgtcccacgtcctgcaaatgcagtgcctctcggatctggtgcagcgacccttctcctggcatcgtggcatttccgagattggagcctaacagtgtagatcctgagaacatcaccgaaattttcatcgcaaaccagaaaaggttagaaatcatcaacgaagatgatgttgaagcttatgtgggactgagaaatctgacaattgtggattctggattaaaatttgtggctcataaagcatttctgaaaaacagcaacctgcagcacatcaattttacccgaaacaaactgacgagtttgtctaggaaacatttccgtcaccttgacttgtctgaactgatcctggtgggcaatccatttacatgctcctgtgacattatgtggatcaagactctccaagaggctaaatccagtccagacactcaggatttgtactgcctgaatgaaagcagcaagaatattcccctggcaaacctgcagatacccaattgtggtttgccatctgcaaatctggccgcacctaacctcactgtggaggaaggaaagtctatcacattatcctgtagtgtggcaggtgatccggttcctaatatgtattgggatgttggtaacctggtttccaaacatatgaatgaaacaagccacacacagggctccttaaggataactaacatttcatccgatgacagtgggaagcagatctcttgtgtggcggaaaatcttgtaggagaagatcaagattctgtcaacctcactgtgcattttgcaccaactatcacatttctcgaatctccaacctcagaccaccactggtgcattccattcactgtgaaaggcaaccccaaaccagcgcttcagtggttctataacggggcaatattgaatgagtccaaatacatctgtactaaaatacatgttaccaatcacacggagtaccacggctgcctccagctggataatcccactcacatgaacaatggggactacactctaatagccaagaatgagtatgggaaggatgagaaacagatttctgctcacttcatgggctggcctggaattgacgatggtgcaaacccaaattatcctgatgtaatttatgaagattatggaactgcagcgaatgacatcggggacaccacgaacagaagtaatgaaatcccttccacagacgtcactgataaaaccggtcgggaacatctctcggtctatgctgtggtggtgattgcgtctgtggtgggattttgccttttggtaatgctgtttctgcttaagttggcaagacactccaagtttggcatgaaagatttctcatggtttggatttgggaaagtaaaatcaagacaaggtgttggcccagcctccgttatcagcaatgatgatgactctgccagcccactccatcacatctccaatgggagtaacactccatcttcttcggaaggtggcccagatgctgtcattattggaatgaccaagatccctgtcattgaaaatccccagtactttggcatcaccaacagtcagctcaagccagacacatggcccagaggttcccccaagaccgcctgataataatttggtatttggaggctcctgtgtcactgcaggaactaaaggaggctaaatccatgcctgatggaggagaagagttctatggttatctgcaaattctggccagacaacatcttgacgtcactccttagcttccataacctagccaagcaagaagttgcctttccaagacaaagcagtgtgctctaatgactaacccctcaaagtactatgccactttaactatagacccatctcctcgatcaatcaggatggcaagatggagctgaggagctcagcaacatcaagtctggagttggtctttaactcaactagctcgtttagacgtgtctgaacaccacatcacctgacagcacggggtggtttcccagtaaaatttacaaactcagctcaagggcagctgtgttgctttcctttccttgactgctgagaaactttttgacagggaacaatggaaacacaccttctgagctgaaacaaacaaacagaaacaaaacatactaaccagcaaaatccccaaatcatcaatcttgggttctcttgaagggcaggagtgtgttttatcttctcccgtcggagcaaacactatagatgtcctccctaaaattctgtcttccctagagcagccttgtaaattagctagggtcctagggttgaggcctaaatcaacttaaaattgtctctaaatatgtacctggatgtgtttgtacttgcagagcatgccctcttcatgtgcctagggctagtaactccctgtggcagaggcatgtaaagtattctgactttttttttttcaacttaattccatttccaatgaaatggatttttaaaaattttctccagagtgtgccatacttctccagctattatagttaatgtgtgtgtatccttgtgtatatgtgtgtttgtgtgtgcatatgtgttttcctagtggttacatgcttactaggcaattatgtaaataagcacagattcataggccagctaggcctgaggaaagaagacattataaagggagggagtattttaacattagctaaagctatcacacaaggcacccattctgctcccctcaacagccacagcccacttcgtccttgtcttaccaataaggggaaaggctggaggtgatatttttcacagaaccgcagaggttttgaacatatttgcaacattactttgagtacacatgagcaaaaattctgaattacatccaggaccccagaagctcattagatcaaagagtgcggggcccctcagagttaccagagattatctgcagacttcagtgcaatcgaatgaccatggtccattttgatggtcagaggtaggactgaaaaacgggtagaaacaattgctttagcgcttccttctgtactttgcctattaatgttttgtctttcaaaaatatattttctcctaattgtttaattggccaaataatggctgctttgggagttgtttgtatgccttggaaggccatggcctgcactttaaaaataagctaagtccattctgcccagcacgagcattaggacagagaatgcacttattttaggatccttaaaaattgcttcttttatggcacactgggttgacgactcatctcgtgggagccttcatggcacattgctgctgttctgcaggtcccaatacaattccttccccctctcagtgccacggcccccccattgctagctacaacaatttgatatcatattcccttttcaactccaaaggagatgataagaagctatcaaataatgctttaaaaaagcaacttgagtttcttaaaagaaaggaaatgaatacatgctgcataattacatttaaaatgtaagccatgttattataagccgcactgagatgaagatttgttagcaaaccagtttcaagcacactcacagtgaagtaaaatcatgtttttagcatctgaccattgggtaatattattctttgttatcaaaagagaaatatcacccaagtatagtatacttagacctcctagaggaaacactccagtcctaagcttggtgtctgaaaagaaaaacaaaaataaagattatggatttaggtcagggagacagagtgatattctgaagactgtgtttactccctcatcatcggccaaccaagatggagttctgcatcctgcacatatcagacatttcagtccaatttcaccaaagcatcagtgatgttctagaagcatcccagcagatggaggatcctaatgtatttgttctgggtatttcccaaggcccagcctgactggagtgtgtgtaccaacaggatgaatccaatcaagctacgcccccattttggtttcggattggccactcttgcatgtgctagtagattgtggaccaggaccagctgagcaaacacagttgcagagtagcctcctatgttgctaagaagctcctgctacccaggtgctttgaacaattgagtgctccctctggttaagtagagatggcaccaccggagtttttcttggatgtgaggctcaatcctttacggcagctattataacaaagtgaaggttttctccctgggaaatgcagcttttctctgtctttactaattctgccagcctgtgagagtaaccaccgtagctgggcttcttctcagattaattgtcatgccaggtctccttcctggggagctgtgatgctgctctgaggttgattgctgaggttgtagtgggtttttgtttgtttttgtttagtttttcttgattgttcttctttctcttgaatggcaagagaagaaacactttctctaacccacggccaggaaggaaatggggagagagctacttcttagttcaacctggttgccacataaaggaatctctctccttggactcagcccctaactggaagcaagagccactgccctctgagactgagagagcagcccgaggaggagatgaatccattctgccctttgtttgggtttgcttcctgtcagtgagagaatgctgaggcagttcctgttatgtgaaactttcatttttaaaaccaggacagtcctaaacagactggaatgagttggtcaatcccagttggtataggcccaatgatttttgctagtaagataggattgtcttcctcacccaaaatgccttcaagtgccctaaaatgggtattttaaaataagaataaataatgtagatttagtagaaaacctggaaaacataagaaacaaagatgaaacgaaaagtcccatgtaattccaccagttagagttaaccactgatatcgtttggatatatggctttctagtcttgtggatatccttttaatctcttgtaatataaagtctgaccatatgtgtccttgcatttgtttgtactggactctgttaatatttctatagtaatggctcactttggggagattgtgctgcacagtgtgtaggaagcacattgggtgtattattcccagttttgtattttgtatttccttggagatgtgcaggggttaagagcgggggtctggccatagctggccacgtcagactctcatatggtaagtatcacagagcacatgaggcctgtgttatgcgctggaaagactcaggaaatgagaggctctcttgttctgacaaggcaggctgagagctctcatttagggtcatcactccagataactccaaatgcagtttattgctcaactgaagcagatgatcactttttgcctccaagttcttcaccctagctagctcctttcaaagagccgagtatgctggatcttaaagggccaaactagttacatctcatacatttcctgatgtttagggatgccttcacttccatcaaggataccttggctgtgcaaggacctctgatagctggagtctccttttggtcactcccagctttgcttaaacttgatggagtttgctgtccagtgatccccggatctttcatcatgaaagccttccttcctctcctgatgtctcaggcctctagacctagactggggttctggcaaggaggcctctatcaatagtatgacatccaataatatgttagtgttgatattttgcacagtaatattaagtttaagagattataaaaatgagttcaaatgaataagttcctgtgatgtaagagattagatatgtgtgatttcagaaccaaaggcaggggggaatcccagaaagaaaacaataatataatcctagtttctatatattatttttattcattactgtatatgggtagagatcaatattctttcttatgctgttactattaattaacacattttttaaccatgccattgaacttttgggtgcattaaagtggaacccaagctcctcattagataataatggcatttggactgagtgccatattcctaaatttccaataaagtggttgatatagagaggacaggataaagccctatagtgtgcagttatatcaaaacagctagtctccactttagggaatgcctttactagagattacatgaaatgtctgcttataaaataagcagagatggcaccactaagcagccacctgaattgttttcctacaggaatgattacttttcagatccatttatgttttcatgctcaatacttactccccttccctgcaacacccaaagagtttacttttgcaagtcatttggtcttcagtctactactgaggaatagagaggcactaactgctttacccaggatcagaactcatgttcttaccttctattaatagagtacttgagccagatggactaactggtctcacattttctctatcttggttttacttccataaacatcaatatctttacccacatgatttttccatcctcccatttttttccatatgtattagggttcaggaactatgatgctaatgatcacatttcttcctagttcctaatttcattagtgccatttcctgatatctacagaaacaattatcaatacatgtagctgcttgagccttatttagaaggctagcctttcttttccaagtgctgtcagaatgtatacatttagtctgtctttttcccttttaggagtctttgttctgggttgatggcaaaattcctctttttacatgtgagatttttgatttcactgaattctacctagatttttatggacattggattttaaagaggaaaacactcattttcttagtaagatattggtgatacatagctatgccattgatttccatactcctgagctttggggagggagacagtggccaagtagcaggcagaataagatcatcactcatgtcctgaatcaatcacactttccttctcggattgtgtatatgctctgccacttcctacatattacatcctgagtttttaagtaaagtggatcttagccagatttgagtctaatggctgattcatcggcatagttcttggcgttaacatctcagtgtcctctttagttctctttgaggattcatgtcattgagggcctttgtgcctccacttgtctcagtatgaggaagaactttggtgtgagggcggagctatgtgaagggttgctgggttgggggattagttcatatggtccccatgccatctatttacttttggagagaggggactttgagtgggtgggtatggatagatgttcctcaaggaaaccctgctggctaatgggcactacatctgtgtattactgtgattctctctgtaagctccccatgtggccaaggacccccctcctaccagggcacttcctgccacctcattgcactggtctcaaccattcagcctgctgctgctgcaccatgttgggctgcggtaggatagggaaggggttctgttgattgctaaatgttgcctaactttatttccctctcccacatttcatgcaagggagcggacctaacacatgacttgcattctcttcctatgttcagaaactccagggcttgcccacgtgtatgtatgagtgaccaatggagcttggaattctttatctatatgatctgtccgaaaatgagatcttttgtactggaatttgtgatgtagttgatcattcagagccaaacgcatataccaataaagacaagactgtcatata

SEQ ID NO: 5676 - DNA, 2121 bp, Homo sapiens
cgggaacccaggcggggcgagccgcgggagagtggagggcaggcgcctgggctgggggcggggaccaggcggggcagggggcagggagaggagggcggcgggagcctgagccggaatcgcagcgtgagcaggtggagccgcgttgggagcccgccgggtcgagctgagtaaggcggcgggctcggcgggggccatggagctgctaaagctgaaccggagcgtgcagggaaccggacccgggccgggggcttccctgtgccgcccgggggcgcctctcctcaacagcagcagtgtgggcaacctcagctgcgagccccctcgcattcgcggagccgggacacgagaattggagctggccattagaatcactctttacgcagtgatcttcctgatgagcgttggaggaaatatgctcatcatcgtggtcctgggactgagccgccgcctgaggactgtcaccaatgccttcctcctctcactggcagtcagcgacctcctgctggctgtggcttgcatgcccttcaccctcctgcccaatctcatgggcacattcatctttggcaccgtcatctgcaaggcggtttcctacctcatgggggtgtctgtgagtgtgtccacgctaagcctcgtggccatcgcactggagcggtacagcgccatctgccgaccactgcaggcacgagtgtggcagacgcgctcccacgcggctcgcgtgattgtagccacgtggctgctgtccggactactcatggtgccctaccccgtgtacactgtcgtgcaaccagtggggcctcgtgtgctgcagtgcgtgcatcgctggcccagtgcgcgggtccgccagacctggtccgtactgctgcttctgctcttgttcttcatcccgggtgtggttatggccgtggcctacgggcttatctctcgcgagctctacttagggcttcgctttgacggcgacagtgacagcgacagccaaagcagggtccgaaaccaaggcgggctgccaggggctgttcaccagaacgggcgttgccggcctgagactggcgcggttggcgaagacagcgatggctgctacgtgcaacttccacgttcccggcctgccctggagctgacggcgctgacggctcctgggccgggatccggctcccggcccacccaggccaagctgctggctaagaagcgcgtggtgcgaatgttgctggtgatcgttgtgcttttttttctgtgttggttgccagtttatagtgccaacacgtggcgcgcctttgatggcccgggtgcacaccgagcactctcgggtgctcctatctccttcattcacttgctgagctacgcctcggcctgtgtcaaccccctggtctactgcttcatgcaccgtcgctttcgccaggcctgcctggaaacttgcgctcgctgctgcccccggcctccacgagctcgccccagggctcttcccgatgaggaccctcccactccctccattgcttcgctgtccaggcttagctacaccaccatcagcacactgggccctggctgaggagtagaggggccgtgggggttgaggcagggcaaatgacatgcactgacccttccagacatacgaaacacaaaccacaactgacacaggaaaccaacacccaaagcatggactaaccccaacgcacaggaaaaggtagcttacctgacacaagaggaataagaatggagcagtacatgggaaaggaggcatgcctctgatatgggactgagcctggcccatagaaacatgacactgaccttggagagacacagcgtccctagcagtgaactatttctacacagtgggaactctgacaagggctgacctgcctctcacacacatagattaatggcactgattgttttagagactatggagcctggcacaggactgattctgggatgctcctagtttgacctcacagtgacccttcccaatcagcactgaaaataccatcaggcctaatctcatacctctgaccaacaggctgttctgcactgaaaaggttcttcatccctttccagttaaggaccgtggccctgccctctccttccttacccaaactgttcaagaaataataaattgtttggcttcctcctgaa

SEQ ID NO: 5677 - DNA, 1780 bp, Homo sapiens
agctaaccctcgggcttgaggggaagaggctgactgtacgttccttctactctggcaccactctccaggctgccatggggcccagcacccctctcctcatcttgttccttttgtcatggtcgggacccctccaaggacagcagcaccaccttgtggagtacatggaacgccgactagctgctttagaggaacggctggcccagtgccaggaccagagtagtcggcatgctgctgagctgcgggacttcaagaacaagatgctgccactgctggaggtggcagagaaggagcgggaggcactcagaactgaggccgacaccatctccgggagagtggatcgtctggagcgggaggtagactatctggagacccagaacccagctctgccctgtgtagagtttgatgagaaggtgactggaggccctgggaccaaaggcaagggaagaaggaatgagaagtacgatatggtgacagactgtggctacacaatctctcaagtgagatcaatgaagattctgaagcgatttggtggcccagctggtctatggaccaaggatccactggggcaaacagagaagatctacgtgttagatgggacacagaatgacacagcctttgtcttcccaaggctgcgtgacttcacccttgccatggctgcccggaaagcttcccgagtccgggtgcccttcccctgggtaggcacagggcagctggtatatggtggctttctttattttgctcggaggcctcctggaagacctggtggaggtggtgagatggagaacactttgcagctaatcaaattccacctggcaaaccgaacagtggtggacagctcagtattcccagcagaggggctgatccccccctacggcttgacagcagacacctacatcgacctggcagctgatgaggaaggtctttgggctgtctatgccacccgggaggatgacaggcacttgtgtctggccaagttagatccacagacactggacacagagcagcagtgggacacaccatgtcccagagagaatgctgaggctgcctttgtcatctgtgggaccctctatgtcgtctataacacccgtcctgccagtcgggcccgcatccagtgctcctttgatgccagcggcaccctgacccctgaacgggcagcactcccttattttccccgcagatatggtgcccatgccagcctccgctataacccccgagaacgccagctctatgcctgggatgatggctaccagattgtctataagctggagatgaggaagaaagaggaggaggtttgaggagctagccttgttttttgcatctttctcactcccatacatttatattatatccccactaaatttcttgttcctcattcttcaaatgtgggccagttgtggctcaaatcctctatatttttagccaatggcaatcaaattctttcagctcctttgtttcatacggaactccagatcctgagtaatccttttagagcccgaagagtcaaaaccctcaatgttccctcctgctctcctgccccatgtcaacaaatttcaggctaaggatgccccagacccagggctctaaccttgtatgcgggcaggcccagggagcaggcagcagtgttcttcccctcagagtgacttggggagggagaaataggaggagacgtccagctctgtcctctcttcctcactcctcccttcagtgtcctgaggaacaggactttctccacattgttttgtattgcaacattttgcattaaaaggaaaatccactgctc

SEQ ID NO: 5678 - DNA, 1726 bp, Homo sapiens
gaatctacaataagacaaatttcaaatcaagttgctccactatactgcataagcagtttagaatcttaagcagatgcaaaaagaataaagcaaatgggaggaaaaaaaaggccgataaagtttctggctacaatacaagagacatatcattaccatatgatctaatgtgggtgtcagccggattgtgttcattgagggaaaccttattttttaactgtgctatggagtagaagcaggaggttttcaacctagtcacagagcagcacctaccccctcctcctttccacacctgcaaactcttttacttgggctgaatatttagtgtaattacatctcagctttgagggctcctgtggcaaattcccggattaaaaggttccctggttgtgaaaatacatgagataaatcatgaaggccactatcatcctccttctgcttgcacaagtttcctgggctggaccgtttcaacagagaggcttatttgactttatgctagaagatgaggcttctgggataggcccagaagttcctgatgaccgcgacttcgagccctccctaggcccagtgtgccccttccgctgtcaatgccatcttcgagtggtccagtgttctgatttgggtctggacaaagtgccaaaggatcttccccctgacacaactctgctagacctgcaaaacaacaaaataaccgaaatcaaagatggagactttaagaacctgaagaaccttcacgttgtctaccttcataacaacaatatctctgtagttggatcaagtgacttctgcccacctggacacaacaccaaaaaggcttcttattcgggtgtgagtcttttcagcaacccggtccagtactgggagatacagccatccaccttcagatgtgtctacgtgcgctctgccattcaactcggaaactataagtaattctcaagaaagccctcatttttataacctggcaaaatcttgttaatgtcattgctaaaaaataaataaaagctagatactggaaacctaactgcaatgtggatgttttacccacatgacttattatgcataaagccaaatttccagtttaagtaattgcctacaataaaaagaaattttgcctgccattttcagaatcatcttttgaagctttctgttgatgttaactgagctactagagatattcttatttcactaaatgtaaaatttggagtaaatatatatgtcaatatttagtaaagcttttcttttttaatttccaggaaaaaataaaaagagtatgagtcttctgtaattcattgagcagttagctcatttgagataaagtcaaatgccaaacactagctctgtattaatccccatcattactggtaaagcctcatttgaatgtgtgaattcaatacaggctatgtaaaatttttactaatgtcattattttgaaaaaataaatttaaaaatacattcaaaattactattgtatacaagcttaattgttaatattccctaaacacaattttatgaagggagaagacattggtttgttgacaataacagtacatcttttcaagttctcagctatttcttctacctctccctatcttacatttgagtatggtaacttatgtcatctatgttgaatgtaagcttataaagcacaaagcatacatttcctgactggtctagagaactgatgtttcaatttacccctctgctaaataaatattaaaactatcatgtg

SEQ ID NO: 5679 - DNA, 3361 bp, Homo sapiens
gaggagcttcgcggtgccagcctctgcaggtcctctgagggagcaacatcagggctccctcaggttcagaggtcgcctctagcttcccaggccagtcagccacggagcccgtgggcaggaagggcagcaggatggctgccaaggaccagttggaggttcaagttatggccgcccaggaaatggagcttgcaggaaaggatccagtaagtcatgagcatgaggaaagaaaacctgttacagagacaaaggagggagatgtaactgatgagcatggggaaagaggatcttttgctgaaacagatgaacacacgggggttgataccaaggagctagaagatattgcagctgacattaaagagcatcttgctgcaaagagaaaaaggattgaaaagattgcaaaagcttgcagcgaaataaagaacagaattaaaaatgttttgagaacaacacaactaaaaaggcagaaacgtgattatagaatttctctgaagttgccgaatgtccttgaagagttcatcacagatgagcagaaagatgaggaaggagatggagaaaaggaagaacaaattaaaatatttcaagagcaacaaaagaggtggcaacaagatgggaaaggaactgaaagagattgagccaccacacgagcaattcacaaaggtctgttctatttggtaacacaatacgttcttataaaatacaacacatgcataaaaatagaagacaatctgcttgtttctgaatgtatggaaagacattttggttatacattttaaattacttaccattttcactttgaatgtgttgttccagatttaacataagtagtaaataacataaaataacataaaacagtatttttaggattcatgaatagttttgtaggagttatttagaacaggaaaaggtaaattggaaattttacctagaaatatacatcttgtgtataaaaattgataccttatgaacacattaatgaagactttattttcagtttttaggagatcagcgacaaatctttagtggaaggcagaaagtccataagtcctttctggatgtcttttttacttgtgttgtttcaagagttttagttaaataggaagtaggcaaatgtaactactgagtatctcttttgttttctgctgtaatgtaggagtgttttatggcatattcactttcaaaattattagtgactagtaatggttttacatgacaatttgtaatcataagagatggttcagatgtataacagaatgggaaagccagcagattattaacatgttgtgaattgtgaattatctgctgtcgtacagcacattagcaaattgtcatcggacaatgaccgcttcttcatgtagatgtatattatttaggaagcaatggaattcccttctgggaggtaagatattctttttaataaccttgtggaaagacatgttcatatgtcactcctctacactaactgagatgtgttaaataaactgggaaaagagtttgaaaatagaattttcaagcaactcaaagattatctatacacaaaacggttatttatatagaagtcacaagtagagaacatgttgctataatgttccccagaaaccatttattaattggtatgaacatgagactagaaaagttttcctgtcaatgttaatgctacatgttaccacttagggtaggaacttcggtatcatcttggactcttctgagtccattatctttcacatacagttttcatgaggcaagttttactctgcaatggtccttaaatttcttttttttaaattgccactgaggcaaccctagttcaagaactcattcttccttgcttgtactattaaactcttttctgagttctctcttctcttctgagccacccttcattgatcagaaatactatcttcctaaaactcttcccttcctaaaatgcttctagcccttcactcttcccagcctatcagtggtatccacatgtcagttcttagatattcagagactctcccctttacatgaccccctcttaggcttgttttactgccttctgtctttcttcccgcctctccaggttgacagccttctctgaacgacctctccattactctcatgctttgctcatgctcttccctcacaatgcttttaaagtccttttttttttttgatcgattgaaatcttttgccaactaagtggacatcagtctccatttttggctacatgtccgagtgagttgctcttccacagcagttacataagttttgtattattttttttattcgtgcatatttgctcatgtcacaggaatatggaagagattgtgtattcattttttacatcttcctcagcattaacataccactttttagggagtaggaactgttgaactatttgttgagagaatagtatatatttcaaacatagttatgttttctctaacttgatgaggtcatgtcacagaccattttatcccttcagtggaaaccatgttatgtcgactattagtgataacaaatgggtcactatctggtgaaaaaatatggtatttcatgatctaagactaccagtctttttctgtttttgctccatcttgaccataacatattcatcaaaccattttcttcaagcaaagtacatgactgttggacctgctataataatatttcactaaaatctggcattaaaaattttaagtatttggagctccatgtactgattacagtttttaaatttgaaataaatgaccagcatcctttgaatattaaaagctgtttccttttgacatttaatttactctctttaaaatgtgagttgtaaagtgatggtttgtcagtgaactagactttttgttttagagtgtgaggacttggaagagtataatgaaagccctctttttggtgaagagagtcaacttaaaaaataaattgccatgttccaaaataatattgtggtaattgtaagtagtgcatattttatcttaaaaactcaggattgatgtaagcactggaatattttatttgtagaaatgtgtatcgcaattacttaaatttatttttttgaaacagctgcagcaagagttggcacttattcagatgtatcttcaacctctgttattctggtgactgacaaaagaacttgaacctatgttatatgatacatgcataacttgagctacactaaaccacatgacagtgtttagttaattcttgtataaattagtatatctcttctattattagtctgtttgttaaatgccagaccacgtttctatgatctgttgaatgaaccctagacagttctgtgagaaagcagcaattgcacagttacatacacagtcaattaaattttaacattaaagataatttagtttta

SEQ ID NO: 5680 - DNA, 995 bp, Homo sapiens; identical to SEQ ID NO: 4378

SEQ ID NO: 5681 - DNA, 2944 bp, Homo sapiens
caagagctttcaaatagaactatggtggagaaaagtagtattgatgaaaattccatttctttagaaaaagaagtccgacatgtacaggaacaaaacttagacattttaaaaactgatctttctcttaaatccttttctgaagaaatctatagtgaatcatgtgccctacttccaacctcatctgcagatatagaagaaactgatctttctgagaaaagttgtcctctagaaaatggaggcagaagttccatctcacatttgaaaaaagcagcaagtgaggaaaagcctttaggggttggtgaaatggaagaagaatgcactctagaaccagagttggcagcatttccaaagcaggatggtgggacacaggaatatacagatgccactttggaagaccacagaggtgatgttcaggaagctgacacactccatagacagctctccctgagtcagtgcttcccactcttgatgactgaagaacaacagaatccaggtgaacaaataagtacaaacattcatgcctctggagaagaaaaatgttatgaagaagttcaagttcagaatgaagcttctttctccactttagaaggagaaatgatagaaactagtttttctcaaaatattcctaaattagatgaggcacataccactgaggcagcagaatctgagacctccctaacacaatatttacttgctgctggaaagcgtgaggttcctgaaactaaagacaccagagaccaggcaaagcttgtccagagtgaatcaatcacttcaatggaggtggaagaagtaactttcaacactgtgtatgaatactacaaccagaaacaggaatcactaggtcgtccactttctcctgagtctgacatttccattggtgtgggaagtacaaccagtgaagaaatatctgagttagatcagttttataccccaccatcatctgttgaatattttgaatctccaaagtcccctgacttatattttaatccttcagatataactaaacaatcctcaatacattcaggaggtgagacagttgaaagatattccacacctttaggggaagttgctgaaagatattcaacaccttccgaaggtgaggtaggagaaagatactccacacccccaggggagacactagagagatactccacacctccaggagagactctagagagatactccacacccccaggggaggcactagagagatattctattcctactggaggaccaaaccccactggtacttttaaaacatatccatcaaaaatagaaagggaagacggtacaccaaatgagcatttctacacacctacagaagagaggggttcagcttatgaaatatggcgttccgattcatttggtacacccaatgaagccattgagccaaaagacaatgaaatgcctccatcttttattgaacctctgaccaaaaggaaggtatatgaaaacacaacactaggcttcattgttgaagttgaaggtcttccagttcctggtgtgaaatggtatcgaaataaatctttactagagccagatgaaagaatcaaaatggaaagagtgggtaatgtgtgttcactggaaatttctaacattcaaaaaggagaagggggagagtacatgtgtcatgctgtaaacatcataggggaagcaaagagctttgcaaatgtagacataatgccccaggaagaaagagtggtggcactaccacctccagtaacacatcagcatgtcatggagtttgatttggaacacaccacatcatcaagaacaccttctcctcaagaaattgtcctggaagttgaattaagtgaaaaagacgttaaagaatttgagaagcaggtgaaaatagtgacagttcccgaatttactcctgaccataaaagtatgattgtgagtctagatgttcttccatttaattttgtagatccaaatatggattcaagggagggagaagacaaagaactaaaaattgatttagaagtatttgaaatgcctcctcgctttataatgcctatttgtgattttaaaattccagaaaattcagatgctgtattcaaatgttcagtcatagggatcccgactcccgaagttaagtggtataaagaatatatgtgtattgagccagataatattaaatacgtgattagcgaggagaagggaagtcacactcttaaaattcgaaatgtctgtctttctgatagtgcaacatacaggtgcagagctgtgaattgtgtaggagaggctatctgtcggggattcctcaccatgggagattctgaaatatttgctgtgatagcaaagaaaagcaaagtgactttaagcagtttaatggaagaattggtcttaaagagcaactacacagacagtttttttgaatttcaggtggtggaagggcctcccaggtttatcaaaggtatttctgactgttatgcaccaataggtacagcagcatattttcagtgcttagttcgtggctctccaagacccacggtttactggtacaaagatggaaaattagtccaaggaagaaggttcactgttgaggaaagtggcacagggttccataacctgtttataacaagcttagtaaagagtgatgaaggagagtataggtgtgtagctacaaacaaatcaggaatggctgagagctttgcagcactcaccttaacttaaaatgtaatgttttagtgcctcagtaattattagcattgatctgagtgctttcatattttccaaattatgtggatctaataaacttccaaacaggtccaccatatttgaattcattaccttggagacccctaaagaaataatctctatgtagaaatctcatctttgtaatacatgtaaatattttgttatctgaactgtggaatcatcacttgtgtcaatcatgctgtgtaatatcaaacacaattaaatctctccttggctacct

SEQ ID NO: 5682 - DNA, 1099 bp, Homo sapiens
ccacaccgcgctcagcgccttcactgccatccccgctgtccttgccgcccccgccatgggcctagagctgtttcttgacctggtgtcccagcccagccgcgccgtctacatcttcgccaagaagaatggcatccccttagagctgcgcaccgtggatttggtcaaagggcagcacaagagcaaggagttcttgcagatcaacagcctggggaaactgccgacgctcaaggatggtgatttcatcttgactgaaagctcggccatcctgatttacctgagctgtaagtaccagacgccggaccactggtatccatctgacctgcaggctcgtgcccgtgttcatgagtacctgggctggcatgccgactgcatccgtggcacctttggtatacccctgtgggtccaggtgttggggcccctcattggggtccaggtgcccgaggagaaggtggaacgcaacaggactgccatggaccaggccctgcaatggctggaggacaagttcctgggggacaggcccttcctcgctggccagcaggtgacactggctgatctcatggccctggaggagctgatgcagccggtggctctcggctatgaactgtttgagggacggccacgactggcagcatggcgtggacgagtggaggctttcctgggtgctgagctatgccaggaggcccacagcatcatcttgagcatcctggaacaggcggccaagaaaaccctcccaacaccctcaccagaggcctatcaggctatgctgcttcgaatcgccaggatcccctgaagggtctgggatgggggccaggagattagcaacaaggattcattctgttacttacttgcccctttttatctttccctcttgccccagtcccttctctccagcttcatgtgaagctctgcacagacaagacactcagtgtccttggcagtgctgctactcctcaggtgcagcatacataaccagtaagagactaaatctgcaatatataaagagctcctacaaatcagtaacatgaagaacactcaaaaattggcaaatgtcatcagtgttttaaacagaataaagattccaaacactttgaatagagaa

SEQ ID NO: 5683 - DNA, 2802 bp, Homo sapiens; identical to SEQ ID NO: 1451

SEQ ID NO: 5684 - DNA, 4293 bp, Homo sapiens
gtccccagcgcgtgcgcggggccgtggccgaggcctgcgcgccgcccggccgcctgcactgcgcgcgcgcccaccccgcgtgggaggcagcgggaggggcccggagaggtgtggagcggcgcggcgggaggctccgtgggcggccacgggagacagcgccggcgggagcgcgcctctcggcctttcctccgcgcccccgcgtccccagccggccgctccgagaggacccggaggaggcaggtggctttctagaagatgaccatagaggaccttccagattttccattagaaggaaatcctttgtttggaagatacccatttatattttctgcttctgataccccagttatcttttccatttctgcagcaccaatgccttcagactgtgaattttctttctttgatcctaatgatgcatcatgccaggaaattctttttgatcccaaaacttcagtttcagaattatttgccattttgagacagtgggttcctcaggtccaacaaaacattgacattattggaaatgagattcttaagagaggttgcaatgtgaatgatagagatggattgacagatatgactcttttacattatacctgcaaatctggagctcatggtattggtgatgtggaaacagctgtaaaatttgcaactcagcttattgacctgggagcagacattagtttgcggagtcgctggacaaacatgaatgctttgcattatgctgcttattttgatgtccctgaacttataagagtgattttgaaaacatcgaaaccaaaagatgtggatgccacttgcagtgattttaattttggaacagctttgcatattgcagcatacaacttgtgtgcaggtgctgtgaagtgcctcttggagcagggagcaaatcctgcatttaggaatgacaaaggacagatccctgctgatgttgttccagacccagtagatatgccgttagagatggctgacgccgcagccactgctaaggaaatcaagcagatgcttctagatgcggtgcctctgtcatgtaacatctcaaaggccatgctcccaaattatgatcatgtcactggcaaggcaatgcttacgtcacttggcctgaagttgggggatcgtgttgttattgcaggacagaaggttggtacattaagattttgtggaacaactgaatttgcaagtgggcagtgggctggcattgaactggatgaaccagaaggaaaaaataatggaagtgttggaaaagtccagtactttaaatgtgcccccaagtatggtatttttgcacctctttcaaagataagtaaagcaaaaggtcgaaggaagaatataacacacactccttctacaaaagctgctgtacctctcatcaggtcccagaaaattgacgtagctcatgtgacgtcaaaagtaaatactggattaatgacatcaaaaaaagatagtgcttctgagtcaacactttcattgcctcctggtgaagaacttaaaactgtgacagagaaagatgttgccctgcttggatctgtcagcagctgctcctctacatcttctttggaacacagacagagctaccccaagaaacagaatgcaatcagcagtaacaagaagacaatgagcaaaagcccttccctttcatccagagccagtgctggtttgaattcctcagcaacatctacagcaaataatagccgttgcgagggggaactccgcctcggagagagagtgttagtggtaggacagagactgggcaccattaggttctttgggacaacaaacttcgctccaggatattggtatggtatagagcttgaaaaaccccatggcaagaatgatggttcagttggaggtgtgcagtattttagctgttctccaagatatggaatatttgctcccccatccagggtgcaaagagtaacagattccctggataccctttcagaaatttcttcaaataaacagaaccattcttatcctggttttaggagaagttttagcacaacttctgcttcttcccaaaaggagattaacagaagaaatgctttttccaaatcgaaagctgctttgcgtcgcagttggagcagcacccccaccgcaggtggcattgaagggagcgtgaagctgcacgaggggtctcaggtcctgctcacgagctccaatgagatgggtactgttaggtatgtgggccccactgactttgcttcaggtatctggcttggacttgagctccgaagcgccaagggaaaaaatgatgggtcagtgggtgacaagcgctatttcacctgtaagccgaaccatggagtcttagttcgaccgagcagagtgacctatcggggaattaatgggtcaaaacttgtggatgagaattgttaagcttctaaaatattaaataagctcaaatatatatatttggtgtaaataaagagtccatggtaaatggtttactttatttagccatattaaaattttgaaaatatagttatcttcttaaaaaccattataacaattcagagagagttctttacaaagccatgaatatgaactatggggaatcatggttcttttaaagcaattttcaaaataagtaccaattaaagctttaggttccaagaagattctgggactcaggaagaaaaagtgccatcaggtgaccagctgttgcatttcttgcttattctgttttgtttttgcacatcataatggatttttcttagtgccctaattgtgaagggtttctctagctttggttatgtgtaatgttcacgtgacctttttttgtcaatcatttttggaatttttctttctttctgtgctttattactaataagtccaatgagtgagtagtagctagatgactagtatgtagttttatattttggtaaaattatttgccctttcagaaatgcctcatctaaagatacatgataattttggagttggaaggggccttagaggctctccagctctgcttcttgcccattgccaaatactgaaatggaagcccgtcttacctggggtcactaactggttggttaactgagctaagaatagactgtgggtctcctcacttgtggcccagtgctctttctgctatacaaaatgtctaatctcagatttttcttctgctgcttgactgcttcatctggatgaactacaaaaaacccatgattaaggtttatgaattcaagtaataattagattttttttgcacagacttacttaacttccttattggatatgtttgtaacacataaacacaaagcacttttcaaacatgatgcacttttatctttgtgaataatttactgtcctttcctcctgggatatgagaaacattttaaaaaacgtatttaacagaagagagcaaataaagatatatcaggaaggatgtattagttatttacttaaatgtttataatatctggattttttttgttttgttactcatagaactggtgttgtttgctgtttttatttctctaattgttgcagagttctgcctgttacaaagctacagaactgtattgtttttattttccttcttgagcacatgttaacaaactaagcttcacattagagtgatgtcataatgtaaaatgtttgcattgtggttaggtattgaagtttatgtcctgtctgtgtaaagattcatcttttattgtaaatatttagactttaccacagaaatattggaacagtttgctttataagattaaaaagcatccttcagaatggagcttgccttgtgcttagaaataatatgttgaactattttgcaatatactattttaaatctaaattctgtcacttcgctgcctttttaaaatagtgtggtatttcaaatattgctagagctattttcctgaaatacatttgcaaaataaggctgctttgtaatcaaggaatatttttattgattgaaggaaatgactgtactgcgattcaaaagtaaacttattttattatacagattatttcttaaaaactctatttataccttaacatgaaatccatgaccacaccaaacttggttattcataatttttcctgttaaatataaaacactgtaagttaaaaacagtaatgccaacattgaatttatttttgaggtcaaagaaccagttgttctctttatatttagatgaggatgattgagtccatatactatgtatgtttacatatactatacatgcacattaggtgttttcatttgtgttttgcttatgaaatgtcatttaaagttcacttcttgagcatcaataaaaagggaagctgtgtggttttggaatggta

SEQ ID NO: 5685 - DNA, 5465 bp, Homo sapiens
ccacaatgctcccatgacaaggagctgacaagttccattttccgtcgcgggcatcttggaatcatgactcccacaatgccttgggcacttggtcgacagtggggccgcctctgaaaaaaaaatgtgagaggttggtactaagaagtgcctttcctgacgtctctgctgcttggaaccgcttctagagcagtctctgcttttgccttgcttgctgccagctagactgtgacgacagcacatccaccctccacctctagcccagacacccccatttctacttataatcaagagaaaagctctaagtatctggcattgccctaggctgctttagtgttaaaagaaaagtttgctgaaaaagtaagatatcttctgccaggaaatcaaggaggaaaaaaaaaatcattttctcgattttgctctaaactgctgcatctgtctatgccaaactaatcaataccgattgcaccaccaaactccattgcaaattcagctgtgaggagattccctttcagacaactttgctgaaagcagcttggaaattcggtgtcgaagggtctgccacgttttcatgcttgcattttgggctccaaattggcactgggaaggggttactgagagcacaaggctgataccaggccctacttttaaacgttcatctacttacaatcctagtatttctctaaaaaccaaaacctctttgaattaacagtttcatgctgtgaatttctagtgggagatcttttccttgatattgacgacacaattttccatgtacttttaaagcagggagtggggaaaagtattttgaggggacattttcatcatcagttcagctttttttttttggttgttgctcttttttgggggggttgggtttgttggtttcactgaaacatttaactacctgtaaaatctaaacatggctgttagtgtcacaccaattcgggacacaaaatggctaacactggaagtatgtagagagttccagagggggacttgctcacggccagacacggaatgtaaatttgcacatccttcgaaaagctgccaagttgaaaatggacgagtaatcgcctgctttgattcattgaaaggccgttgctccagggagaactgcaaatatcttcatccacccccacatttaaaaacgcagttggagataaatggacgcaataacttgattcagcagaagaacatggccatgttggcccagcaaatgcaactagccaatgccatgatgcctggtgccccattacaacccgtgccaatgttttcagttgcaccaagcttagccaccaatgcatcagcagccgcctttaatccctatctgggacctgtttctccaagcctggtcccggcagagatcttgccgactgcaccaatgttggttacagggaatccgggtgtccctgtacctgcagctgctgcagctgctgcacagaaattaatgcgaacagacagacttgaggtatgtcgagagtaccaacgtggcaattgcaaccgaggagaaaatgattgtcggtttgctcatcctgctgacagcacaatgattgacaccaatgacaacacagtcactgtgtgtatggattacatcaaagggagatgctctcgggaaaagtgcaaatactttcatccccctgcacatttgcaagccaagatcaaggctgcccaataccaggtcaaccaggctgcagctgcacaggctgcagccaccgcagctgccatgggaattcctcaagctgtacttcccccattaccaaagaggcctgctcttgaaaaaaccaacggtgccaccgcagtctttaacactggtattttccaataccaacaggctctagccaacatgcagttacaacagcatacagcatttctcccaccaggctcaatattgtgcatgacacccgctacaagtgttgttcccatggtgcacggtgctacgccagccactgtgtccgcagcaacaacatctgccacaagtgttcccttcgctgcaacagccacagccaaccagatacccataatatctgccgaacatctgactagccacaagtatgttacccagatgtagaattttcatcactaaacaatcatgctaaagaggaaaggacagtgtgcttggttagagtaaaggacgaggtcattagccatattgtatatatcgtcaagcaacacacacaaaagttcctcagccacaagacatccacatattgcatgttaaccagaagaaaagacaacattttccggaaatccactgcacactgttgcctatacactttgtacatttaattgatatttgtgctgaggtgatattcctgtctaaaagaacaacattgtctttcttttctagcacagagttatgcattcaaagatgcatacctagttagtttcctatatattcatgccatcttgaaaagacagactatggtgtaaccatgattctattatgtattggtacgtctgtagaccaagatataattttttaaaaataagtttatttctttcaaggtttacaaataacaaaggtgcaccttgtatttaaaattgccattatagatgagagcgtgcatgcacagtcatttttgtttaagagtaatatttttaatgtaatagattgtaagacgtggtgagggagggatctgacagagatgaatgtgccaagcaaaaccacaactgtgtatattttaaagcacatcatggctttaagtaccatgttgttaaggattctcatgaagtgccatagactgtacatcaaattagagtattatttcttcagtgttattgttttcagagccacattttgttgcatatttgctagtactaatcagtcaaagggcaccattctttttttttttttttgaaaccaaagctgtctcagaaatggccaatttaactttacagtaacaatagacagcacaacacaaactctctcaatacagataaactcacacatactggagatatatatataatagatatatataaaattattttaatgcattgtagtgtaatatttatgcatactatactgtataacatgttattcaaaagggattgccatttctgagacacagtaacaaaaaaatgaggaaattattttgcttctatttatagcctctgtcaaaagtcaaaagactataaatgctttgcaaaaatggtttcacgtttgcttaaatgcttcatcacagtcacattcaaaatagtgactctaaacaaagaagaaagcagcactgtcatcagatgcatgataaaccaaaatatgaaaatgggaaatgtttaattaacctagtaattgggtgggttaagtacatgggtgaattttatatgtgatttttgttttgttttgttttgttcagattaactgcttatagccttagaaagccttttacaaaattaaaaaaaaaatagatgtgcattcagtttttaagaatggaatcatccaaaggaattcctttttttgaggtttggatgttgcagctagtaaaggatatttttgctctgttcagcagttctaaaaattgctgaagtaggggccaggtcactggtagttatagtatggaatgggagaagtgaaagttcagttatagaactttccatacttccaagtttactgcaagtttttatgcttgagagagatgctttctaatataagactgatgtgttgattttactgattgtactgtacatctattaaagccttagattattacattacgggttggaacccataccaatgtaatttcaatcgtgttaagaaagtaatggtgacttcacatgttattgtagttagttacattatagaatattacttatttttcttgttaaaatgtagtttttcatttcctacatttattagattttcattttctattaacaattgaataccatttcagtttatagacttgttttattagattttaccaatgaatttttcaaaatacaaaaaaaagtagtttttccttcataacatactcagttttgaattacatgtagtgtcacatgaatattcgtattgttaactaaatgatttatattttactgatttaatattacagtgtaagaatgtcagtcattgttagttcttgtctagttttcattaaaagaacaaagatcttttatatggatatcttataaatatataatcattgctaagtaagaagttaagttgttgctatcgcaacaatcctggcagacaattgagtaatattttgatgatttattttgtttgtaattagttattataagaagatctagatcctagatattagaataaaatttattttctactgtatccatttcaaatgttaaaatattgtttaatatttttgaaatccctgagtatcaggccttgttataaataagctgcataatcaataaatagaacaagggactttttgttgataatccaaatactcaaagtttacgtaatgaaaattatagcgtgtgtgcaaactcttgagggttgattatgctgcaatttagcatgttggaacgtctagggagaaggttgactttttgcacttctgtatatagtcaaaagagagaaacctgtataatagtaagatcttattttgaataaaaacgtctataattacaaggagttttgttaaggctaatacaatgacagactgagcaaaattgcttgcaaaagtggcacagagttagcactccataccccttcaaacatgttgctttgctttcttgtggacagcttgtagtttgccaggattttttcagctggaaagatacgccatcctttcaaaccctcatgactgacaaaaactccatggggccaaatctgcctgaagatcattaccaaaaatagcaggtacttctaccattaaggtgaaatcatggatcagatattccttacatttttcaaaactactgcatgtttaaaacttcaacaaaaaaagagagaaagaactatactaagaacatatattattcagatcagtttctgccaatttcagtggtttattgttcacaaaaaaatcttcaaaacaagtattgactttcacaaaatttaaatcataaacaggcaaaccaaacagcacactgtagctatagttgttatgtgattgttttttaattgctgtaggatcctgttctttcagcaggtgaaaaataaaacgcagttcaaatttcatggttttaattttcaactcagaagcactcaaaaatgcaaaatgtgataatgggcacttgtttaaaagaattagtgtatccagccttcactccagctggttaaaaatgttgcacttatcagcaaccctaccactttcatctgctgaaaggacaaatgtgcttggttttactattatgtaatcacaacttactttctgcttgtagttgcttaaaattatgtattttgtcttgggctgcaatttgttttatgcttattttattattactgcagtagttgactttgctgtatggaaaaataaagtgaaattgccctaataaaa

SEQ ID NO: 5686 - DNA, 3442 bp, Homo sapiens
aacctgctgtcctatgaaggcctctaggtcaccggtgctaaagccctcctttctccaccctccttaagtggaggtaaacgtcccagcaggaagtcaaggctggattggcgctcttcgcgagcaccctgggaacgggagtctgggtcacgggtgctagagccctcccctctcctcccggccggtgtatgggaaattgtccccgcagaaagtaaaggctggccaggccgcccccagcacgtagagggaatgagtcaggctccggctccacactggcacgtagtgggcggatcgcgccggcgctgagtaggaaggagcttcagccgccagcccggaacgcatcataggttagcttttcaagacacttcctgcatctctgacctgttgcacctctgttatcttggcacctctgttatcttagcagcaagcacctgcctcagctgacccttgagccataacccataagctcctgaaaagtacatcaagtctaaagtgaaccagctaactcattaagactggaatcatgagcaacaatggagcagacctaacctttggttacatctcctgttttgtagctatccttttgtttggctcaaattttgtgccacttaaaaaatttgatactggtgatggaatgtttctccagtgggttctttgtgctgccatatggttggttgccttggttgtcaatctgatattacattgtccaaagttttggccttttgcaatgcttgggggctgcatttgggcaacagggaacattgctgttgtcccaattatcaaaaccattggtttaggccttggaatcttaatctggggatcatttaatgccttaactggctgggcaagctcaaggtttggctggtttggattggatgcagaagaagtatcaaatccgctgctaaattacattggagctgggctatcagtagtaagtgctttcatatttttgttcatcaaaagtgaaataccaaataacacgtgttccatggataccactccattaataacagagcatgtgatcaacacaacccaagacccctgttcctgggtggataaactttctacagtacaccaccgcatagtgggctgcagtcttgcagtgatatctggagtactctatggatctacatttgtgccaatcatctacatcaaggaccacagcaaaagaaatgatagtatatatgcaggggcaagccaatatgatttagactatgtgtttgcgcacttcagtggcatctttcttacaagtactgtctactttctggcctactgcatagccatgaaaaatagtcctaaactatatcctgaagcagtcctaccaggattcctgtcaggagtactttgggctatagctacctgctgttggttcatagcaaatcactctctgagtgctgtggtcagttttccaataatcactgctggtccaggatttatagctgcaatgtggggtatcttcatgtttaaggaaataaagggtctacaaaactacctattaatgatacttgcattttgcatcatcttgactggagccttatgcactgctttttctaaaatctaacaatgacaaaaccagcaggtggcagcagtagttaagagaacgcgtctatcggacagcggagagatcatgctgagaaaagagtgcattttcatatagcaaatggatctcagccactgttggagtgggtaaatgatttttttccccaaaaatgtgagaatgaaggaagattgagtttcattcaagtataaaaatgaaaatttcttctgatgaactgtttatgaaggtagtactttactgggtgactaaaatgtctacattattatagcattacatacgaggatgctctttttaccacagtatgtacctagtgttgcataatctagaacacagtatagagtccatatacaaagaagttacagtccatatttctcacctattaccccagtgaagtgaggcagaaataccttgggcgaggagggagagccttaccttctaatggaattagattccaaagatatttggatcctttgtttcataaagtaaatgcatagttggtaactaaatgttaaaaaggccattttattattgttagccaaaacttctgtttatttcaagttaatatcgcccaactctacatcatctacccattttagctcataatgcttttgattatcgccagataaagtccattctcagagaacaaaaatttttcatcattgagaaaatgtgcataacataatacatacatacacaagtatattcacgtacataaatacacacagatatgttgctaaagtgagattgtaggttatcagtaacaatttaaaggaaacaaccactcttttgaatgtacaacttttttttctgaaatacacttttctaaaaccctcttaactggaggtttcctgttttcttcttgttttaactggtggtttccagtaggcaaaataaaatgacaggcatgctagttttttttttttttttttttttttaagaaaactgaaattaagccaggcagggtggcgcactactataatcccagctgctggggcggctgaagtaggagggtcacttagcccaagagtgcaaatctgccagcctaggcaacatagcaaggtcccatctctaaaaaagaaatttaatttaaatttgtaagaaaaaagaaaactgaaacagaactgccagtacaatgtttgttgcaattgtttccaaaactttgagataacgaaacccctattcaaatgtaaattttacccattcccacctgatagtactgtttattactttgctatgcaggagaaacaaaacagctttttatttgtgtgtatactctgaagtcaatgtgcatgggttaaatcccacctctgcttcattttatttgtgtggctttggacaagttcctaagccctctgtgtcaggcccctcattaacaaaatggagtttatgatggcatctacctcacatggttattgtgtggttgaaattagttcaaatctgtaaagtatgttgatgagtatctggtacttggcaaacactatataattgttagctttattattatgtgttgtttgaaggggaaaaaagtttttgtagattggagaacaccatgtaagagctactaagctcaccaccttcccatccaaacaattattactcctctaaatgaatactacttaaaagtgatggagcttctgtttgtttattgaattgctaatacaaataaatatttgactataacttcttatactcattttaattttaacctgaaatgtcattaaattatgctgataaactttgaataaattgtgatacaaaagctatttttctcatttaaatatattttagaattttatattggataacttttaattattctttagttgggatttccaatttatatgcaaaattttaaatgtgaagtaaagcagtttcagaagaaaaatg

SEQ ID NO: 5687 - DNA, 8708 bp, Homo sapiens
gcccgcgccggctgtgctgcacagggggaggagagggaaccccaggcgcgagcgggaagaggggacctgcagccacaacttctctggtcctctgcatcccttctgtccctccacccgtccccttccccaccctctggcccccaccttcttggaggcgacaacccccgggaggcattagaagggatttttcccgcaggttgcgaagggaagcaaacttggtggcaacttgcctcccggtgcgggcgtctctcccccaccgtctcaacatgcttaggggtccggggcccgggctgctgctgctggccgtccagtgcctggggacagcggtgccctccacgggagcctcgaagagcaagaggcaggctcagcaaatggttcagccccagtccccggtggctgtcagtcaaagcaagcccggttgttatgacaatggaaaacactatcagataaatcaacagtgggagcggacctacctaggcaatgcgttggtttgtacttgttatggaggaagccgaggttttaactgcgagagtaaacctgaagctgaagagacttgctttgacaagtacactgggaacacttaccgagtgggtgacacttatgagcgtcctaaagactccatgatctgggactgtacctgcatcggggctgggcgagggagaataagctgtaccatcgcaaaccgctgccatgaagggggtcagtcctacaagattggtgacacctggaggagaccacatgagactggtggttacatgttagagtgtgtgtgtcttggtaatggaaaaggagaatggacctgcaagcccatagctgagaagtgttttgatcatgctgctgggacttcctatgtggtcggagaaacgtgggagaagccctaccaaggctggatgatggtagattgtacttgcctgggagaaggcagcggacgcatcacttgcacttctagaaatagatgcaacgatcaggacacaaggacatcctatagaattggagacacctggagcaagaaggataatcgaggaaacctgctccagtgcatctgcacaggcaacggccgaggagagtggaagtgtgagaggcacacctctgtgcagaccacatcgagcggatctggccccttcaccgatgttcgtgcagctgtttaccaaccgcagcctcacccccagcctcctccctatggccactgtgtcacagacagtggtgtggtctactctgtggggatgcagtggctgaagacacaaggaaataagcaaatgctttgcacgtgcctgggcaacggagtcagctgccaagagacagctgtaacccagacttacggtggcaactcaaatggagagccatgtgtcttaccattcacctacaatggcaggacgttctactcctgcaccacagaagggcgacaggacggacatctttggtgcagcacaacttcgaattatgagcaggaccagaaatactctttctgcacagaccacactgttttggttcagactcgaggaggaaattccaatggtgccttgtgccacttccccttcctatacaacaaccacaattacactgattgcacttctgagggcagaagagacaacatgaagtggtgtgggaccacacagaactatgatgccgaccagaagtttgggttctgccccatggctgcccacgaggaaatctgcacaaccaatgaaggggtcatgtaccgcattggagatcagtgggataagcagcatgacatgggtcacatgatgaggtgcacgtgtgttgggaatggtcgtggggaatggacatgcattgcctactcgcagcttcgagatcagtgcattgttgatgacatcacttacaatgtgaacgacacattccacaagcgtcatgaagaggggcacatgctgaactgtacatgcttcggtcagggtcggggcaggtggaagtgtgatcccgtcgaccaatgccaggattcagagactgggacgttttatcaaattggagattcatgggagaagtatgtgcatggtgtcagataccagtgctactgctatggccgtggcattggggagtggcattgccaacctttacagacctatccaagctcaagtggtcctgtcgaagtatttatcactgagactccgagtcagcccaactcccaccccatccagtggaatgcaccacagccatctcacatttccaagtacattctcaggtggagacctaaaaattctgtaggccgttggaaggaagctaccataccaggccacttaaactcctacaccatcaaaggcctgaagcctggtgtggtatacgagggccagctcatcagcatccagcagtacggccaccaagaagtgactcgctttgacttcaccaccaccagcaccagcacacctgtgaccagcaacaccgtgacaggagagacgactcccttttctcctcttgtggccacttctgaatctgtgaccgaaatcacagccagtagctttgtggtctcctgggtctcagcttccgacaccgtgtcgggattccgggtggaatatgagctgagtgaggagggagatgagccacagtacctggatcttccaagcacagccacttctgtgaacatccctgacctgcttcctggccgaaaatacattgtaaatgtctatcagatatctgaggatggggagcagagtttgatcctgtctacttcacaaacaacagcgcctgatgcccctcctgacacgactgtggaccaagttgatgacacctcaattgttgttcgctggagcagaccccaggctcccatcacagggtacagaatagtctattcgccatcagtagaaggtagcagcacagaactcaaccttcctgaaactgcaaactccgtcaccctcagtgacttgcaacctggtgttcagtataacatcactatctatgctgtggaagaaaatcaagaaagtacacctgttgtcattcaacaagaaaccactggcaccccacgctcagatacagtgccctctcccagggacctgcagtttgtggaagtgacagacgtgaaggtcaccatcatgtggacaccgcctgagagtgcagtgaccggctaccgtgtggatgtgatccccgtcaacctgcctggcgagcacgggcagaggctgcccatcagcaggaacacctttgcagaagtcaccgggctgtcccctggggtcacctattacttcaaagtctttgcagtgagccatgggagggagagcaagcctctgactgctcaacagacaaccaaactggatgctcccactaacctccagtttgtcaatgaaactgattctactgtcctggtgagatggactccacctcgggcccagataacaggataccgactgaccgtgggccttacccgaagaggacagcccaggcagtacaatgtgggtccctctgtctccaagtacccactgaggaatctgcagcctgcatctgagtacaccgtatccctcgtggccataaagggcaaccaagagagccccaaagccactggagtctttaccacactgcagcctgggagctctattccaccttacaacaccgaggtgactgagaccaccattgtgatcacatggacgcctgctccaagaattggttttaagctgggtgtacgaccaagccagggaggagaggcaccacgagaagtgacttcagactcaggaagcatcgttgtgtccggcttgactccaggagtagaatacgtctacaccatccaagtcctgagagatggacaggaaagagatgcgccaattgtaaacaaagtggtgacaccattgtctccaccaacaaacttgcatctggaggcaaaccctgacactggagtgctcacagtctcctgggagaggagcaccaccccagacattactggttatagaattaccacaacccctacaaacggccagcagggaaattctttggaagaagtggtccatgctgatcagagctcctgcacttttgataacctgagtcccggcctggagtacaatgtcagtgtttacactgtcaaggatgacaaggaaagtgtccctatctctgataccatcatcccagaggtgccccaactcactgacctaagctttgttgatataaccgattcaagcatcggcctgaggtggaccccgctaaactcttccaccattattgggtaccgcatcacagtagttgcggcaggagaaggtatccctatttttgaagattttgtggactcctcagtaggatactacacagtcacagggctggagccgggcattgactatgatatcagcgttatcactctcattaatggcggcgagagtgcccctactacactgacacaacaaacggctgttcctcctcccactgacctgcgattcaccaacattggtccagacaccatgcgtgtcacctgggctccacccccatccattgatttaaccaacttcctggtgcgttactcacctgtgaaaaatgaggaagatgttgcagagttgtcaatttctccttcagacaatgcagtggtcttaacaaatctcctgcctggtacagaatatgtagtgagtgtctccagtgtctacgaacaacatgagagcacacctcttagaggaagacagaaaacaggtcttgattccccaactggcattgacttttctgatattactgccaactcttttactgtgcactggattgctcctcgagccaccatcactggctacaggatccgccatcatcccgagcacttcagtgggagacctcgagaagatcgggtgccccactctcggaattccatcaccctcaccaacctcactccaggcacagagtatgtggtcagcatcgttgctcttaatggcagagaggaaagtcccttattgattggccaacaatcaacagtttctgatgttccgagggacctggaagttgttgctgcgacccccaccagcctactgatcagctgggatgctcctgctgtcacagtgagatattacaggatcacttacggagagacaggaggaaatagccctgtccaggagttcactgtgcctgggagcaagtctacagctaccatcagcggccttaaacctggagttgattataccatcactgtgtatgctgtcactggccgtggagacagccccgcaagcagcaagccaatttccattaattaccgaacagaaattgacaaaccatcccagatgcaagtgaccgatgttcaggacaacagcattagtgtcaagtggctgccttcaagttcccctgttactggttacagagtaaccaccactcccaaaaatggaccaggaccaacaaaaactaaaactgcaggtccagatcaaacagaaatgactattgaaggcttgcagcccacagtggagtatgtggttagtgtctatgctcagaatccaagcggagagagtcagcctctggttcagactgcagtaaccaacattgatcgccctaaaggactggcattcactgatgtggatgtcgattccatcaaaattgcttgggaaagcccacaggggcaagtttccaggtacagggtgacctactcgagccctgaggatggaatccatgagctattccctgcacctgatggtgaagaagacactgcagagctgcaaggcctcagaccgggttctgagtacacagtcagtgtggttgccttgcacgatgatatggagagccagcccctgattggaacccagtccacagctattcctgcaccaactgacctgaagttcactcaggtcacacccacaagcctgagcgcccagtggacaccacccaatgttcagctcactggatatcgagtgcgggtgacccccaaggagaagaccggaccaatgaaagaaatcaaccttgctcctgacagctcatccgtggttgtatcaggacttatggtggccaccaaatatgaagtgagtgtctatgctcttaaggacactttgacaagcagaccagctcagggagttgtcaccactctggagaatgtcagcccaccaagaagggctcgtgtgacagatgctactgagaccaccatcaccattagctggagaaccaagactgagacgatcactggcttccaagttgatgccgttccagccaatggccagactccaatccagagaaccatcaagccagatgtcagaagctacaccatcacaggtttacaaccaggcactgactacaagatctacctgtacaccttgaatgacaatgctcggagctcccctgtggtcatcgacgcctccactgccattgatgcaccatccaacctgcgtttcctggccaccacacccaattccttgctggtatcatggcagccgccacgtgccaggattaccggctacatcatcaagtatgagaagcctgggtctcctcccagagaagtggtccctcggccccgccctggtgtcacagaggctactattactggcctggaaccgggaaccgaatatacaatttatgtcattgccctgaagaataatcagaagagcgagcccctgattggaaggaaaaagacagacgagcttccccaactggtaacccttccacaccccaatcttcatggaccagagatcttggatgttccttccacagttcaaaagacccctttcgtcacccaccctgggtatgacactggaaatggtattcagcttcctggcacttctggtcagcaacccagtgttgggcaacaaatgatctttgaggaacatggttttaggcggaccacaccgcccacaacggccacccccataaggcataggccaagaccatacccgccgaatgtaggacaagaagctctctctcagacaaccatctcatgggccccattccaggacacttctgagtacatcatttcatgtcatcctgttggcactgatgaagaacccttacagttcagggttcctggaacttctaccagtgccactctgacaggcctcaccagaggtgccacctacaacgtcatagtggaggcactgaaagaccagcagaggcataaggttcgggaagaggttgttaccgtgggcaactctgtcaacgaaggcttgaaccaacctacggatgactcgtgctttgacccctacacagtttcccattatgccgttggagatgagtgggaacgaatgtctgaatcaggctttaaactgttgtgccagtgcttaggctttggaagtggtcatttcagatgtgattcatctagatggtgccatgacaatggtgtgaactacaagattggagagaagtgggaccgtcagggagaaaatggccagatgatgagctgcacatgtcttgggaacggaaaaggagaattcaagtgtgaccctcatgaggcaacgtgttatgatgatgggaagacataccacgtaggagaacagtggcagaaggaatatctcggtgccatttgctcctgcacatgctttggaggccagcggggctggcgctgtgacaactgccgcagacctgggggtgaacccagtcccgaaggcactactggccagtcctacaaccagtattctcagagataccatcagagaacaaacactaatgttaattgcccaattgagtgcttcatgcctttagatgtacaggctgacagagaagattcccgagagtaaatcatctttccaatccagaggaacaagcatgtctctctgccaagatccatctaaactggagtgatgttagcagacccagcttagagttcttctttctttcttaagccctttgctctggaggaagttctccagcttcagctcaactcacagcttctccaagcatcaccctgggagtttcctgagggttttctcataaatgagggctgcacattgcctgttctgcttcgaagtattcaataccgctcagtattttaaatgaagtgattctaagatttggtttgggatcaataggaaagcatatgcagccaaccaagatgcaaatgttttgaaatgatatgaccaaaattttaagtaggaaagtcacccaaacacttctgctttcacttaagtgtctggcccgcaatactgtaggaacaagcatgatcttgttactgtgatattttaaatatccacagtactcactttttccaaatgatcctagtaattgcctagaaatatctttctcttacctgttatttatcaatttttcccagtatttttatacggaaaaaattgtattgaaaacacttagtatgcagttgataagaggaatttggtataattatggtgggtgattattttttatactgtatgtgccaaagctttactactgtggaaagacaactgttttaataaaagatttacattccacaacttgaagttcatctatttgatataagacaccttcgggggaaataattcctgtgaatattctttttcaattcagcaaacatttgaaaatctatgatgtgcaagtctaattgttgatttcagtacaagattttctaaatcagttgctacaaaaactgattggtttttgtcacttcatctcttcactaatggagatagctttacactttctgctttaatagatttaagtggaccccaatatttattaaaattgctagtttaccgttcagaagtataatagaaataatctttagttgctcttttctaaccattgtaattcttcccttcttccctccacctttccttcattgaataaacctctgttcaaagagattgcctgcaagggaaataaaaatgactaagatattaaaa

SEQ ID NO: 5688 - DNA, 3047 bp, Homo sapiens
tttcactttcgagagtgccgtctatttgccacacacttccctgatgaaatgtctggatttggactaaagaaaaaaggaaaggctagcagtcatccaacagaatcatgagacagactttgccttgtatctacttttgggggggccttttgccctttgggatgctgtgtgcatcctccaccaccaagtgcactgttagccatgaagttgctgactgcagccacctgaagttgactcaggtacccgatgatctacccacaaacataacagtgttgaaccttacccataatcaactcagaagattaccagccgccaacttcacaaggtatagccagctaactagcttggatgtaggatttaacaccatctcaaaactggagccagaattgtgccagaaacttcccatgttaaaagttttgaacctccagcacaatgagctatctcaactttctgataaaacctttgccttctgcacgaatttgactgaactccatctcatgtccaactcaatccagaaaattaaaaataatccctttgtcaagcagaagaatttaatcacattagatctgtctcataatggcttgtcatctacaaaattaggaactcaggttcagctggaaaatctccaagagcttctattatcaaacaataaaattcaagcgctaaaaagtgaagaactggatatctttgccaattcatctttaaaaaaattagagttgtcatcgaatcaaattaaagagttttctccagggtgttttcacgcaattggaagattatttggcctctttctgaacaatgtccagctgggtcccagccttacagagaagctatgtttggaattagcaaacacaagcattcggaatctgtctctgagtaacagccagctgtccaccaccagcaatacaactttcttgggactaaagtggacaaatctcactatgctcgatctttcctacaacaacttaaatgtggttggtaacgattcctttgcttggcttccacaactagaatatttcttcctagagtataataatatacagcatttgttttctcactctttgcacgggcttttcaatgtgaggtacctgaatttgaaacggtcttttactaaacaaagtatttcccttgcctcactccccaagattgatgatttttcttttcagtggctaaaatgtttggagcaccttaacatggaagataatgatattccaggcataaaaagcaatatgttcacaggattgataaacctgaaatacttaagtctatccaactcctttacaagtttgcgaactttgacaaatgaaacatttgtatcacttgctcattctcccttacacatactcaacctaaccaagaataaaatctcaaaaatagagagtgatgctttctcttggttgggccacctagaagtacttgacctgggccttaatgaaattgggcaagaactcacaggccaggaatggagaggtctagaaaatattttcgaaatctatctttcctacaacaagtacctgcagctgactaggaactcctttgccttggtcccaagccttcaacgactgatgctccgaagggtggcccttaaaaatgtggatagctctccttcaccattccagcctcttcgtaacttgaccattctggatctaagcaacaacaacatagccaacataaatgatgacatgttggagggtcttgagaaactagaaattctcgatttgcagcataacaacttagcacggctctggaaacacgcaaaccctggtggtcccatttatttcctaaagggtctgtctcacctccacatccttaacttggagtccaacggctttgacgagatcccagttgaggtcttcaaggatttatttgaactaaagatcatcgatttaggattgaataatttaaacacacttccagcatctgtctttaataatcaggtgtctctaaagtcattgaaccttcagaagaatctcataacatccgttgagaagaaggttttcgggccagctttcaggaacctgactgagttagatatgcgctttaatccctttgattgcacgtgtgaaagtattgcctggtttgttaattggattaacgagacccataccaacatccctgagctgtcaagccactacctttgcaacactccacctcactatcatgggttcccagtgagactttttgatacatcatcttgcaaagacagtgccccctttgaactctttttcatgatcaataccagtatcctgttgatttttatctttattgtacttctcatccactttgagggctggaggatatctttttattggaatgtttcagtacatcgagttcttggtttcaaagaaatagacagacagacagaacagtttgaatatgcagcatatataattcatgcctataaagataaggattgggtctgggaacatttctcttcaatggaaaaggaagaccaatctctcaaattttgtctggaagaaagggactttgaggcgggtgtttttgaactagaagcaattgttaacagcatcaaaagaagcagaaaaattatttttgttataacacaccatctattaaaagacccattatgcaaaagattcaaggtacatcatgcagttcaacaagctattgaacaaaatctggattccattatattggttttccttgaggagattccagattataaactgaaccatgcactctgtttgcgaagaggaatgtttaaatctcactgcatcttgaactggccagttcagaaagaacggataggtgcctttcgtcataaattgcaagtagcacttggatccaaaaactctgtacattaaatttatttaaatattcaattagcaaaggagaaactttctcaatttaaaaagttctatggcaaatttaagttttccataaaggtgttataatttgtttattcatatttgtaaatgattatattctatcacaattacatctcttctaggaaaatgtgtctccttatttcaggcctatttttgacaattgacttaattttacccaaaataaaacatataagcacgtaagaa

SEQ ID NO: 5689 - DNA, 1755 bp, Homo sapiens
tgacagatctatccatctggccatccatccgtgggggtctgcaatggccacctttagccgccaggaatttttccagcagctactgcaaggctgtctcctgcctactgcccagcagggccttgaccagatctggctgctccttgccatctgcctcgcctgccgcctcctctggaggctcgggttgccatcctacctgaagcatgcaagcaccgtggcaggcgggttcttcagcctctaccacttcttccagctgcacatggtttgggtcgtgctgctcagcctcctgtgctacctcgtgctgttcctctgccgacattcctcccatcgaggcgtcttcctatccgtcaccatcctcatctacctactcatgggtgagatgcacatggtagacaccgtgacatggcacaagatgcgaggggcacagatgattgtggccatgaaggcagtgtctctgggcttcgacctggaccggggcgaggtgggtacggtgccctcgccagtggagttcatgggctacctctacttcgtgggcaccatcgtcttcgggccctggatatccttccacagctacctacaagctgtccaaggccgcccactgagctgccggtggctgcagaaggtggcccggagcctggcactggccctgctgtgccttgtgctgtccacttgcgtgggcccctacctcttcccgtacttcatccccctcaacggtgaccgcctccttcgcaacaagaaacgcaaagccaggggcaccatggtaaggtggctgcgagcctacgagagtgctgtctccttccacttcagcaactattttgtgggctttctttccgaggccacggccacgttggcgggggctggctttaccgaggagaaggatcacctggaatgggacctgacggtgtccaagccactgaatgtggagctgcctcggtcaatggtggaagttgtcacaagctggaacctgcccatgtcttattggctaaataactatgttttcaagaatgctctccgcctggggaccttctcggctgtgctggtcacctatgcagccagcgccctcctacatggcttcagtttccacctggctgcggtcctgctgtccctggcttttatcacttacgtggagcatgtcctccggaagcgcctggctcggatcctcagtgcctgtgtcttgtcaaagcggtgcccgccagactgttcgcaccagcatcgcttgggcctgggggtgcgagccttaaacttgctctttggagctctggccatcttccacctggcctacctgggctccctgtttgatgtcgatgtggatgacaccacagaggagcagggctacggcatggcatacactgtccacaagtggtcagagctcagctgggccagtcactgggtcacttttggatgctggatcttctaccgtctcataggctgaggcacatctgtggaccctcataaccctcttaagacccctctcagggtgccactgatgggggatgagggaaggccctctctctactccttgaccccctccatccttgacccccaacacctcaacacacacacacacacacacacacaaaatcacaccattttcatgcctgtcaatccccaccccaccacaaggcaggaagggggtggtgcctgctggggcctagagggggatgcttggggaaacagagaaggggagatccagggcctccccgccttccttcttcctttttatatacaatttgttattgtcaaataaaagtaggaaat

SEQ ID NO: 5690 - DNA, 954 bp, Homo sapiens
ctgacggacagacagacagacaccgcccccagccccagctaccacctcctccccggccggcggcggacagtggacgcggcggcgagccgcgggcaggggccggagcccgcgcccggaggcggggtggagggggtcggggctcgcggcgtcgcactgaaacttttcgtccaacttctgggctgttctcgcttcggaggagccgtggtccgcgcgggggaagccgagccgagcggagccgcgagaagtgctagctcgggccgggaggagccgcagccggaggagggggaggaggaagaagagaaggaagaggagagggggccgcagtggcgactcggcgctcggaagccgggctcatggacgggtgaggcggcggtgtgcgcagacagtgctccagccgcgcgcgctccccaggccctggcccgggcctcgggccggggaggaagagtagctcgccgaggcgccgaggagagcgggccgccccacagcccgagccggagagggagcgcgagccgcgccggccccggtcgggcctccgaaaccatgaactttctgctgtcttgggtgcattggagccttgccttgctgctctacctccaccatgccaagtggtcccaggctgcacccatggcagaaggaggagggcagaatcatcacgaagtggtgaagttcatggatgtctatcagcgcagctactgccatccaatcgagaccctggtggacatcttccaggagtaccctgatgagatcgagtacatcttcaagccatcctgtgtgcccctgatgcgatgcgggggctgctgcaatgacgagggcctggagtgtgtgcccactgaggagtccaacatcaccatgcagattatgcggatcaaacctcaccaaggccagcacataggagagatgagcttcctacagcacaacaaatgtgaatgcagatgtgacaagccgaggcggtga

SEQ ID NO: 5691 - DNA, 1952 bp, Homo sapiens
ctaaaactaatgcttttctcaagaccccgcaactcagcctggaccagtttccctcctccacccacccccgaatcttgagaatcctgtactggggggagggcactgcccccgcaccatgttcttgggagagcagggctccagcgtgacatggctgaagcgcaccaggccgtgggcttccgaccctcgctgacctcggacggggctgaagtggaactcagtgcccctgtgctgcaggagatctacctctctggcctgcgctcctggaaaaggcatctctcacgtttctggaatgactttctcaccggtgtgtttcctgccagccccctcagttggcttttcctcttcagtgccatccagcttgcctggttcctccagctggatccttccttaggactgatggagaagatcaaagagttgctgcctgactggccctggtccgcatcttctctggccgccacccgatgctgttcagttaccagcgctccctgccacgccagcccgtgccctctgtgcaggacaccgtgcgcaagtacctggagtcggtccggcccatcctctccgacgaggacttcgactggaccgcggtcctggcgcaggaattcctgaggctgcaggcgtcgctgctgcagtggtacctgcggctcaagtcctggtgggcgtccaattatgtcagtgactggtgggaggaatttgtgtacctgcgctcccgaaatccgctgatggtgaacagcaactattacatgatggacttcctgtatgtcacacccacgcctctgcaggcagctcgcgctgggaatgccgtccatgccctcctcctgtaccgccaccgcctgaaccgccaggagatacccccggtgagagggccccagtgggttagggatggaggtgtggtcctgtggcctttgggccacgtgggtcctggaaggcagctcacagcccacggtttcctgcagactttgctgatgggaatgcgccccttatgctctgcccagtacgagaagatcttcaacaccacgcggattccaggggtccaaaaagactacatccgccacctccatgacagccaacacgtggctgtcttccaccggggccgattcttccgcatggggacccactcccgaaacagcctgctttccccgagagccctggagcagcagtttcagagaatcctggatgatccctcaccggcctgcccccacgaggaacatctggcagctctgacagctgctcccaggggcacgtgggcccaggtgcggacatccctgaagacccaggcagcggaggccctggaggcggtggaaggggccgctttctttgtgtcactggatgctgagcccgcggggctcaccagggaggacccggcagcgtcgttggatgcctacgcccatgctctgctggccggccggggccatgatcgctggtttgacaaatccttcaccctaatcgtcttctctaacgggaagctgggcctcagcgtggagcactcctgggccgactgccccatctcaggacacatgtgggagttcactctggctacagaatgctttcagctgggctactcaacagacggccactgcaaggggcacccggaccccacactaccccagccccagcggctgcaatgggaccttccagaccagatccactcctccatctctctagccctgaggggagccaagatcttgtctgaaaatgtcgactgccatgtcgttccattctccctatttggcaagagcttcatccgacgctgccacctctcttcagacagcttcatccagatcgccttgcaactggcccacttccgggtcagttgggttccccatccacagcccccgcagggtctcagtccacctgagcccccaagacctgcccctccacggttccttgtggtcgctgccattgtgggtcggccatcttgaattctctcttccaaccattcttgggctggctgg

SEQ ID NO: 5692 - DNA, 2328 bp, Homo sapiens
acagccacactgcagtatgtcaggaacagtcatggagctgttctcattgtttgcctctccttttcctcctttttaccttctggcccctctcttcattcagagatgctggcagagccattccctaaggttgtagcaagtttaatcatcctccatttgtctggggcaaccaagaaaggaacagaaaagcaaaccacctcagaaacacagaagtcagtgcagtgtggaacttggacaaaacatgcagagggaggtatctttacctctcccaactatcccagcaagtatccccctgaccgggaatgcatctacatcatagaagccgctccaagacagtgcattgaactttactttgatgaaaagtactctattgaaccgtcttgggagtgcaaatttgatcatattgaagttcgagatggaccttttggcttttctccaataattggacgtttctgtggacaacaaaatccacctgtcataaaatccagtggaagatttctatggattaaattttttgctgatggagagctggaatctatgggattttcagctcgatacaatttcacacctgatcctgactttaaggaccttggagctttgaaaccattaccagcgtgtgagtttgagatgggcggttccgaaggaattgtggagtctatacaaattatgaaggaaggcaaagctactgctagcgaggctgttgattgcaagtggtacatccgagcacctccacggtccaagatttacttacgattcttggactatgagatgcagaattcaaatgagtgcaagaggaattttgtggctgtgtatgatggaagcagttccgtggaggatttgaaagctaagttctgtagcactgtggctaatgatgtcatgctacgcacgggtcttggggtgatccgcatgtgggcagatgagggcagtcgaaacagccgatttcagatgctcttcacatcctttcaagaacctccttgtgaaggcaacacattcttctgccatagtaacatgtgtattaataatactttggtctgcaatggactccagaactgtgtgtatccttgggatgaaaatcactgtaaagagaagaggaaaaccagcctgctggaccagctgaccaacaccagtgggactgtcattggcgtgacttcctgcatcgtgatcatcctcattatcatctctgtcatcgtacagatcaaacagcctcgtaaaaagtatgtccaaaggaaatcagactttgaccagacagttttccaggaggtatttgaacctcctcattatgagttatgcactctcagagggacaggagctacagctgactttgcagatgtggcagatgactttgaaaattaccataaactgcggaggtcatcttccaaatgcattcatgaccatcactgtggatcacagctgtccagcactaaaggcagccgcagtaacctcagcacaagagatgcttctatcttgacagagatgcccacacagccaggaaaacccctcatcccacccatgaacagaagaaatatccttgtcatgaaacacagctactcgcaagatgctgcagatgcctgtgacatagatgaaatcgaagaggtgccgaccaccagtcacaggctgtccagacacgataaagccgtccagcggttctgcctcattgggtctctaagcaaacatgaatctgaatacaacacaactagggtctagaaagaaaattcaagagaagaactatttatacaaacatggggactgtgaaaagaaaattctatagtgaattgtgaaaagtggacatatttctaaattcattccactgcctttatccaaacttaagaattacagacatttgttattccttcggcaagacatccccgctgcacactgatatgttcatttcgtaatttggttgctggccaccaagtgctccttagtttttaaatacattttgagattaactggaaacttgaagaagaaattagttcccgattaagactatcccaactttatttttattgtcagtttcacttttgtttctatgttgttttatgtctttgttatataattgtacattgtgtgatatgtgaaaaaaaaacacgaatttggatgaaccttgtgttacatgtacattgttttcattatatagacagcttgagaatagtgcgttcctgaatgattttgaacatgctacagtgaaaagtgacagtgtggaccatggaatcaccagctagaggttatggactatacacacctattattatattctgattaaatacaggaaaaagtaacaagtaaaattactagattgcaataaaaaaattcattttttggtctttcctg

SEQ ID NO: 5693 - DNA, 3781 bp, Homo sapiens
cttagaccttggttagatttgaaccaaggccctcctcggcctcccaaagtgctgggattacaggcgtgagccactgcccagctgaaaattgatacatttttcaaatgagaagtatttttttcaaatgggtgttggaaagtgagtttcctcacattgttcatgttgtgacactaggttggtgctatgtaatgacatggatatgaacgagctgcctacgaacctccccgtggacactgtgaagcttcgcatagagaagactgtcatccgcagaatctctgcggaggccttctattacctggtggagctccagtatctctgggtgacttacaattccgtggccagcattgaccccagcagcttttacaacctgaagcaactgcatgagttgcgcttggatgggaattctctggctgctttcccttgggcatctctgctggacatgccccttctgaggaccctggacttgcacaataacaaaataaccagtgtgccaaatgaggcgctcaggtatctgaagaaccttgcctacttggatttatcaagcaacagactcaccacattgccaccagatttcctggagagctggactcatttagtttcaacaccttctggagtcctggacctttccccaagcaggattattcttggctgatagaacgttacggctgtaaaaagctctagcatttatctagtcaactctcccattttgccgatgagaaaacaggctcagcaaggttgcatcacccaggtcacagaattaactaatggttgagcctcatcaggaacccaggcacagtaaagttggtctacaggacaatccttggttctgtgactgtcatatttccaaaatgattgagttgtcaaaggtcgttgaccctgctatagtgcttctggatccactgatgacttgcagtgaacctgagcgcctcacaggaattttgtttcagcgggctgaattggagcattgtctgaaaccatcagtgatgacctcagccaccaaaatcatgtctgctctgggcagtaatgttctactgcggtgtgatgccactggcttccccaccccacagatcacatggaccagatctgacagctcgccagttaattatacagtaatacaagaatctccagaggaaggagtcagatggtccataatgagcttgacaggcatttcttccaaagacgctggggattacaaatgtaaggccaaaaatctggctgggatgtcagaagctgtggttactgtgacagtgcttggcattaccacaactccaataccaccagacacttctgaaagaactggagatcatcctgagtgggatgtccagccgggatctggaagatctacatctgtatctagcgcatcatcatatctttggtcctcttccttctcccccacatcttctttttctgcttctactttgtctcctccctctactgcttccttctctttatctcctttctcctcctccactgtttcttcaaccacaactctgagcacaagcatctcagcaagtaccaccatggccaacaagcgatcattccagctccaccaaggtgggaaaagaaatttaaaggtggcaaagaatggaagtaagcttcctccagccagcacaagtaagaaagaagagctggcattgttggatcaaacaatgcttacggagacaaatgccgcaatagaaaacctcagggtggtcagtgagactaaagagagtgtgacattgacgtggaatatgatcaacaccacacataactctgcagtgactgtgttgtattccaagtatggtgggaaggacctgctgctgttgaatgcagactccagcaagaaccaagtaaccatagatggcttggaacccggtgggcaatacatggcctgtgtctgtccaaaaggagtgcctccccagaaagaccaatgcatcaccttttctactgaaagagttgaaggagatgattctcaatggtctctccttctcgtggtgaccagtactgcctgtgttgttatcttaccattgatttgtttcttgttgtacaaagtttgcaaactgcaatgtaaatcagaacctttttgggaagatgatttggcaaaggagacttatatccaatttgagaccctgtttcccaggtctcaaagtgtaggtgagctctggacacgaagccacagggatgactcagagaaattgctgctttgttctaggtcaagtgtggaatctcaggtgacttttaaaagtgaaggttccagaccagagtattattgctaaggttctgcagctcaggtgcatgtgagctacaaaactagcatctaagggtataattgaccctaggtttggatgacttttggacagactttcacattgtacatgaaaatcacaaatggaatgcttttaagtatgtttaaaaaataccatgagacctctgaactgaaaagacaaataatgttgattttttttcttgtgtggaaaaggtctacagaaataatttttagagtggtgcttaataaattattaatactttttagggtaatgttttagttcttaaaaataagttcatgtgaaagtagcaagtgaactctgtatttaaaaatatagttttttgagtcatgaggaaacattagcaaaaccagctaagccttgatgtttattcatgttcgaagtgcattatagcatttgctgtggatgttttctgacattgcctaatggagagcgtgggatcataaaggattttgtgttcactaaggttaaatctaactcacgggagagagagggctctgtctcttggtaccattatgcattgtgatactatagagttgtgttcatatttcttgtaagaaaaatttttgcttttctttagaaatataggtattagcaaaagtaagtatacaaagaggattatgacaaatagaccatttctttaaaaatggtaactgttgcatttaaacacatcgactgacagattatatggatatttaaaaataactttaaatcaatcttttaatattttgctgtttgctcttatgttctcccttctttcttccttccttgtcttccctccctttccttccttcattctttctttcttctgctctgtcagaagatatacaagtagccaaagcatcacgagccaagctgtttgtcttttgccatattgtcttttgattctcttgataaagagaaagcttttgaaattacttactgccctttgaaagtctgttttacaaccccaaaggatattttaggactttaaaagggaagcttcagtggattcatttggttagattcttttcctaggttaaaaacatcggggaacttaaatacataggaaaggagttcacaaataaaatttagtttttttagaaagagaatattttaataactgtagtatactacaagaaacatctcatggctttaagattaacgatagcgataaggcccactcaagcatctcacagtggtgatattacatgtcacttagcaggatgcaacctggcctagggatttccagaagacaaggccacctcagcacagatgcaactttcataaattttagaacaaagcctaaccttactagattaaacttgctctatgaaagaaacacttggtaattgacccagactgaatacatgtataagaaatgggaaagatctcccaaactctgagaacggtcctcaaatagaagctctcctagtcagttggtcatctgacctctgactatatccggcctatgacaccagccagctcctgctttctgtcttgtaagagcactgctggaataaactacttgagcatta

SEQ ID NO: 5694 - DNA, 3554 bp, Homo sapiens
actaggcagggatgagcaagaggaatggctcacccttgagagctggggtccatagcccaggtcagttctccagctctcccacttaccagccaagacaggaggtgaggattgagatgggatgaacccagcaggcggccatgggttaaaggtcgccatgaatgtaatgtgcccagcacagtgcctgctaaaaggcaacactcccttcctggtctgaagaccaaacaagcagactgtactcaggaaagccagaagaaccttccagctgtctggaccagaaggtgccagcccaggggctgaagaagacgtaatgcccagagcaaaaagcgcctgcagccccctgaagggctgggtgctctggaatagatgagggggcgaaatggggctggggaccagggacggacagggtgggtccagcacctgcctcgcttccgaagggctgctccaacactgaaaaacacccaaccagcttcctttcagaaagactggaatattccaaaacttctcactggaggctccggaggaggtgggctccagctgaaaaggaaatgtggaggcgtgggcgctcccggcctgcatcctgcacctcttacactttggttttcccacagactcctgaagaataggtcagaagaaagggttaaagccttaaaaggggaacaaccattgcggggctcagggaggaggataatgttctttgggctgccgcaccctgatccccggggtcccgaaccctcccgtccctggccaggcctgccagccacagggtgagggcccccttccgccgcaacctgccactctcacaccaatgcgggaccgccttctcttccttccccaccccccaccccaccctgccgtcctttctcccccaatctccgcctctgattggctgagcccccggctccccgctccccctctcctccatccccggtgaaaactgcgggctccgagctgggtgcagcaaccggaggcggcggcgcgtctggaggaggctgcagcagcggaagaccccagtccagatccaggactgagatcccagaaccatgaacctggccatcagcatcgctctcctgctaacagtcttgcaggtctcccgagggcagaaggtgaccagcctaacggcctgcctagtggaccagagccttcgtctggactgccgccatgagaataccagcagttcacccatccagtacgagttcagcctgacccgtgagacaaagaagcacgtgctctttggcactgtgggggtgcctgagcacacataccgctcccgaaccaacttcaccagcaaatacaacatgaaggtcctctacttatccgccttcactagcaaggacgagggcacctacacgtgtgcactccaccactctggccattccccacccatctcctcccagaacgtcacagtgctcagagacaaactggtcaagtgtgagggcatcagcctgctggctcagaacacctcgtggctgctgctgctcctgctctccctctccctcctccaggccacggatttcatgtccctgtgactggtggggcccatggaggagacaggaagcctcaagttccagtgcagagatcctacttctctgagtcagctgaccccctccccccaatccctcaaaccttgaggagaagtggggaccccacccctcatcaggagttccagtgctgcatgcgattatctacccacgtccacgcggccacctcaccctctccgcacacctctggctgtctttttgtactttttgttccagagctgcttctgtctggtttatttaggttttatccttccttttctttgagagttcgtgaagagggaagccaggattggggacctgatggagagtgagagcatgtgaggggtagtgggatggtggggtaccagccactggaggggtcatccttgcccatcgggaccagaaacctgggagagacttggatgaggagtggttgggctgtgcctgggcctagcacggacatggtctgtcctgacagcactcctcggcaggcatggctggtgcctgaagaccccagatgtgagggcaccaccaagaatttgtggcctaccttgtgagggagagaactgagcatctccagcattctcagccacaaccaaaaaaaaataaaaagggcagccctccttaccactgtggaagtccctcagaggccttggggcatgacccagtgaagatgcaggtttgaccaggaaagcagcgctagtggagggttggagaaggaggtaaaggatgagggttcatcatccctccctgcctaaggaagctaaaagcatggccctgctgcccctccctgcctccacccacagtggagagggctacaaaggaggacaagaccctctcaggctgtcccaagctcccaagagcttccagagctctgacccacagcctccaagtcaggtggggtggagtcccagagctgcacagggtttggcccaagtttctaagggaggcacttcctcccctcgcccatcagtgccagcccctgctggctggtgcctgagcccctcagacagccccctgccccgcaggcctgccttctcagggacttctgcggggcctgaggcaagccatggagtgagacccaggagccggacacttctcaggaaatggcttttcccaacccccagcccccacccggtggttcttcctgttctgtgactgtgtatagtgccaccacagcttatggcatctcattgaggacaaagaaaactgcacaataaaaccaagcctctggaatctgtcctcgtgtccacctggccttcgctcctccagcagtgcctgcctgcccccgcttcgctggggtctccacgggtgaggctggggaacgccacctcttcctcttccctgacttctccccaaccacttagtagcaacgctaccccaggggctaatgactgcacactgggcttcttttcagaatgaccctaacgagacacatttgcccaaataaacgaacatcccatgtctgctgactcacctggctggaacaacatgcttactgccaacatgtgggccgaaccacatggccctggctctggaatgcacaagtggctttgcgtgaatctgcgctaagctatgcagtctgctttttcttctcagctctggtagttcttcagaaatgtaccctccaggcacatccactattgcgagggtgagcacgaagggtgggagatgcccatgtcctcaaggcatcacttcctaaatccaaaagcatcggcaggagaaaggactggggacaaatactgtcccttcgggagtagggagggaacactgaggcccatccctggctccttccctaaaagtagagtaaaatggaagcgagcatcctgggattgggggcaagagggggaccgcagggtagctgtgggttccaactgctgtcagagtcagagaggcagccccaagccagcctccctgctttgccagggaatttgggggaggaaggtgacagctgcccagaggctgactcatctgatatttagcactgggtaggatgattgtttctgagcatttttcttaaaggcctcagatctaaat

SEQ ID NO: 5695 - DNA, 3162 bp, Homo sapiens
acagacgtccctgcggggctcctcctgagcgtccctcctgccagccagggtcgcagccgcagcggcggccgcagctcttagcccacacaggacttgtaaactcttactgcacccttctctcccattaggagcttttcctccctccttccccccaacccctctgtcctcctcactttggggaatttaatgctttctttagcatctttttgtgtgcgtgatctaggggaggagacaccccagagctccaactagctctcagctgaattctacttttgtttttatgtcttcctcgcctcctctcgtgtccctcttatctgactgatctgcgaagtctgatgcttctgccagagggagaggaataaatagatgttgctgcttccgaaggcttagacgttgggaaagagcagcctgggcggcaggggcggtggctggagctcggtaaagctcgtgggaccccattgggggaatttgatccaaggaagcggtgattgccgggggaggagaagctcccagatccttgtgtccacttgcagcgggggaggcggagacggcggagcgggccttttggcgtccactgcgcggctgcaccctgccccatcctgccgggatcatggtctgcggcagcccgggagggatgctgctgctgcgggccgggctgcttgccctggctgctctctgcctgctccgggtgcccggggctcgggctgcagcctgtgagcccgtccgcatccccctgtgcaagtccctgccctggaacatgactaagatgcccaaccacctgcaccacagcactcaggccaacgccatcctggccatcgagcagttcgaaggtctgctgggcacccactgcagccccgatctgctcttcttcctctgtgccatgtacgcgcccatctgcaccattgacttccagcacgagcccatcaagccctgtaagtctgtgtgcgagcgggcccggcagggctgtgagcccatactcatcaagtaccgccactcgtggccggagaacctggcctgcgaggagctgccagtgtacgacaggggcgtgtgcatctctcccgaggccatcgttactgcggacggagctgattttcctatggattctagtaacggaaactgtagaggggcaagcagtgaacgctgtaaatgtaagcctattagagctacacagaagacctatttccggaacaattacaactatgtcattcgggctaaagttaaagagataaagactaagtgccatgatgtgactgcagtagtggaggtgaaggagattctaaagtcctctctggtaaacattccacgggacactgtcaacctctataccagctctggctgcctctgccctccacttaatgttaatgaggaatatatcatcatgggctatgaagatgaggaacgttccagattactcttggtggaaggctctatagctgagaagtggaaggatcgactcggtaaaaaagttaagcgctgggatatgaagcttcgtcatcttggactcagtaaaagtgattctagcaatagtgattccactcagagtcagaagtctggcaggaactcgaacccccggcaagcacgcaactaaatcccgaaatacaaaaagtaacacagtggacttcctattaagacttacttgcattgctggactagcaaaggaaaattgcactattgcacatcatattctattgtttactataaaaatcatgtgataactgattattacttctgtttctcttttggtttctgcttctctcttctctcaacccctttgtaatggtttgggggcagactcttaagtatattgtgagttttctatttcactaatcatgagaaaaactgttcttttgcaataataataaattaaacatgctgttaccagagcctctttgctggagtctccagatgttaatttactttctgcaccccaattgggaatgcaatattggatgaaaagagaggtttctggtattcacagaaagctagatatgccttaaaacatactctgccgatctaattacagccttatttttgtatgccttttgggcattctcctcatgcttagaaagttccaaatgtttataaaggtaaaatggcagtttgaagtcaaatgtcacataggcaaagcaatcaagcaccaggaagtgtttatgaggaaacaacacccaagatgaattatttttgagactgtcaggaagtaaaataaataggagcttaagaaagaacattttgcctgattgagaagcacaactgaaaccagtagccgctggggtgttaatggtagcattcttcttttggcaatacatttgatttgttcatgaatatattaatcagcattagagaaatgaattataactagacatctgctgttatcaccatagttttgtttaatttgcttccttttaaataaacccattggtgaaagtctttttttttctcttcttttaaaataaatcagaattgccgtattgaccaggaaaagattatgtatgcacgtgcaccagggttagtttttaaaagtacatggctccataaaaatgctgtagattacagagtgataaaatatgcaggtttttttgtttttgttttttctgttgtgtgtgtgtctgtatttgtgtacatgtgtgtccttgcactcacacccaaggtggattaaaatacaggcctgcaaactggcctgcactttatcatttggatttgtgctgcttaatgctcagcgaaaaatgtctagtaaaatgaattatggttgtcaggagagaggttatttcgacttttgaaccaattgcacatttctcattacccaagctgtggtgagatcccaggggctgtggtgaacaaatgatgcttttatagatggtccctagcttacaatgattcaatttacaatgcttcaatttaacaatttgttgacttacaatgggtttatcaggatgtaacccaatgcatttcaacttacgatattttcagtttcgaatgggtttatccagatgtaaccccatcgtaaatggcggagcatctgtacttccttcctctggcagagttccttagagcctgtgccaattacttgaaagtttcattctctgccatttacatgtgtgctattagtagaaccaaatttctaagctgtggcgtgctgaaaataaaatgcttatgaagcaaaaa

SEQ ID NO: 5696 - DNA, 2493 bp, Homo sapiens
catactccatacctgggatttccgcctcgccgctctccgactgcttccagacatgcaggggccctgggtgctgctcctgctgggcctgaggctacagctctccctgggcatcatcccagttgaggaggagaacccggacttctggaaccgccaggcagccgaggccctgggtgccgccaagaagctgcagcctgcacagacagccgccaagaacctcatcatcttcctgggtgacgggatgggggtgtctacggtgacagctgccaggatcctaaaagggcagaagaaggacaaactggggcctgagaccttcctggccatggaccgcttcccgtacgtggctctgtccaagacatacagtgtagacaagcatgtgccagacagtggagccacagccacggcctacctgtgcggggtcaagggcaacttccagaccattggcttgagtgcagccgcccgctttaaccagtgcaacacgacacgcggcaacgaggtcatctccgtgatgaatcgggccaagaaagcaggaaagtcagtgggagtggtaaccaccacacgggtgcagcatgcctcgccagccggcgcctacgcccacacggtgaaccgcaactggtactcggatgccgacgtgcctgcctcggcccgccaggaggggtgccaggacatcgccacgcagctcatctccaacatggacattgatgtgatcctaggtggaggccgaaagtacatgtttcccatggggaccccagaccctgagtacccagatgactacagccaaggtgggaccaggctggacgggaagaatctggtgcaggaatggctggcgaagcaccagggtgcccggtacgtgtggaaccgcactgagctcctgcaggcttccctggacccgtctgtgacccatctcatgggtctctttgagcctggagacatgaaatacgagatccaccgagactccacactggacccctccctgatggagatgacagaggctgccctgctcctgctgagcaggaacccccgcggcttcttcctcttcgtggagggtggtcgcatcgaccatggtcatcatgaaagcagggcttaccgggcactgactgagacgatcatgttcgacgacgccattgagagggcgggccagctcaccagcgaggaggacacgctgagcctcgtcactgccgaccactcccacgtcttctccttcggaggctaccccctgcgagggagctccatcttcgggctggcccctggcaaggcccgggacaggaaggcctacacggtcctcctatacggaaacggtccaggctatgtgctcaaggacggcgcccggccggatgttacggagagcgagagcgggagccccgagtatcggcagcagtcagcagtgcccctggacggagagacccacgcaggcgaggacgtggcggtgttcgcgcgcggcccgcaggcgcacctggttcacggcgtgcaggagcagaccttcatagcgcacgtcatggccttcgccgcctgcctggagccctacaccgcctgcgacctggcgccccgcgccggcaccaccgacgccgcgcacccggggccgtccgtggtccccgcgttgcttcctctgctggcagggaccttgctgctgctggggacggccactgctccctgagtgtcccgtccctggggctcctgcttccccatcccggagttcccctgctccccacctccagtcgtcctgccggacctccacctggagctgtcacccccggagtcgccacacagacgtcctgccatggaaccttcccctcccggtgcaccctggggaccgagcccttgacaccacgccctttgctttatcttgctcttgaaattttggccccaactccagggactggggatttgtgcctggcagctgcctgcatttcaggaaaagaggaggctcagaccatccagcccccgcccatatcctgaggtggatcaggcaggctctctccccggggacatgaggcacccatacctaggaccccctgcgccttttttagcttcagtcatggcagcacctgagggacacaaggacttgggtgcatcaggacgccttggagaagcgtggcttcctgccaccctgcaacccaccctcccagccaaggaggctgctgtggtggggatccccaggggggctttgacacagtcctctgctgtccctccactgggctaattctacacccctgtgcccctcctaggggcccatgagtcagagaggcttgccccaagtcacagccactcagatgttcgacgccccctaaggtccattccagcacccacctgagttccgaggagcacctgggaagctctgggtgcaggatagcagtccagagtccatggccccgcctaggccatctgggtgctgggcatggatttctcagcaaggaagactcattaccttccctccctgggcctccattcttctgggaaacacaaagcaataataaaaggaagtgttagacaatgtaa

SEQ ID NO: 5697 - DNA, 9669 bp, Homo sapiens; identical to SEQ ID NO: 3507

SEQ ID NO: 5698 - DNA, 3655 bp, Homo sapiens
cgttggtgctgtttgcggatgctgatgcagtttctgcaggactgtaaactggattcctggaacctttgatattcctggctgtgtatagtgcctgttggtggactgtactgatactcaactagagtgtgaagggactggattcctgcccctgagacacaatgcaagctgtagtgcccttgaacaagatgacagccatctcaccagaacctcaaactctggcctcgactgaacaaaatgaggtcccaagagtggttacttctggggaacaagaagctattttaagaggaaatgctgctgatgcagagtctttcagacagaggtttaggtggttttgttactcagaagtagctggacccaggaaagctctgagtcaactctgggagctctgcaatcagtggctgagaccagacattcacacgaaagaacagattttagagcttctggtgtttgagcagttcctgaccattttgcctggggagatcaggatttgggtaaagtcacaacatcctgagagtagtgaggaagtggtgaccctaatagaagatttgacccagatgcttgaagaaaaagatccagtctctcaagattctactgtttcccaagaggagaactcaaaagaggataaaatggtcactgtttgtcccaatactgagtcctgtgaatctataacattgaaggatgtagctgtgaacttttcaagaggagagtggaagaagctggagccttttcaaaaggagctatataaggaagtgctactggaaaacctcaggaacctagaatttctggactttccagtttcaaaattagagttgatttcccagctaaagtgggttgaattgccatggctgctggaagaagtctcaaaaagctcccgactagatgaatcagctttagataaaataatagaaaggtgcctcagggatgatgatcatggcttgatggaagaatcccagcaatattgtggcagctcagaggaggatcacggtaatcagggaaattcaaaaggaagagtcgcacaaaacaaaactcttgggagtggcagtaggggtaagaaatttgacccagataaaagcccctttggacataatttcaaagaaacttcagacttaattaaacatctgagagtctacttgaggaagaaatctcggaggtataatgaaagcaagaaacccttcagttttcattcagaccttgttctgaaccgcaaggagaaaaccgccggagaaaagtcacggaaatctaatgatggtgggaaagtcctgagtcactcttcagctcttactgaacatcagaaacgtcagaagattcatttgggggataggtcccaaaaatgcagtaagtgtgggataatctttattagaagatcaactctttctaggagaaaaacccctatgtgtgagaaatgtcggaaagattcatgtcaagaagcagccttaaataaagatgagggaaatgagagtggagaaaaaactcataaatgtagtaagtgtggaaaagcctttggctatagcgcctcactcaccaaacatcggagaattcacactggagaaaaaccctatatgtgtaatgaatgtggaaaagcttttagtgatagttcatcgctcacaccacatcatagaactcatagtggagagaaacccttcaaatgtgatgactgtgggaaaggtttcaccctaagtgctcacctcattaaacatcagagaattcatactggagaaaaaccttataaatgtaaagactgtgggagaccctttagtgacagttcatctcttattcaacatcagcgaattcatactggagaaaaaccctatacatgtagcaattgtggaaaatccttcagtcatagctcatccctttccaaacatcagagaattcatactggagagaaaccctataaatgtggcgaatgtggaaaagcctttaggcagaattcatgccttacccggcatcagagaattcacactggagaaaaaccatatttgtgtaatgattgcggaatgacttttagccattttacgtctgtgatttatcatcaaagacttcattcaggagaaaaaccctacaaatgtaaccagtgtgagaaagccttcccaacccattcactgctaagtcgtcatcagagaattcatactggtgtaaaaccttataaatgtaaagaatgtgggaagtccttcagtcagagttcatctcttaatgagcaccaccgaattcatacaggagagaaaccctatgagtgtaactattgtggtgcaacctttagtcgaagctcaatccttgtagaacacctaaaaattcataccggaaggagagaatatgaatgtaacgaatgtgagaagacatttaaaagtaattcaggcctcattagacatcggggatttcactctgcagagtaatcctggaactacattaaagtggggggaatttaattcaaattgtcagttactgaaaccctgggatgtaaacttacagtattgatcagtagctgcagctttcgtaaattggcagttaggaaaaatatccttttgcccattcatccctcttcttttcaaggatggcaacgactggtaaacagtaattagttggtaaagtcactggaaagggaagaatgcaaaatgattctgaggccagacgaattggaaaagctcttttcttcaggggatttctctctgatttcttctactaccatgtagtgtgatggagagaacttgactgcagtcacataacttggattctgtcccagtttgccaaccaacttgctgtatacaccttggacaagtcatttgacctttcagaattttattttcgtcaccagcagaatgaagggatgggattaatgatttttgccttttttggttttttagttttttattggtatcctgataatctctgaagctgtggacataagttatttttttttatttgtcattactttcaagtttctctagtaaaaaatacaataccactattcaggatgctggacttcttttcttttttttttcttttttttttttcaatttttcttttttgggatggagtctcactatgttgcccagactggtcttgaactcctgggctcaagtgatccttccatctcactttcctgagtagctgacattacgggtacactccatcaagcctggttcctaggatgctggacttctagcttagtgagaatgcagtatactttttgaaaacttcgtgcaggaatccctcaaatgctgtaactaggaatgggtcagtgaagttcaaacgacttttccttgagggagtattttaatcggacaagggaactctttttcttttgggcattggccaacaggactgagaagccagagagcttgcacctgagccatctcagccgtgagagtaacagtcctaggaaaatagatgggggctgggggtaaggaaatgtgctgaagacagagctattctggatggattttggtttgcaaaaattctactttaaaacaattttgcctgtagcaagtacatttttttgcaattggagtgtaaacattctgtgtggcaacagttaaaagctgttataacaatttgcttgggtgtgtgtgcatgtgtgtgtgtgtgtgtgtgtgtgtatacattgttgccactatctaaaattagggcatttcatactaaaaacaaagcttgtctt

SEQ ID NO: 5699 - DNA, 3678 bp, Homo sapiens
aggatgggaactaggagtggcagcaatcctttctttcagctggagtgctcctcaggagccagccccacccttagaaaagatgttttccatgaggatcgtctgcctggtcctaagtgtggtgggcacagcatggactgcagatagtggtgaaggtgactttctagctgaaggaggaggcgtgcgtggcccaagggttgtggaaagacatcaatctgcctgcaaagattcagactggcccttctgctctgatgaagactggaactacaaatgcccttctggctgcaggatgaaagggttgattgatgaagtcaatcaagattttacaaacagaataaataagctcaaaaattcactatttgaatatcagaagaacaataaggattctcattcgttgaccactaatataatggaaattttgagaggcgatttttcctcagccaataaccgtgataatacctacaaccgagtgtcagaggatctgagaagcagaattgaagtcctgaagcgcaaagtcatagaaaaagtacagcatatccagcttctgcagaaaaatgttagagctcagttggttgatatgaaacgactggaggtggacattgatattaagatccgatcttgtcgagggtcatgcagtagggctttagctcgtgaagtagatctgaaggactatgaagatcagcagaagcaacttgaacaggtcattgccaaagacttacttccctctagagataggcaacacttaccactgataaaaatgaaaccagttccagacttggttcccggaaattttaagagccagcttcagaaggtacccccagagtggaaggcattaacagacatgccgcagatgagaatggagttagagagacctggtggaaatgagattactcgaggaggctccacctcttatggaaccggatcagagacggaaagccccaggaaccctagcagtgctggaagctggaactctgggagctctggacctggaagtactggaaaccgaaaccctgggagctctgggactggagggactgcaacctggaaacctgggagctctggacctggaagtactggaagctggaactctgggagctctggaactggaagtactggaaaccaaaaccctgggagccctagacctggtagtaccggaacctggaatcctggcagctctgaacgcggaagtgctgggcactggacctctgagagctctgtatctggtagtactggacaatggcactctgaatctggaagttttaggccagatagcccaggctctgggaacgcgaggcctaacaacccagactggggcacatttgaagaggtgtcaggaaatgtaagtccagggacaaggagagagtaccacacagaaaaactggtcacttctaaaggagataaagagctcaggactggtaaagagaaggtcacctctggtagcacaaccaccacgcgtcgttcatgctctaaaaccgttactaagactgttattggtcctgatggtcacaaagaagttaccaaagaagtggtgacctccgaagatggttctgactgtcccgaggcaatggatttaggcacattgtctggcataggtactctggatgggttccgccataggcaccctgatgaagctgccttcttcgacactgcctcaactggaaaaacattcccaggtttcttctcacctatgttaggagagtttgtcagtgagactgagtctaggggctcagaatctggcatcttcacaaatacaaaggaatccagttctcatcaccctgggatagctgaattcccttcccgtggtaaatcttcaagttacagcaaacaatttactagtagcacgagttacaacagaggagactccacatttgaaagcaagagctataaaatggcagatgaggccggaagtgaagccgatcatgaaggaacacatagcaccaagagaggccatgctaaatctcgccctgtcagagactgtgatgatgtcctccaaacacatccttcaggtacccaaagtggcattttcaatatcaagctaccgggatccagtaagattttttctgtttattgcgatcaagagaccagtttgggaggatggcttttgatccagcaaagaatggatggatcactgaattttaaccggacctggcaagactacaagagaggtttcggcagcctgaatgacgagggggaaggagaattctggctaggcaatgactacctccacttactaacccaaaggggctctgttcttagggttgaattagaggactgggctgggaatgaagcttatgcagaatatcacttccgggtaggctctgaggctgaaggctatgccctccaagtctcctcctatgaaggcactgcgggtgatgctctgattgagggttccgtagaggaaggggcagagtacacctctcacaacaacatgcagttcagcacctttgacagggatgcagaccagtgggaagagaactgtgcagaagtctatgggggaggctggtggtataataactgccaagcagccaatctcaatggaatctactaccctgggggctcctatgacccaaggaataacagtccttatgagattgagaatggagtggtctgggtttcctttagaggggcagattattccctcagggctgttcgcatgaaaattaggccccttgtgacccaataggctgaagaagtgggaatgggagcactctgtcttctttgctagagaagtggagagaaaatacaaaaggtaaagcagttgagattctctacaacctaaaaaattcctaggtgctattttcttatcctttgtactgtagctaaatgtacctgagacatattagtctttgaaaaataaagttatgtaaggttttttttatctttaaatagctctgtgggttttaacatttttataaagatataccaagggccattcagtacatcaggaaagtggcagacagaagcttctctctgcaaccttgaagactattggtttgagaacttctcttcccataccacccaaaatcataatgccattggaaagcaaaaagttgttttatccatttgatttgaattgttttaagccaatattttaaggtaaaactcactgaatctaaccatagctgacctttgtagtagaatttacaacttataattacaatgcacaatttataattacaatatgtatttatgtcttttgctatggagcaaatccaggaaggcaagagaaacattctttcctaaatataaatgaaaatctatcctttaaactcttccactagacgttgtaatgcacacttatttttttcccaaggagtaaccaatttctttctaaaacacatttaaaattttaaaactatttatgaatattaaaaaaagacataattcacacattaataaacaatctcccaagtattgatttaacttcatttttctaataatcataaactatattctgtgacatgctaattattattaaatgtaagtcgttagttcgaaagcctctcactaagtatgatctatgctatattcaaaattcaacccatttactttggtcaatatttgatctaagttgcatctttaatcctggtggtcttgccttctgatttttaatttgtatccttttctattaagatatatttgtcattttctcttgaatatgtattaaaatatcccaagcaa

SEQ ID NO: 5700 - DNA, 3708 bp, Homo sapiens
cccccattcgcatctaacaaggaatctgcgccccagagagtcccgggagcgccgccggtcggtgcccggcgcgccgggccatgcagcgacggccgccgcggagctccgagcagcggtagcgcccccctgtaaagcggttcgctatgccggggccactgtgaaccctgccgcctgccggaacactcttcgctccggaccagctcagcctctgataagctggactcggcacgcccgcaacaagcaccgaggagttaagagagccgcaagcgcagggaaggcctccccgcacgggtgggggaaagcggccggtgcagcgcggggacaggcactcgggctggcactggctgctagggatgtcgtcctggataaggtggcatggacccgccatggcgcggctctggggcttctgctggctggttgtgggcttctggagggccgctttcgcctgtcccacgtcctgcaaatgcagtgcctctcggatctggtgcagcgacccttctcctggcatcgtggcatttccgagattggagcctaacagtgtagatcctgagaacatcaccgaaattttcatcgcaaaccagaaaaggttagaaatcatcaacgaagatgatgttgaagcttatgtgggactgagaaatctgacaattgtggattctggattaaaatttgtggctcataaagcatttctgaaaaacagcaacctgcagcacatcaattttacccgaaacaaactgacgagtttgtctaggaaacatttccgtcaccttgacttgtctgaactgatcctggtgggcaatccatttacatgctcctgtgacattatgtggatcaagactctccaagaggctaaatccagtccagacactcaggatttgtactgcctgaatgaaagcagcaagaatattcccctggcaaacctgcagatacccaattgtggtttgccatctgcaaatctggccgcacctaacctcactgtggaggaaggaaagtctatcacattatcctgtagtgtggcaggtgatccggttcctaatatgtattgggatgttggtaacctggtttccaaacatatgaatgaaacaagccacacacagggctccttaaggataactaacatttcatccgatgacagtgggaagcagatctcttgtgtggcggaaaatcttgtaggagaagatcaagattctgtcaacctcactgtgcattttgcaccaactatcacatttctcgaatctccaacctcagaccaccactggtgcattccattcactgtgaaaggcaaccccaaaccagcgcttcagtggttctataacggggcaatattgaatgagtccaaatacatctgtactaaaatacatgttaccaatcacacggagtaccacggctgcctccagctggataatcccactcacatgaacaatggggactacactctaatagccaagaatgagtatgggaaggatgagaaacagatttctgctcacttcatgggctggcctggaattgacgatggtgcaaacccaaattatcctgatgtaatttatgaagattatggaactgcagcgaatgacatcggggacaccacgaacagaagtaatgaaatcccttccacagacgtcactgataaaaccggtcgggaacatctctcggtctatgctgtggtggtgattgcgtctgtggtgggattttgccttttggtaatgctgtttctgcttaagttggcaagacactccaagtttggcatgaaaggcccagcctccgttatcagcaatgatgatgactctgccagcccactccatcacatctccaatgggagtaacactccatcttcttcggaaggtggcccagatgctgtcattattggaatgaccaagatccctgtcattgaaaatccccagtactttggcatcaccaacagtcagctcaagccagacacatttgttcagcacatcaagcgacataacattgttctgaaaagggagctaggcgaaggagcctttggaaaagtgttcctagctgaatgctataacctctgtcctgagcaggacaagatcttggtggcagtgaagaccctgaaggatgccagtgacaatgcacgcaaggacttccaccgtgaggccgagctcctgaccaacctccagcatgagcacatcgtcaagttctatggcgtctgcgtggagggcgaccccctcatcatggtctttgagtacatgaagcatggggacctcaacaagttcctcagggcacacggccctgatgccgtgctgatggctgagggcaacccgcccacggaactgacgcagtcgcagatgctgcatatagcccagcagatcgccgcgggcatggtctacctggcgtcccagcacttcgtgcaccgcgatttggccaccaggaactgcctggtcggggagaacttgctggtgaaaatcggggactttgggatgtcccgggacgtgtacagcactgactactacagggtcggtggccacacaatgctgcccattcgctggatgcctccagagagcatcatgtacaggaaattcacgacggaaagcgacgtctggagcctgggggtcgtgttgtgggagattttcacctatggcaaacagccctggtaccagctgtcaaacaatgaggtgatagagtgtatcactcagggccgagtcctgcagcgaccccgcacgtgcccccaggaggtgtatgagctgatgctggggtgctggcagcgagagccccacatgaggaagaacatcaagggcatccataccctccttcagaacttggccaaggcatctccggtctacctggacattctaggctagggcccttttccccagaccgatccttcccaacgtactcctcagacgggctgagaggatgaacatcttttaactgccgctggaggccaccaagctgctctccttcactctgacagtattaacatcaaagactccgagaagctctcgagggaagcagtgtgtacttcttcatccatagacacagtattgacttctttttggcattatctctttctctctttccatctcccttggttgttcctttttctttttttaaattttctttttcttttttttttcgtcttccctgcttcacgattcttaccctttcttttgaatcaatctggcttctgcattactattaactctgcatagacaaaggccttaacaaacgtaatttgttatatcagcagacactccagtttgcccaccacaactaacaatgccttgttgtattcctgcctttgatgtggatgaaaaaaagggaaaacaaatatttcacttaaactttgtcacttctgctgtacagatatcgagagtttctatggattcacttctatttatttattattattactgttcttattgtttttggatggcttaagcctgtgtataaaaaagaaaacttgtgttcaatctgtgaagcctttatctatgggagattaaaaccagagagaaagaagatttattatgaaccgcaatatgggaggaacaaagacaaccactgggatcagctggtgtcagtccctacttaggaaatactcagcaactgttagctgggaagaatgtattcggcaccttcccctgaggacctttctgaggagtaaaaagactactggcctctgtgccatggatgattcttttcccatcaccagaaatgatagcgtgcagtagagagcaaagatggctt

SEQ ID NO: 5701 - DNA, 918 bp, Homo sapiens; identical to SEQ ID NO: 52

SEQ ID NO: 5702 - DNA, 4581 bp, Homo sapiens
ggctgagttttatgacgggcccggtgctgaagggcagggaacaacttgatggtgctactttgaactgcttttcttttctcctttttgcacaaagagtctcatgtctgatatttagacatgatgagctttgtgcaaaaggggagctggctacttctcgctctgcttcatcccactattattttggcacaacaggaagctgttgaaggaggatgttcccatcttggtcagtcctatgcggatagagatgtctggaagccagaaccatgccaaatatgtgtctgtgactcaggatccgttctctgcgatgacataatatgtgacgatcaagaattagactgccccaacccagaaattccatttggagaatgttgtgcagtttgcccacagcctccaactgctcctactcgccctcctaatggtcaaggacctcaaggccccaagggagatccaggccctcctggtattcctgggagaaatggtgaccctggtattccaggacaaccagggtcccctggttctcctggcccccctggaatctgtgaatcatgccctactggtcctcagaactattctccccagtatgattcatatgatgtcaagtctggagtagcagtaggaggactcgcaggctatcctggaccagctggccccccaggccctcccggtccccctggtacatctggtcatcctggttcccctggatctccaggataccaaggaccccctggtgaacctgggcaagctggtccttcaggccctccaggacctcctggtgctataggtccatctggtcctgctggaaaagatggagaatcaggtagacccggacgacctggagagcgaggattgcctggacctccaggtatcaaaggtccagctgggatacctggattccctggtatgaaaggacacagaggcttcgatggacgaaatggagaaaagggtgaaacaggtgctcctggattaaagggtgaaaatggtcttccaggcgaaaatggagctcctggacccatgggtccaagaggggctcctggtgagcgaggacggccaggacttcctggggctgcaggtgctcggggtaatgacggtgctcgaggcagtgatggtcaaccaggccctcctggtcctcctggaactgccggattccctggatcccctggtgctaagggtgaagttggacctgcagggtctcctggttcaaatggtgcccctggacaaagaggagaacctggacctcagggacacgctggtgctcaaggtcctcctggccctcctgggattaatggtagtcctggtggtaaaggcgaaatgggtcccgctggcattcctggagctcctggactgatgggagcccggggtcctccaggaccagccggtgctaatggtgctcctggactgcgaggtggtgcaggtgagcctggtaagaatggtgccaaaggagagcccggaccacgtggtgaacgcggtgaggctggtattccaggtgttccaggagctaaaggcgaagatggcaaggatggatcacctggagaacctggtgcaaatgggcttccaggagctgcaggagaaaggggtgcccctgggttccgaggacctgctggaccaaatggcatcccaggagaaaagggtcctgctggagagcgtggtgctccaggccctgcagggcccagaggagctgctggagaacctggcagagatggcgtccctggaggtccaggaatgaggggcatgcccggaagtccaggaggaccaggaagtgatgggaaaccagggcctcccggaagtcaaggagaaagtggtcgaccaggtcctcctgggccatctggtccccgaggtcagcctggtgtcatgggcttccccggtcctaaaggaaatgatggtgctcctggtaagaatggagaacgaggtggccctggaggacctggccctcagggtcctcctggaaagaatggtgaaactggacctcagggacccccagggcctactgggcctggtggtgacaaaggagacacaggaccccctggtccacaaggattacaaggcttgcctggtacaggtggtcctccaggagaaaatggaaaacctggggaaccaggtccaaagggtgatgccggtgcacctggagctccaggaggcaagggtgatgctggtgcccctggtgaacgtggacctcctggattggcaggggccccaggacttagaggtggagctggtccccctggtcccgaaggaggaaagggtgctgctggtcctcctgggccacctggtgctgctggtactcctggtctgcaaggaatgcctggagaaagaggaggtcttggaagtcctggtccaaagggtgacaagggtgaaccaggcggtccaggtgctgatggtgtcccagggaaagatggcccaaggggtcctactggtcctattggtcctcctggcccagctggccagcctggagataagggtgaaggtggtgcccccggacttccaggtatagctggacctcgtggtagccctggtgagagaggtgaaactggccctccaggacctgctggtttccctggtgctcctggacagaatggtgaacctggtggtaaaggagaaagaggggctccgggtgagaaaggtgaaggaggccctcctggactctttggacctcctggcaaagatggaaccagtggacatccaggtcccattggaccaccagggcctcgaggtaacagaggtgaaagaggatctgagggctccccaggccacccagggcaaccaggccctcctggacctcctggtgcccctggtccttgctgtggtggtgttggagccgctgccattgctgggattggaggtgaaaaagctggcggttttgccccgtattatggagatgaaccaatggatttcaaaatcaacaccgatgagattatgacttcactcaagtctgttaatggacaaatagaaagcctcattagtcctgatggttctcgtaaaaaccccgctagaaactgcagagacctgaaattctgccatcctgaactcaagagtggagaatactgggttgaccctaaccaaggatgcaaattggatgctatcaaggtattctgtaatatggaaactggggaaacatgcataagtgccaatcctttgaatgttccacggaaacactggtggacagattctagtgctgagaagaaacacgtttggtttggagagtccatggatggtggttttcagtttagctacggcaatcctgaacttcctgaagatgtccttgatgtgcatctggcattccttcgacttctctccagccgagcttcccagaacatcacatatcactgcaaaaatagcattgcatacatggatcaggccagtggaaatgtaaagaaggccctgaagctgatggggtcaaatgaaggtgaattcaaggctgaaggaaatagcaaattcacctacacagttctggaggatggttgcacgaaacacactggggaatggagcaaaacagtctttgaatatcgaacacgcaaggctgtgagactacctattgtagatattgcaccctatgacattggtggtcctgatcaagaatttggtgtggacgttggccctgtttgctttttataaaccaaactctatctgaaatcccaacaaaaaaaatttaactccatatgtgttcctcttgttctaatcttgtcaaccagtgcaagtgaccgacaaaattccagttatttatttccaaaatgtttggaaacagtataatttgacaaagaaaaatgatacttctctttttttgctgttccaccaaatacaattcaaatgctttttgttttatttttttaccaattccaatttcaaaatgtctcaatggtgctataataaataaacttcaacactctttatgataacaacactgtgttatattctttgaatcctagcccatctgcagagcaatgactgtgctcaccagtaaaagataacctttctttctgaaatagtcaaatacgaaattagaaaagccctccctattttaactacctcaactggtcagaaacacagattgtattctatgagtcccagaagatgaaaaaaattttatacgttgataaaacttataaatttcattgattaatctcctggaagattggtttaaaaagaaaagtgtaatgcaagaatttaaagaaatatttttaaagccacaattattttaatattggatatcaactgcttgtaaaggtgctcctcttttttcttgtcattgctggtcaagattactaatatttgggaaggctttaaagacgcatgttatggtgctaatgtactttcacttttaaactctagatcagaattgttgacttgcattcagaacataaatgcacaaaatctgtacatgtctcccatcagaaagattcattggcatgccacaggggattctcctccttcatcctgtaaaggtcaacaataaaaaccaaattatggggctgcttttgtcacactagcatagagaatgtgttgaaatttaactttgtaagcttgtatgtggttgttgatcttttttttccttacagacacccataataaaatatcatattaaaattc

SEQ ID NO: 5703 - DNA, 1853 bp, Homo sapiens
ttgaaaagggtatcattcatgtggtttcagtttagaagagtccctcagagctttgcctcaagcaatttcaaattgtagtgataccttaaatcatgtattcaggatgccttctttagcatttagaaccccaactagacttatactttgactaaagtcagaggcagaccaatttagggaacagattttgttctttgcttttatgatacatttgtaactcacagctgttagcatgacctcacatcactgcgtaggacccggaaatcacatctcctggtcaggtcacgaaaaagaacacaggcttgactattgtccagaagttactttccccttgactaaaggtttccccttagggtacacattgctatttaactttgcctcctacccttttttgttaccttccaaaatcaagacacttttaagaaacaaagatagttttctgaacattctgtgtcctgcctgtctcctgttgattcgcagatgtaatatcgagtattcatcaactggtctcaatttcctgaacacattcactgtatccctcattgtcaccgttatccccctgcttcaaaatgtgccagttccacttggtaataacgttgggaaaatgcaggtttatgaatgatgtggacttttagaggatcaaatcaataaattggattttttattttttgagggcagctgccctcactgttttaaataaagaatcttacataagaatgttgacaacattcacagtaagccattggcagaaaattgatctgcatgtcctagaccaatgattacaaggtgtctgtggtttagggggcccagcccatcattccttttccccttggcactcatgagagagatgccaagttcagtgtggatttttcttggtgctctatggagaaatggagtctgtgtgcttactgaagagtcccaaaaaccagagaccattttcatttactgccatcataaatattctccaccattcaagatgcctgtgtacacggctatttgggaaacttaagtgttggaggaggcaggggctgaaggtgtcaaaacctcctcagtaggataacccctttctcccctttggaccatctgccatctttcatgagtgtttcccatggtgtttttgcatccagagttgacaacaactcaattttgccttgaatttactcagtcttataaattaaaaatgtgcattttatataaagatgcattttatataaaaatgcacacctttaatctctatatggcagcatatacatatatatatataaaatgcacacttttaatctctatatggcagcatttttgaggctttatatctgcccgtgtaccctcaactgcctcctttttgcagagaacgatccccacaggaactggtctaagaacactgtctgcacatgattgatgcttaaaatccaatataccaccacatatcaaaggttgggattttcagagtccttcttgatttctgagctgaaaccttaacaaatagggaatttggcagggaagacacctgggtttttaattcagaaccctatttatatactgttaaaatttgaggtactgtagtttatataaaagtcggatgttaagatattatatttcagtactaggagcttctttgcagtcattaacatgacaaattaagtaataaatataaaagtgattgtccataaattatcattgaattttttgtttattttgtagtgttctgtatttatctgcactttgtgtatatatacacacatacatatgccaacatgtaaataacctcatgtttattcctaatctaaattgccacaatatttttaatgtatggttacactgtgttttaaattactttaaaaataaactttgtaagc

SEQ ID NO: 5704 - DNA, 3774 bp, Homo sapiens
acccgcctctgcgcgcccccgggcacgaccccggagtctccgcgggcggccagggcgcgcgtgcgcggaggtgagccgggccggggctgcggggcttccctgagcgcgggccgggtcggtggggcggtcggctgcccgcgcggcctctcagttgggaaagctgaggttgtcgccggggccgcgggtggaggtcggggatgaggcagcaggtaggacagtgacctcggtgacgcgaaggaccccggccacctctaggttctcctcgtccgcccgttgttcagcgagggaggctctgcgcgtgccgcagctgacggggaaactgaggcacggagcgggcctgtaggagctgtccaggccatctccaaccatgggagtgaggcacccgccctgctcccaccggctcctggccgtctgcgccctcgtgtccttggcaaccgctgcactcctggggcacatcctactccatgatttcctgctggttccccgagagctgagtggctcctccccagtcctggaggagactcacccagctcaccagcagggagccagcagaccagggccccgggatgcccaggcacaccccggccgtcccagagcagtgcccacacagtgcgacgtcccccccaacagccgcttcgattgcgcccctgacaaggccatcacccaggaacagtgcgaggcccgcggctgttgctacatccctgcaaagcaggggctgcagggagcccagatggggcagccctggtgcttcttcccacccagctaccccagctacaagctggagaacctgagctcctctgaaatgggctacacggccaccctgacccgtaccacccccaccttcttccccaaggacatcctgaccctgcggctggacgtgatgatggagactgagaaccgcctccacttcacgatcaaagatccagctaacaggcgctacgaggtgcccttggagaccccgcatgtccacagccgggcaccgtccccactctacagcgtggagttctccgaggagcccttcggggtgatcgtgcgccggcagctggacggccgcgtgctgctgaacacgacggtggcgcccctgttctttgcggaccagttccttcagctgtccacctcgctgccctcgcagtatatcacaggcctcgccgagcacctcagtcccctgatgctcagcaccagctggaccaggatcaccctgtggaaccgggaccttgcgcccacgcccggtgcgaacctctacgggtctcaccctttctacctggcgctggaggacggcgggtcggcacacggggtgttcctgctaaacagcaatgccatggatgtggtcctgcagccgagccctgcccttagctggaggtcgacaggtgggatcctggatgtctacatcttcctgggcccagagcccaagagcgtggtgcagcagtacctggacgttgtgggatacccgttcatgccgccatactggggcctgggcttccacctgtgccgctggggctactcctccaccgctatcacccgccaggtggtggagaacatgaccagggcccacttccccctggacgtccagtggaacgacctggactacatggactcccggagggacttcacgttcaacaaggatggcttccgggacttcccggccatggtgcaggagctgcaccagggcggccggcgctacatgatgatcgtggatcctgccatcagcagctcgggccctgccgggagctacaggccctacgacgagggtctgcggaggggggttttcatcaccaacgagaccggccagccgctgattgggaaggtatggcccgggtccactgccttccccgacttcaccaaccccacagccctggcctggtgggaggacatggtggctgagttccatgaccaggtgcccttcgacggcatgtggattgacatgaacgagccttccaacttcatcaggggctctgaggacggctgccccaacaatgagctggagaacccaccctacgtgcctggggtggttggggggaccctccaggcggccaccatctgtgcctccagccaccagtttctctccacacactacaacctgcacaacctctacggcctgaccgaagccatcgcctcccacagggcgctggtgaaggctcgggggacacgcccatttgtgatctcccgctcgacctttgctggccacggccgatacgccggccactggacgggggacgtgtggagctcctgggagcagctcgcctcctccgtgccagaaatcctgcagtttaacctgctgggggtgcctctggtcggggccgacgtctgcggcttcctgggcaacacctcagaggagctgtgtgtgcgctggacccagctgggggccttctaccccttcatgcggaaccacaacagcctgctcagtctgccccaggagccgtacagcttcagcgagccggcccagcaggccatgaggaaggccctcaccctgcgctacgcactcctcccccacctctacacactgttccaccaggcccacgtcgcgggggagaccgtggcccggcccctcttcctggagttccccaaggactctagcacctggactgtggaccaccagctcctgtggggggaggccctgctcatcaccccagtgctccaggccgggaaggccgaagtgactggctacttccccttgggcacatggtacgacctgcagacggtgccagtagaggcccttggcagcctcccacccccacctgcagctccccgtgagccagccatccacagcgaggggcagtgggtgacgctgccggcccccctggacaccatcaacgtccacctccgggctgggtacatcatccccctgcagggccctggcctcacaaccacagagtcccgccagcagcccatggccctggctgtggccctgaccaagggtggggaggcccgaggggagctgttctgggacgatggagagagcctggaagtgctggagcgaggggcctacacacaggtcatcttcctggccaggaataacacgatcgtgaatgagctggtacgtgtgaccagtgagggagctggcctgcagctgcagaaggtgactgtcctgggcgtggccacggcgccccagcaggtcctctccaacggtgtccctgtctccaacttcacctacagccccgacaccaaggtcctggacatctgtgtctcgctgttgatgggagagcagtttctcgtcagctggtgttagccgggcggagtgtgttagtctctccagagggaggctggttccccagggaagcagagcctgtgtgcgggcagcagctgtgtgcgggcctgggggttgcatgtgtcacctggagctgggcactaaccattccaagccgccgcatcgcttgtttccacctcctgggccggggctctggcccccaacgtgtctaggagagctttctccctagatcgcactgtgggccggggccctggagggctgctctgtgttaataagattgtaaggtttgccctcctcacctgttgccggcatgcgggtagtattagccacccccctccatctgttcccagcaccggagaagggggtgctcaggtggaggtgtggggtatgcacctgagctcctgcttcgcgcctgctgctctgccccaacgcgaccgctgcccggctgcccagagggctggatgcctgccggtccccgagcaagcctgggaactcaggaaaattcacaggacttgggagattctaaatcttaagtgcaattatttttaataaaaggggcatttggaatc

SEQ ID NO: 5705 - DNA, 1693 bp, Homo sapiens
acgaggggaagaaaggagttggggcaaaacaggaggcgtttccctacccgcatacatccccgtccccgagacacccaatccccccacccccagcctgcccgcgcctcccgcccccagctcctcgccctggggacagctggcagccccgcgcggaccagacacaaagccgatcaatcccggaggcgtgggggcggagggacgacccgccggggctttcccgggcgctgctctcctcctgctgccccctcgctaggacccggcggacgcctcgtctggttttcacgccctctagcccctacccccacacccccaaaacagaacagacccccatccctgggctggaggacccgcctcttggcagccagctgagaaggcgccccggggagggggaaactgacatcccatctagagccgtccctcctcttcctcccctcccgactctctgctcctttcccgccccagaagttcaagggcccccggcctcctgcgctcctgccgccgggaccctcgacctcctcagagcagccggctgccgccccgggaagatggcgaggaggagccgccaccgcctcctcctgctgctgctgcgctacctggtggtcgccctgggctatcataaggcctatgggttttctgccccaaaagaccaacaagtagtcacagcagtagagtaccaagaggctattttagcctgcaaaaccccaaagaagactgtttcctccagattagagtggaagaaactgggtcggagtgtctcctttgtctactatcaacagactcttcaaggtgattttaaaaatcgagctgagatgatagatttcaatatccggatcaaaaatgtgacaagaagtgatgcggggaaatatcgttgtgaagttagtgccccatctgagcaaggccaaaacctggaagaggatacagtcactctggaagtattagtggctccagcagttccatcatgtgaagtaccctcttctgctctgagtggaactgtggtagagctacgatgtcaagacaaagaagggaatccagctcctgaatacacatggtttaaggatggcatccgtttgctagaaaatcccagacttggctcccaaagcaccaacagctcatacacaatgaatacaaaaactggaactctgcaatttaatactgtttccaaactggacactggagaatattcctgtgaagcccgcaattctgttggatatcgcaggtgtcctgggaaacgaatgcaagtagatgatctcaacataagtggcatcatagcagccgtagtagttgtggccttagtgatttccgtttgtggccttggtgtatgctatgctcagaggaaaggctacttttcaagtaaatatatgttcatgaagagtaattcttcatctaaagccacgacaatgagtgaaaatgatttcaagcacacaaaatcctttataatttaaagactccactttagagatacaccaaagccaccgttgttacacaagttattaaactattataaaactctgctttgtccgacatttgcaaagaggtacacgaggaaatggaattggtatttcattttaattttcatgactactaactcacctgaacttgctattttaaacaaatagttctgtcgacacctaaaatataatctggcttcttgtgtctggactaagttaaaagaattaaaatactttgtaatgtc

SEQ ID NO: 5706 - DNA, 2594 bp, Homo sapiens
cttcctggaagggtgcgataaggccgggcgaggtgcctgggatgcttctccccttccgcgaggaagagatctaattgggtagggcgggtgtagactagcctgccgagccgcccgctggcacctgcagcctcctgggcgcccgccgggccccggcgagaaagttgttaaagggagcgaggtggttgttcctggggtccgaggcgcgcctctcacgccctgcccaacagaagccgcagtcccgtggggtctggagacgcagtttcctgttaatgacaataaatccctgctccccctgcctcagacatctacgcagcgaaatcgagcctggccttgagggtccacaccgcgagggaagatgcgtgcgcccattccagagcctaagcctggagacctgattgagatttttcgccctttctacagacactgggccatctatgttggcgatggatatgtggttcatctggcccctccaagtgaggtcgcaggagctggtgcagccagtgtcatgtccgccctgactgacaaggccatcgtgaagaaggaattgctgtatgatgtggccgggagtgacaagtaccaggtcaacaacaaacatgatgacaagtactcgccgctgccctgcagcaaaatcatccagcgggcggaggagctggtggggcaggaggtgctctacaagctgaccagtgagaactgcgagcactttgtgaatgagctgcgctatggagtcgcccgcagtgaccaggtcagagatgtcatcatcgctgcaagcgttgcaggaatgggcttggcagccatgagccttattggagtcatgttctcaagaaacaagcgacaaaagcaataactgaaaaagactgtcctgtcagcgatgactttatacatcaagggggtcttgttttgctagagagtttggggtttggtttgtggatttcattgtgatttataataaggcttattttcacagaataaaataaagcaaaacgagggaggattttattgggggaagtgcagcaagaactgcctggtgtgaagtctgttcagggaacagccgggctgtcttcctggtcagggattgtctttcactttctttttgcgtgctgtgttctttgcattgcaggaggcagagtccagctccagttatctcaagtagagggcgtttctggtcgtcaggatacatgcggggcggaagggagacagaaagacataatacacaagaacagaaagcagcagacagccaggacccttggcccggaactagatctaggatggcctctgagactcagcagctggagtctgtagatgttcagctgagttgaaaaaaaaaaagtcctcggctataaggaaatttagtatagatgcttgccaatcttactaaaatttcccttattttcctttgctctacacgtctttcctttgccttgttgcttccatctccttggcactcctgcttcctcactgcttctgcttgccatgatccccaagtctctgacccaccttcctgcctgctcctctcctcccacattggctcagattctttccccgctgtctgtgggtccacactcccagtggcacctccaggagagaatctgattggctcagttcgccagataactcaactttcccattggctacctttgggtcaggtgatctccactagacctatcgcctatgcctgatggtgggtcacatggtgcaaatgttgcctgagagcttagtggattagggatgtggctgggctcatggttgacgtccctgctgctgagcccttacgggtcaggctgggagaaggtaccatgttgtgtgactggtcatttgaggtcttgcagctgttgcttgctgggcttggcaggtgttcaaagtgaccatttttctgaagggtttttttctgagtattcctcagatgtactcccctggggccgacggtctttccttccacagggcgatgcttccctacttgcttgtgaatgtttccttcatctccaggttgtctggggacaattctgtcttttggaggcctgggcaggatttacagagggctccatgccagctccttcctgccgggtccacttctggtgtagggtaaacacctgcccattcatgtcctagtgttgatagaataatcattttctttcagtacagtttcctttttttttttttttgccccggctttttagatgtagcacttaatgccagttctcgagctccccaaacttaagggacacaggtcaacaagcagtaggtctttggaagctcgctctctcacatggtataaggtgagggggacacatggaatgtaaacctccaaactaattatgggggaaaaaggaatgagaaaaacaaacacaagaaggcaaaacaaaaacacctggttcaattaaaaacaacaacaaagcaaaacaaaaaaaacccaaaaccaaaccacacaataaatgagaaaaaaattacataaaacagatgacatgtatagaaataaaaaaatagaatggaggaactaattccaaatatataagtaatcctaagtggactaaatttgcaaagtaaaaggcaaacattacactggattaaaaaacaaatccagggaatacagtttacag

SEQ ID NO: 5707 - DNA, 5818 bp, Homo sapiens
atgagtacagaaagagactcagaaacgacatttgacgaggattctcagcctaatgacgaagtggttccctacagtgatgatgaaacagaagatgaacttgatgaccaggggtctgctgttgaaccagaacaaaaccgagtcaacagggaagcagaggagaaccgggagccattcagaaaagaatgtacatggcaagtcaaagcaaacgatcgcaagtaccacgaacaacctcactttatgaacacaaaattcttgtgtattaaggagagtaaatatgcgaataatgcaattaaaacatacaagtacaacgcatttacctttataccaatgaatctgtttgagcagtttaagagagcagccaatttatatttcctggctcttcttatcttacaggcagttcctcaaatctctaccctggcttggtacaccacactagtgcccctgcttgtggtgctgggcgtcactgcaatcaaagacctggtggacgatgtggctcgccataaaatggataaggaaatcaacaataggacgtgtgaagtcattaaggatggcaggttcaaagttgctaagtggaaagaaattcaagttggagacgtcattcgtctgaaaaaaaatgattttgttccagctgacattctcctgctgtctagctctgagcctaacagcctctgctatgtggaaacagcagaactggatggagaaaccaatttaaaatttaagatgtcacttgaaatcacagaccagtacctccaaagagaagatacattggctacatttgatggttttattgaatgtgaagaacccaataacagactagataagtttacaggaacactattttggagaaacacaagttttcctttggatgctgataaaattttgttacgtggctgtgtaattaggaacaccgatttctgccacggcttagtcatttttgcaggtgctgacactaaaataatgaagaatagtgggaaaaccagatttaaaagaactaaaattgattacttgatgaactacatggtttacacgatctttgttgttcttattctgctttctgctggtcttgccatcggccatgcttattgggaagcacaggtgggcaattcctcttggtacctctatgatggagaagacgatacaccctcctaccgtggattcctcattttctggggctatatcattgttctcaacaccatggtacccatctctctctatgtcagcgtggaagtgattcgtcttggacagagtcacttcatcaactgggacctgcaaatgtactatgctgagaaggacacacccgcaaaagctagaaccaccacactcaatgaacagctcgggcagatccattatatcttctctgataagacggggacactcacacaaaatatcatgacctttaaaaagtgctgtatcaacgggcagatatatggggaccatcgggatgcctctcaacacaaccacaacaaaatagagcaagttgattttagctggaatacatatgctgatgggaagcttgcattttatgaccactatcttattgagcaaatccagtcagggaaagagccagaagtacgacagttcttcttcttgctcgcagtttgccacacagtcatggtggataggactgatggtcagctcaactaccaggcagcctctcccgatgaaggtgccctggtaaacgctgccaggaactttggctttgccttcctcgccaggacccagaacaccatcaccatcagtgaactgggcactgaaaggacttacaatgttcttgccattttggacttcaacagtgaccggaagcgaatgtctatcattgtaagaaccccagaaggcaatatcaagctttactgtaaaggtgctgacactgttatttatgaacggttacatcgaatgaatcctactaagcaagaaacacaggatgccctggatatctttgcaaatgaaactcttagaaccctatgcctttgctacaaggaaattgaagaaaaagaatttacagaatggaataaaaagtttatggctgccagtgtggcctccaccaaccgggacgaagctctggataaagtatatgaggagattgaaaaagacttaattctcctgggagctacagctattgaagacaagctacaggatggagttccagaaaccatttcaaaacttgcaaaagctgacattaagatctgggtgcttactggagacaaaaaggaaactgctgaaaatataggatttgcttgtgaacttctgactgaagacaccaccatctgctatggggaggatattaattctcttcttcatgcaaggatggaaaaccagaggaatagaggtggcgtctacgcaaagtttgcacctcctgtgcaggaatctttttttccacccggtggaaaccgtgccttaatcatcactggttcttggttgaatgaaattcttctcgagaaaaagaccaagagaaataagattctgaagctgaagttcccaagaacagaagaagaaagacggatgcggacccaaagtaaaaggaggctagaagctaagaaagagcagcggcagaaaaactttgtggacctggcctgcgagtgcagcgcagtcatctgctgccgcgtcacccccaagcagaaggccatggtggtggacctggtgaagaggtacaagaaagccatcacgctggccatcggagatggggccaatgacgtgaacatgatcaaaactgcccacattggcgttggaataagtggacaagaaggaatgcaagctgtcatgtcgagtgactattcctttgctcagttccgatatctgcagaggctactgctggtgcatggccgatggtcttacataaggatgtgcaagttcctacgatacttcttttacaaaaactttgcctttactttggttcatttctggtactccttcttcaatggctactctgcgcagactgcatacgaggattggttcatcaccctctacaacgtgctgtacaccagcctgcccgtgctcctcatggggctgctcgaccaggatgtgagtgacaaactgagcctccgattccctgggttatacatagtgggacaaagagacttactattcaactataagagattctttgtaagcttgttgcatggggtcctaacatcgatgatcctcttcttcatacctcttggagcttatctgcaaaccgtagggcaggatggagaggcaccttccgactaccagtcttttgccgtcaccattgcctctgctcttgtaataacagtcaatttccagattggcttggatacttcttattggacttttgtgaatgctttttcaatttttggaagcattgcactttattttggcatcatgtttgactttcatagtgctggaatacatgttctctttccatctgcatttcaatttacaggcacagcttcaaacgctctgagacagccatacatttggttaactatcatcctggctgttgctgtgtgcttactacccgtcgttgccattcgattcctgtcaatgaccatctggccatcagaaagtgataagatccagaagcatcgcaagcggttgaaggcggaggagcagtggcagcgacggcagcaggtgttccgccggggcgtgtcaacgcggcgctcggcctacgccttctcgcaccagcggggctacgcggacctcatctcctccgggcgcagcatccgcaagaagcgctcgccgcttgatgccatcgtggcggatggcaccgcggagtacaggcgcaccggggacagctgatcccttacccccaggctgggatgcggccacaaagcacgtctatttttttatgaaagactctcaggactttgtgtgtgtgtgtgaattgcattcatcacaaagatattgaagacaataaataatctttataacaaactccttgggttggactattaaacaatagcagagccaagaaataggacttttaaaagtcctattattcggccgggcgtggtggctcaggtctgtaatcccagcactttaggaggctgaggaggggagatcacctgaggccaggagttcgagaccagcccagccaacatggtgaaaccctgtctctaccataaattaaaaattagccgggcttggtggtgggcacccgtaatcccacctatttgagaagctgaagcagaagaatcgcttgaacctgggagatggaggttacagtgagccgagattgcgccactgcactccagcctgggtgacagagcaagactctgtcttaagaaaaatttaaaaataggccgggcatggtggctcatgcctgtcatcctagcactttgggaggccaaggcaggtggatcacttgaggtcaggagaccagcccggccaacatggtgaaaccccatctctactaaaaatacaaaaattagctggaaatcgcttgaacctgggaggtggaggttccagtgagccgagatcgtggcactgcactccaacctgagcaacagagtgagacaccagctcaaaaaaaattttttaataataataaaagtcctattattcaactggttatgtacattatggttgaaagggaacgttttaatccagtctcaatccagggcaatagaattacaaagcatgttgtatttcagttcaaatggtattgtattataaaattacagttacattttcctttcggtgatcttcagcataatttcccagaggcccctttttcctccctataggccatcttattaacagattttaaaatttatagtaatgacaaatgacttatcagtgttcatcatctgaaagctaagtggttcgttcaatcactttttcaaagttgatagtagattgcatggtttcatgtttcctcatattggtttattaattctatttaatcaaggaaaataacttcagattccataaagtttcagtttatttttagtttactactaggtgagatagcacattacatacttttactatcaaatattattttagcagcttcccatagtaccaaatgatttgattccctactctcattttttaaagcatataaatatttatgggcttaaaaagggggtttttaaaaactgaggatatcagtaataaattgcagaatattttgcaaagctttcttttggaaagcaaacttttgtgcctgcctatatgcaaagtattttatcagggacttgaacaaagacctcactctttttcacttgtcttatgtcgagagaaaaggttattggcagccacattcctaagactggggaatggtgtgtccttttaaatttgaagataactttaggtaattatggaaactcctcaaagaggagaaagtaatttttttccagacatttttctcattctgtgtctttcacacactagtttccatagttcgagaattctgttttttaccattgggctgtgaatgttcacaatatcagtcctgttgaattcctatgaggtaatcacaatgtgtatatgttcattttctaggtatgataaaagaatgtatggctttttattctgtggaagtaaaatcctgaacgtttacaacttttccttaacttgtaaataaaaaattgtaagttttttctttttttacagaaaacttagcttgtgtaattctgttagtttcagatttctctcctgtttttgcaaattgtgggaaagattgacaatgcaaatgtgtcaaagacatactgttgggtgcaatattaacaattttaaatgcaaatttctttggataaattatttctatattctgtaaatctgagatttaatgtatattttgtttaaaaaaatgatttagtaaaatctttgaaaagtatgatcttctaaagtatttaaa

SEQ ID NO: 5708 - DNA, 2620 bp, Homo sapiens
aactagcccagccgcgcggagcgcctgggagaggagaaggagccgacctgccgagatggaggcgaccggcacctgggcgctgctgctggcgctggcgctgctcctgctgctgacgctggcgctgtccgggaccagggcccgaggccacctgccccccgggcccacgccgctaccactgctgggaaacctcctgcagctacggcccggggcgctgtattcagggctcatgcggctgagtaagaagtacggaccggtgttcaccatctacctgggaccgtggcggcctgtggtggtcctggttgggcaggaggctgtgcgggaggccctgggaggtcaggctgaggagttcagcggccggggaaccgtagcgatgctggaagggacttttgatggccatggggttttcttctccaacggggagcggtggaggcagctgaggaagtttaccatgcttgctctgcgggacctgggcatggggaagcgagaaggcgaggagctgatccaggcggaggcccggtgtctggtggagacattccaggggacagaaggacgcccattcgatccctccctgctgctggcccaggccacctccaacgtagtctgctccctcctctttggcctccgcttctcctatgaggataaggagttccaggccgtggtccgggcagctggtggtaccctgctgggagtcagctcccaggggggtcagacctacgagatgttctcctggttcctgcggcccctgccaggcccccacaagcagctcctccaccacgtcagcaccttggctgccttcacagtccggcaggtgcagcagcaccaggggaacctggatgcttcgggccccgcacgtgaccttgtcgatgccttcctgctgaagatggcacaggaggaacaaaacccaggcacagaattcaccaacaagaacatgctgatgacagtcatttatttgctgtttgctgggacgatgacggtcagcaccacggtcggctataccctcctgctcctgatgaaataccctcatgtccaaaagtgggtacgtgaggagctgaatcgggagctgggggctggccaggcaccaagcctaggggaccgtacccgcctcccttacaccgacgcggttctgcatgaggcgcagcggctgctggcgctggtgcccatgggaataccccgcaccctcatgcggaccacccgcttccgagggtacaccctgccccagggcacggaggtcttccccctccttggctccatcctgcatgaccccaacatcttcaagcacccagaagagttcaacccagaccgtttcctggatgcagatggacggttcaggaagcatgaggcgttcctgcccttctccttagggaagcgtgtctgccttggagagggcctggcaaaagcggagctcttcctcttcttcaccaccatcctacaagccttctccctggagagcccgtgcccgccggacaccctgagcctcaagcccaccgtcagtggccttttcaacattcccccagccttccagctgcaagtccgtcccactgaccttcactccaccacgcagaccagatgaaggaaggcaacttggaagtggtgggtgcccaggacggtgcctccagcctcaacagtgggcatggacagggttaatgtctccagagtgtacactgcaggcagccacatttacacgcctgcagttgttttccggagtctgtcccacggcccacacgctcacttgactcatgctgctaagatgcacaaccgcacacccatacacaactacaagggccacaaagcaactgctgggttagctttccacagacataaatatagtccatctgcaatcacaagcacatagccaggtaacccaccaactcccctggatctgcagcccacacgtgggagtctggctgtcaccttcacaagccacagaaacggccacacatgttcacagctcacacgccctctccattcatcgaacttctcagtgtccctgtccctggtgcctggcacagggaacagcatgccccctccggggtcatgccacccagagactgtcgctgtctatggccccaactcatgctccctctcttggctacaccactctcccagcctgtgaccaccgatgtccacacacccccaaccacttgtccacacagctacccacgtacgacatcgtcctggctccccagagtatcttcccactgagacacgccgcccccacagaggcacagtccccagccacctctgcaactgcagccctcagtcacccctttttaagcaccctgattctaccaaatgcaaacacatctgggtctgcgattatgcacagagactttggacatacgaggaccctcagaccggaggaacacctgcccaaccccaacacgtgcttatgtaaccacgtggaaagcggcccctgctgcccctccacacacacatacacactcactgatctacagcccctgttcggcgtcagagtccccactagacccagtggaaggggttagagaccaagtaggggccagtttccaattcaccctgtcagggagtgagccggatctgacgttccttgtgacttaagggtccggcttgggaattaaagtttgtttctggcctttagcct

SEQ ID NO: 5709 - DNA, 6096 bp, Homo sapiens
gcggccgcttcccaccgtccctctccccttactggcagagcgcgctgcgggcggactcccgggcccggagcagcccaccggccaccccaccgcccacccggctcccggtgtctcctcccggccgctctacccagcaactttccgtgctttgttccccgactggaaatgctttacggaagcgtcttggacagggtctccgccaggcgacaagagctcggtgctgagatgtgttacgttctcatctccccatcaattatggatggaaacaaataaggaagagtcaattttgctgagccccttctccggcaacgagaggcgttctgcagccgggagggagccgccgctcgcgccggcagccgctggcaggggcatggtgaggaggaaggtagctcagtggcatttctgagcaggggccaccctgacttcaccttggcccaccatgagggtcttcctgctttgtgcctacatactgctgctgatggtttcccagttgagggcagtcagctttcctgaagatgatgaaccccttaatactgtcgactatcactattcaaggcaatatccggtttttagaggacgcccttcaggcaatgaatcgcagcacaggctggactttcagctgatgttgaaaattcgagacacactttatattgctggcagggatcaagtttatacagtaaacttaaatgaaatgcccaaaacagaagtaatacccaacaagaaactgacatggcgatcaagacaacaggatcgagaaaactgtgctatgaaaggcaagcataaagatgaatgccacaactttatcaaagtatttgttccaagaaacgatgagatggtttttgtttgtggtaccaatgcattcaatcccatgtgtagatactacaggttgagtaccttagaatatgatggggaagaaattagtggcctggcaagatgcccatttgatgccagacaaaccaatgttgccctctttgctgatgggaagctgtattctgccacagtggctgacttcttggccagcgatgccgttatttatcgaagcatgggtgatggatctgcccttcgcacaataaaatatgattccaaatggataaaagagccacactttcttcatgccatagaatatggaaactatgtctatttcttctttcgagaaatcgctgtcgaacataataatttaggcaaggctgtgtattcccgcgtggcccgcatatgtaaaaacgacatgggtggttcccagcgggtcctggagaaacactggacttcatttctaaaggctcggctgaactgttctgtccctggagattcgtttttctactttgatgttctgcagtctattacagacataatacaaatcaatggcatccccactgtggtcggggtgtttaccacgcagctcaatagcatccctggttctgctgtctgtgcatttagcatggatgacattgaaaaagtattcaaaggacggtttaaggaacagaaaactccagattctgtttggacagcagttcccgaagacaaagtgccaaagccaaggcctggctgttgtgcaaaacacggccttgccgaagcttataaaacctccatcgatttcccggatgaaactctgtcattcatcaaatctcatcccctgatggactctgccgttccacccattgccgatgagccctggttcacaaagactcgggtcaggtacagactgacggccatctcagtggaccattcagccggaccctaccagaactacacagtcatctttgttggctctgaagctggcatggtacttaaagttctggcaaagaccagtcctttctctttgaacgacagcgtattactggaagagattgaagcctacaaccatgcaaagtgcagtgctgagaatgaggaagacaaaaaggtcatctcattacagttggataaagatcaccacgctttatatgtggcgttctctagctgcattatccgcatccccctcagtcgctgtgagcgttatggatcatgtaaaaagtcttgtattgcatctcgtgacccgtattgtggctggttaagccagggatcctgtggtagagtgaccccagggatgcttgctgaaggatatgaacaagacacagaattcggcaacacagctcatctaggggactgccatgaaattttgcctacttcaactacaccagattacaaaatatttggcggtccaacatctgacatggaggtatcttcatcttctgttaccacaatggcaagtatcccagaaatcacacctaaagtgattgatacctggagacctaaactgacaagctctcggaaatttgtagttcaagatgatccaaacacttctgattttactgatcctttatcgggtatcccaaagggtgtacgatgggaagtccagtctggagagtccaaccagatggtccacatgaatgtcctcatcacctgtgtctttgctgcttttgttttgggggcattcattgcaggtgtggcagtatactgctatcgagacatgtttgttcggaaaaacagaaagatccataaagatgcagagtccgcccagtcatgcacagactccagtggaagttttgccaaactgaatggtctctttgacagccctgtcaaggaataccaacagaatattgattctcctaaactgtatagtaacctgctaaccagtcggaaagagctaccacccaatggagatactaaatccatggtaatggaccatcgagggcaacctccagagttggctgctcttcctactcctgagtctacacccgtgcttcaccagaagaccctgcaggccatgaagagccactcagaaaaggcccatggccatggagcttcaaggaaagaaacccctcagttttttccgtctagtccgccacctcattccccattaagtcatgggcatatccccagtgccattgttcttccaaatgctacccatgactacaacacgtctttctcaaactccaatgctcacaaagctgaaaagaagcttcaaaacattgatcaccctctcacaaagtcatccagtaagagagatcaccggcgttctgttgattccagaaataccctcaatgatctcctgaagcatctgaatgacccaaatagtaaccccaaagccatcatgggagacatccagatggcacaccagaacttaatgctggatcccatgggatcgatgtctgaggtcccacctaaagtccctaaccgggaggcatcgctatactcccctccttcaactctccccagaaatagcccaaccaagcgagtggatgtccccaccactcctggagtcccaatgacttctctggaaagacaaagaggttatcacaaaaattcctcccagaggcactctatatctgctatgcctaaaaacttaaactcaccaaatggtgttttgttatccagacagcctagtatgaaccgtggaggatatatgcccacccccactggggcgaaggtggactatattcagggaacaccagtgagtgttcatctgcagccttccctctccagacagagcagctacaccagtaatggcactcttcctaggacgggactaaagaggacgccgtccttaaaacctgacgtgccaccaaagccttcctttgttcctcaaaccccatctgtcagaccactgaacaaatacacatactaggcctcaagtgtgctattcccatgtggctttatcctgtccgtgttgttgagaggatgatgttgtaagggtaccttaaaacaagagactcgcttgtattttaagagaaccaagtggccaaagaaactctttctaactttggcaacatcagaacttgccacatgtagctactgcagcaaggcttctgtgtacttgcctgaaaacaaaggaaggtgctggtcattccatttcttttgtttgaagctaaagagatgtgtagctcacaggggctaccttaccagtataaagagctgataacagtactcagaagaatctgtgaacaaatacttgaaaatgggttcaatgtagactgccattatgtgtggtcttcccattaaatgtgaacattttaatatgtatgcattcaccttgcctcttgcacaaatgtcaaaaaaaagatggtaatatctcaaagaaatgaacttgtagattaccaagcagtttgctaaaaattcaatctttgacccaagctgtagcatttttttttcatgtgtggcatctttttcatgccaccaacaaacttgttgtgtgtgtgcgtgtgtgtgtgtgtgtgtgtgtgtgtgtgtgtgttctgtacccactaggatttgtttaggtgcccattgcatctttttgtgctatggagttgtttacattaagcatgaccgaacgagagacaatactatttcccacaggagtccattgggttcagctttgaaagaggaatagaatcgaggctcctttgaccatcaaaatgatgaactttacttatgtggtacccaatgccagaatgtaagagttgcaagtgattttgtgctgctattcattaaaacttgtattccagtcttgccagcttaaggagatcaagatattaagaggtatccttgatttattttccagtattcagtagtaaaattttcctgtccactgtgaatcaaagcctgagtcactctatttaaccttggacacactaataaggttttattttgattgtgttcgtttccccccccccaatagtaaaatttctcctcctttaactcctcctaccccccaaggtaagaaacaaaaaacaaacaaacaaacaaaaatagaagacaaaagaaagacatatgaaaggaattgtaattggcttaacagaaacagtctgtaaaaacctaacagtggtgcaatcatgttgtctgtgttgtgttatgtgagaattttctcctaagtcatgcaggtaatgacaatatactgtaaataccacatgtgagtttacctgaatctgtgcattttgtgccttattcatgagaatgatagaagtactaaaatctgtcaagtgttttcagtatagcacattatttactgagtgccagttgtaaatgtttttcaaccagcacctaaaaagactcttttcaaaaaatcacagaaacaacctaggacaattatttgttacataatccgacctcatagcagcattacattctttgccgtgataaacattccactcctgctttcctaaggatgaaacagtgataatgtgaactcaaatgaggtttcctgggtaatgtgacacctgcagaaactatagagcgtcatttatacgtagtttggcagaaaccacttacggctgatgatgcgcaaccctgctgactgtttcagttaatatgctgcacaccacacacttgtttagtgaaccaaatctagaaagtaccaaggcagaggtatgctcctgctgtaatcaggcaaatgagttcaactggatttcttttgacaatactgttggtacctattacttgggggaggacatgttgcagaagaccagatcatttttatacagaatgtgaaatactgatacagttattcttttttttaaagaacattgttttataaagaacgtgatttccagtgatctctggaagcgctaaagctaaaatttctgttcttgaaacacttcagctttgcaactaaaatattacagattaataataaattaaaccaaccaatgataaacactactcagtccaccaacaacaaacgtgtttgaattcaccttaccaatattaatcccagcgtgtgtaaaacagaacagtaactctatgtgaccccagataacattttgtaacattgtgcttccttgtagtttgtaatgtgagttcaatcagtatttatgttgaaatttctaacattaaatctagtctctatcctgttaatttaatttttaaatgctttatccatttgtgcaaaggtaaacgcagattgtatcttttttaatggtacggcataaaaagtaaccctcaagtgaagtgtctctatactgttttatagagtactttaacatgaatagataccttgtaaacttgtattgtggatgtgtaaataatatgtactttgggtttttaacaccgcatgtaaagtcaaaataaaatatacaaatcatt

SEQ ID NO: 5710 - DNA, 5335 bp, Homo sapiens; identical to SEQ ID NO: 2219

SEQ ID NO: 5711 - DNA, 8080 bp, Homo sapiens
gtgacggcctcggccgcgggcgtttacactggctctgcctccggcatctcttcgccggtgcgtcctcgccgcgcccgtaggtcccggcagccgggccccgcctccttcggagtccgagcgatgggcggggaaagggacaggcaggtatagctctgtcggcgccgcggtgtccacctcagtcaggccacggtggaagacgcgtgccgcggcgcctggttgcctgcagcggcccggacccgagaggaagctgaaccatctatctccagaaatgtcttcagaaagtaaagagcaacataacgtttcacccagagactcagctgaaggaaatgacagttatccatctgggatccatctggaacttcaaagggaatcaagtactgacttcaagcaatttgagaccaatgatcaatgcagaccttatcataggatccttattgagcgtcaagagaaatcagatacaaacttcaaggagtttgttattaaaaagctgcagaagaattgccagtgcagtccagccaaagccaaaaatatgattttaggtttccttcctgttttgcagtggctcccaaaatacgacctaaagaaaaacattttaggggatgtgatgtcaggcttgattgtgggcatattattggtgccccagtccattgcttattccctgctggctggccaagaacctgtctatggtctgtacacatctttttttgccagcatcatttattttctcttgggtacctcccgtcacatctctgtgggcatttttggagtactgtgccttatgattggtgagacagttgaccgagaactacagaaagctggctatgacaatgcccatagtgctccttccttaggaatggtttcaaatgggagcacattattaaatcatacatcagacaggatatgtgacaaaagttgctatgcaattatggttggcagcactgtaacctttatagctggagtttatcaggtagcgatgggcttctttcaagtgggttttgtttctgtctacctctcagatgccttgctgagtggatttgtcactggtgcctccttcactattcttacatctcaggccaagtatcttcttgggctcaaccttcctcggactaatggtgtgggctcactcatcactacctggatacatgtcttcagaaacatccataagaccaatctctgtgatcttatcaccagccttttgtgccttttggttcttttgccaaccaaagaactcaatgaacacttcaaatccaagcttaaggcaccgattcctattgaacttgttgttgttgtagcagccacattagcctctcattttggaaaactacatgaaaattataattctagtattgctggacatattcccactgggtttatgccacccaaagtaccagaatggaacctaattcctagtgtggctgtagatgcaatagctatttccatcattggttttgctatcactgtatcactttctgagatgtttgccaagaaacatggttacacagtcaaagcaaaccaggaaatgtatgccattggcttttgtaatatcatcccttccttcttccactgttttactactagtgcagctcttgcaaagacattggttaaagaatcaacaggctgccatactcagctttctggtgtggtaacagccctggttcttttgttggtcctcctagtaatagctcctttgttctattcccttcaaaaaagtgtccttggtgtgatcacaattgtaaatctacggggagcccttcgtaaatttagggatcttcccaaaatgtggagtattagtagaatggatacagttatctggtttgttactatgctgtcctctgcactgctaagtactgaaataggcctacttgttggggtttgtttttctatattttgtgtcatcctccgcactcagaagccaaagagttcactgcttggcttggtggaagagtctgaggtctttgaatctgtgtctgcttacaagaaccttcagattaagccaggcatcaagattttccgctttgtagcccctctctactacataaacaaagaatgctttaaatctgctttatacaaacaaactgtcaacccaatcttaataaaggtggcttggaagaaggcagcaaagagaaagatcaaagaaaaagtagtgactcttggtggaatccaggatgaaatgtcagtgcaactttcccatgatcccttggagctgcatactatagtgattgactgcagtgcaattcaatttttagatacagcagggatccacacactgaaagaagttcgcagagattatgaagccattggaatccaggttctgctggctcagtgcaatcccactgtgagggattccctaaccaacggagaatattgcaaaaaggaagaagaaaaccttctcttctatagtgtgtatgaagcgatggcttttgcagaagtatctaaaaatcagaaaggagtatgtgttcccaatggtctgagtcttagtagtgattaattgagaaggtagatagaagaatgtctagccaataggttaaaatttcaagtgtccaacatttcccagttccacagtgggaaattttgcacacttgaaattttaaccaagtggctagatattattcctcctttgaagctaatggcatttgtatatacacactgcagcagagcttgtagctggacagagtcaaaaagaagaaaatacggtttcaggctttcttgcagatatgaagtattcttggaatgcaataagtatgtattgaactgtactgtaaagtagctccaaaacttaattactctcctgttttaggggttatacatttggactgtgcattctccaagagatgaagcggtgaagttgggatttacattggaagtgctgtagacttctttatgtggctcagtggagagagggaaagaatgttgcacctgctctagtaccataggtcaagaggcttctggatcacaaagtcataactagacaggtttgttcttgtagttttctatccccagtctttgctccccagatggcagtagtttttagtaggaaagtgccattcctgtccttaaggcacagtctcatcagaagtctaatacctgggcaggtttataacatcctgagagccagcctgacattagacagaataccctttgtaatacattggaaatttttactcatgcctttttgtttaggataaataggtaagcacaaagagctcttcaaaatcagaaaaaacaataggagtccttccttgtcttttctgtgatctctgtccttgtttctgagactttctctaccattaagctctattttagctttcagttattctagtttgtttcccatggaatctgtcctaaactggtgtttttgtcagtgacagtcttgccagtcagcaatttctaacagcattttaaatgagtttgatgtacagtaaatattgatgacaatgacagcttttaactcttcaagtcacctaaagctattatgcaggaggatttagaagtcacattcataaaacccaagtgctatgggtgtattattcatgatagctggcccacaggtcatgaattgaggaggaatttgctttcaaaaagcaagaatgtccaacactgaaagtttatagttttatatttggaccttgaaaggtaagaaaaaaccaggttctccaaagttaggaatagggaactaatttatgaaacagccatcttaaaaaaaaaaaaagtaaactgcaaaagtacaaaatcatttttcaatctgttcccagtttctaaacaattttaaatatttatgagaagcaaaccctatgtgtagggcatctgttggagtgggatgcttttagacatatattaagtatgtacatgtttaatatgtatatttaaaatgcatatatattttattatatctatattatcctatatagatatatgtaacttagctttattgttagctccataagctgccagtgttgcttttctgttggtagagctctcccatttggtgacatggaaaatacctttccattatcacaacaaagcagttgctcagtagaaagtctagatttctgtcttataggtgatttctgtcttataggtgattataatcaagtgtaggcttcctgaattttgacatccttttagaacttgggtctggaattccagaaatgttaattgctgcttgtatttgttcttgtttgttttttagccagtatttgccctttctatccagccttatgaataatagcagtaaaatcacagtatcttggtcagtctttatttttttccttttttcttttttaagagacagtcatccaggccagagtgcagtttgatgatagcttactgaagcttcccactcctgggctcaagttatccttccattttggcctcctgagtagctagaccataggtatgcatcaccacaccctgctaattttttaaatttttttctagagagagggtctcactgtgttgcccaggctggtctcaaactccaggctcaagcaatccttcagcctcagcctcccagagtgttgggattacaggcgtgagccactgcacttggccaagttatttatttttaatctctcttgcccttctcccaaggcaggcttaagttgagactattataggtgtctaataacctgtgacagagtaatgagtacatgcttaagatgttataattagccaacaccaacacagcaaaaaatataattccagccaaagattctggaaaatccctcagaaggagggataacaggatttgacctttaccagcgatttctgtccatatgtggatgtaaacagttctggaacgttatgcatgcagttagcgaatccttgaattatgttctggtttgtacttgtcccatccatccaaacaagagattctgcttttggtagccatctgtagaaacatttaagatgtcactagaatttacatttcatcctctctacttgggttgaggttgcctatacttgcatattgttaaaatgttttggttgctgatattcagaggaatgaaacctggaaccaaagcctaatttgccgataaaaaaactgttttcggccaggtgcagtggctcatgcctgtaatcccagcacgttgggaggccgaggcgggtggatcacctgaagtcaggagttcgagaccatcctggctaacactgtgaaaccccgtctctactaaaaatacaaaaaattagcggggcatggtggcacgcgcctgtagtcccagctactcaggaggctgaggcaggagaattacttgaacccgggaggcggaggttgcagtaagcagagattgtgccactggactccagcctgggtgacagagcgagactccgtctcaaacaaacaaacaaaaaactgttttcatttgctctcttgaccaaaggataggactttagttctttaagcattattttaaacactatattgatacaaaaatatcttgcttactctaaactttagagtctaaatgaagctttttctcagtacaagattctgagtatcataaaatggttatttaattgaaacgtagtgtggtatactcttgatggttagaactcttacagccttatttatttttaagtttgttacagccaaagggttggagtgtgccagtgcacaggtagactaaggaaaacattatagaggagtgaagagaacagaccattgaaaagactattatctgaccagcggaggcagaaaagagaggaacccagttgaataggatccaatccctggttagcctctacacaataatagggagacaaggattaggagccatacctcccagagcaaggtatctttctagagcaaatttctctttctagaaggggagggtcacagggtcacagattcaccaaagctgaaagggctgaggagctcatggtagcctgggctgacctactctggagcacggtgtcttccttctaaactgagtgactgtagtactatctgtgcctctgatggtaataaaactgacaagatgtctaatttttttttaagtaggaccaaaggaaaacaagatttagatagtctgactttgcttttgaacaacagacattgcaagtcaaaattgttgtcaaatttacatatggtaaatgatgaactttaaaaatgtgtccaggtgttagatgagttcattagactcttttaatgctaatggctagtacgtttaaacaaaacagcagttctctgctgcaatattcccattgaccacttaaatgaccataagtggtcatttaagaacatgttagggttagccctgatctgaatataaaagtgagaaaagggctacagtgcatttcttggtaacttaaactgagtcttgaagttataatgatccattcgagttctgtgatccttattgttcttaattgtgtttctctacgtattgttacagatgagccatacgtttctttgtatcaatgtagacatgacttcagatacctctgaggacctacccagcagtctaggaccctgggccaagtgctgggactatggtactaaatccagtagatgggctgtgtagcaactctcccagggaacacactagggtacttagggaggtgctttgtggagcatgttgaagctttgagatctgagcaggaggcagtgatgtccctggtctattcagggaaagatttcagtgtgaaatggtaaacatccaattgacaggatttagattttgcttagtttttctgctttttaatgtttctatcccccatctcagtgttttctttatccatcccagtgatgccttatttgaaactgggcttaaactgcaaaaagaatgaagttggatttaggaagctgttagatcattgagtggtgttgagagtgaagtttcactagcagggaagtttccttgagcctaaaataaaaagaaaaaattaaaaagaatcagtttttttaattaaaaaaatagaaagctgttaggctcctaattcgtggggtttttttttgtaaaaacagtttagataatcctgaatgcaatcattaacttggttgctaattacaagaatgaaaattataatggaaaaggacaaaataatataccagctggtttgttattatagtccgtgtattaaaatactattgaaatacgttaaaggtaaatttttaaggtttaaaaaaaatttagtaacttacagggatggagaatttagatgtcagaggtggggagatttatttttataaggtaatttttatcctgataaggacttaaaaaaaagttttgcaactgaaattttaaagtaaacatgttaagtacagttaaaaagtaagcattgtagtaaatagtggattctctggtgtgtattttttatctcagtgttgaaaattggaaaagaatggactgaagtctaaaaactggaataatgaaggacactaaatgcctttattgtagatactatgtttgtaagtctatagctaagcaacttaagccaaaaaggtctttcaactgaagctttaatcaacttattttggagatgttctcttcccttatctcatgcgtcatccctaaaataataagatacatgggatcaaatagcccttgccttttcaacacaaatcagttggaaaattatggtttgagtcctgttgctgccatggcttctgtttctcagaaatgagtgtgtatgaacataccaatctatgtaataggctacctttttttgtcttctttggaactttgtacacaaaccaagacaatatcagggtgacaggtgaatgaacttaaattctcagtcttgtctattcaccaaaaaagtatactgcctgttttttctttaattattcaaggttgatgacttttaggaacatgttttatactgtattttttaattaaagcaagtgccttgatgtaattccatgtaaatcattgcttaaccctcttatgggatgaggatgagttattaatgtattgcagcctactggaaaggagggggagttggttaatagcagatacttttcttctagaagcttatgttttatgctgtttattatgtaagatcctgtatgtgtgttgagatttagaggtttcatttgttttgtctgctaataaattgttactctaataatacatta

SEQ ID NO: 5712 - DNA, 2654 bp, Homo sapiens
atagagctgatgtatccagaggttatgttgctagaggtgagatcagttacctacgtgcaactgaaatttcaaacttctgttcagcagggacgtgagtggacaatggtgactgatagttggaaatatcagcaaacatcttaaattttatactcaaatgaatgagcaatgaaccaggagaataggtccagttttttttggctccttgtaatttttacctttttacttaaaattacagcatctttttcaatgagtgcctatgtgactgtgacttattacaatgaaaccagcaactacactgcaatagagacatgtgaatgtggcgtttatggattagcttcaccagtggctaatgctatgggagtggtaggcatccctaagaacaataactaccaagcttgtgaccacaacactgagtttagtaatactaagaagccctggattgcgctgatagaaagaggtaattgtacattttcagaaaaaattcaaacagcgggcagaagaaatgctgatgctgttgtgatttacaatgctccagagactggcaatcagacgatacagatggcaaattttggtgcagtagacattgttgcaatcatgatcggcaatctgaaaggcacaaaaattctgcaatctattcaaagaggcatacaagtgacaatggtcatagaagtagggaaaaaacatggcccttgggtgaatcactattcaatttttttcgtttctgtgtccttttttattattacggcggcaactgtgggctattttatcttttattctgctcgaaggctacggaatgcaagagctcaaagcaggaagcagaggcaattaaaggcagatgctaaaaaagctattggaaggcttcaactacgcacactgaaacaaggagacaaggaaattggccctgatggagatagttgtgctgtgtgcattgaattgtataaaccaaatgatttggtacgcatcttaacgtgcaaccatattttccataagacatgtgttgacccatggctgttagaacacaggacttgccccatgtgcaaatgtgacatactcaaagctttgggaattgaggtggatgttgaagatggatcagtgtctttacaagtccctgtatccaatgaaatatctaatagtgcctcctcccatgaagaggataatcgcagcgagaccgcatcatctggatatgcttcagtacagggaacagatgaaccgcctctggaggaacacgtgcagtcaacaaatgaaagtctacagctggtaaaccatgaagcaaattctgtggcagtggatgttattcctcatgttgacaacccaacctttgaagaagacgaaactcctaatcaagagactgctgttcgagaaattaaatcttaaaatctgtgtaaatagaaaacttgaaccattagtaataacagaactgccaatcagggcctagtttctattaataaattggataaatttaataaaataagagtgatactgaaagtgctcagatgactaatattatgctatagttaaatggcttaaaatatttaacctgttaacttttttccacaaactcattataatatttttcataggcaagtttcctctcagtagtgataacaacatttttagacattcaaaactgtcttcaagaagtcacgtttttcatttataacaattttcttataaaaacatgttgcttttaaaatgtggagtagctgtaatcactttattttatgatagtatcttaatgaaaaatactacttctttagcttgggctacatgtgtcagggtttttctccaggtgcttatattgatctggaattgtaatgtaaaaagcaatgcaaacttaggcgagtacttcttgaaatgtctatttaagctgctttaagttaatagaaaagattaaagcaaaatattcatttttactttttcttatttttaaaattaggctgaatgtacttcatgtgatttgtcaaccatagtttatcagagattatggacttaattgattggtatattagtgacatcaacttgacacaagattagacaaaaaattccttacaaaaatactgtgtaactatttctcaaacttgtgggatttttcaaaagctcagtatatgaatcatcatactgtttgaaattgctaatgacagagtaagtaacactaatattggtcattgatcttcgttcatgaattagtctacagaaaaaaaatgttctgtaaaattagtctgttgaaaatgttttccaaacaatgttactttgaaaattgagtttatgtttgacctaaatgggctaaaattacattagataaactaaaattctgtccgtgtaactataaattttgtgaatgcattttcctggtgtttgaaaaagaagggggggagaattccaggtgccttaatataaagtttgaagcttcatccaccaaagttaaatagagctatttaaaaatgcactttatttgtactctgtgtggcttttgttttagaattttgttcaaattatagcagaatttaggcaaaaataaaacagacatgtatttttgtttgctgaatggatgaaaccattgcattcttgtacactgatttgaaatgctgtaaatatgtcccaatttgtattgattctctttaaatataaaatgtaaataaaatattccaataaaa

SEQ ID NO: 5713 - DNA, 2176 bp, Homo sapiens
ctgagatctgtggaggtttttctctgcaaatgcaggaagaaatcaggtggatggatgcataattatggccctgctcctggtctctttgctggcattcctgagcttgggctcaggatgtcatcatcggatctgtcactgctctaacagggtttttctctgccaagagagcaaggtgacagagattccttctgacctcccgaggaatgccattgaactgaggtttgtcctcaccaagcttcgagtcatccaaaaaggtgcattttcaggatttggggacctggagaaaatagagatctctcagaatgatgtcttggaggtgatagaggcagatgtgttctccaaccttcccaaattacatgaaattagaattgaaaaggccaacaacctgctctacatcaaccctgaggccttccagaaccttcccaaccttcaatatctgttaatatccaacacaggtattaagcaccttccagatgttcacaagattcattctctccaaaaagttttactatggctgaataagaatgggattcaagaaatacacaactgtgcattcaatggaacccaactagatgagctgaatctaagcgataataataatttagaagaattgcctaatgatgttttccacggagcctctggaccagtcattctagatatttcaagaacaaggatccattccctgcctagctatggcttagaaaatcttaagaagctgagggccaggtcgacttacaacttaaaaaagctgcctactctggaaaagcttgtcgccctcatggaagccagcctcacctatcccagccattgctgtgcctttgcaaactggagacggcaaatctctgagcttcatccaatttgcaacaaatctattttaaggcaagaagttgattatatgactcaggctaggggtcagagatcctctctggcagaagacaatgagtccagctacagcagaggatttgacatgacgtacactgagtttgactatgacttatgcaatgaagtggttgacgtgacctgctcccctaagccagatgcattcaacccatgtgaagatatcatggggtacaacatcctcagagtcctgatatggtttatcagcatcctggccatcactgggaacatcatagtgctagtgatcctaactaccagccaatataaactcacagtccccaggttccttatgtgcaacctggcctttgctgatctctgcattggaatctacctgctgctcattgcatcagttgatatccataccaagagccaatatcacaactatgccattgactggcaaactggggcaggctgtgatgctgctggctttttcactgtctttgccagtgagctgtcagtctacactctgacagctatcaccttggaaagatggcataccatcacgcatgccatgcagctggactgcaaggtgcagctccgccatgctgccagtgtcatggtgatgggctggatttttgcttttgcagctgccctctttcccatctttggcatcagcagctacatgaaggtgagcatctgcctgcccatggatattgacagccctttgtcacagctgtatgtcatgtccctccttgtgctcaatgtcctggcctttgtggtcatctgtggctgctatatccacatctacctcacagtgcggaaccccaacatcgtgtcctcctctagtgacaccaggatcgccaagcgcatggccatgctcatcttcactgacttcctctgcatggcacccatttctttctttgccatttctgcctccctcaaggtgcccctcatcactgtgtccaaagcaaagattctgctggttctgtttcaccccatcaactcctgtgccaaccccttcctctatgccatctttaccaaaaactttcgcagagatttcttcattctgctgagcaagtgtggctgctatgaaatgcaagcccaaatttataggacagaaacttcatccactgtccacaacacccatccaaggaatggccactgctcttcagctcccagagtcaccagtggttccacttacatacttgtccctctaagtcatttagcccaaaactaaaacacaatgtgaaaatgtatctgagtattgaatgataattcagtcttgcctttgaagggtatgtcacaaagagctgacagtgcttctacacatttcatctaa

SEQ ID NO: 5714 - DNA, 15584 bp, Homo sapiens; identical to SEQ ID NO: 1799

SEQ ID NO: 5715 - DNA, 4649 bp, Homo sapiens
gatgctgcgggagacccctgagatacaagtggactctcccggggcgcggggaagaagggagagccgactgcgagaaggaaggcgacctgggtgggcaggatcccctctgggaagattacagggacagtcggggccatggcggtcagaaggagaagagcaacgagtggcttttaaaggtcggaaccgaaatgccctttacagaggacgccatgaaggagagccttctgaagagggaccatgtggaagatgccccgaggactcggggaggcggagcccgcgggttcagcccccagcgcccgcacggcccctgcctgcgtaggccgcccgcgggagccggaccccgggcgccggttgctgtggcccgcgggggtcgccgggccgcaggcgccgcgctgattggctgcgccgcgggcggaagtgatgctgctgtcactgctcctccggctcccgggaagccgcgagtttccgcagggaggcggcggcagctgcggcggggccggtctgtagcctttgctgagtcaacactactcacagtgaaagtgatgccttttctccatttgcacaacatgagtgtgacgtggttagccagaccaggagctcaacctcatgtagaatccagtccactgctctgatgccgaaggggaggcagaaagtgccacacttggatgcccccctgggcctgcccacctgcctctggctggaattagccgggctcttcttactggttccctgggtcatgggcctggcagggacaggtgggcctgatggccagggcacaggggggccgagctgggctgtgcacctggaaagcctggaaggtgacggggaggaagagactctggagcagcaggcggatgccttggcccaggcagcagggctggtgaatgctggacgcatcggagagcttcaggggcactacctctttgtccagcctgctgggcacaggccggccctggaggtggaggccatccggcagcaggtggaggctgtgttggctgggcatgaagctgtgcgctggcactcagagcagaggctgctaaggcgggccaagcgcagcgtccacttcaacgaccccaagtacccgcagcaatggcacctgaataaccgacggagcccgggcagggacatcaacgtgacgggtgtgtgggaacgcaatgtgactgggcgaggggtgacggtggtggtagtggatgacggagtggaacacaccatccaggacattgcacccaactatagccctgagggtagctatgacctcaactctaatgaccctgaccccatgccccacccggatgtggagaatggcaaccaccatggcacgcgatgtgcaggagagatcgcggctgtgcccaacaacagcttctgtgccgtgggcgtggcctacgggagccgcatcgcaggtatccgggtactggatggacctctcacagacagcatggaggcagtggcgttcaacaagcactatcagatcaatgacatctacagctgcagctggggaccagatgacgatgggaagacagtggatggcccccatcagcttggaaaggctgccttacaacatggggtgattgctggtcgccagggctttgggagcatctttgtggtagccagtggcaacggaggccaacacaacgacaactgcaactacgatggctacgccaactccatctacaccgtcaccataggagctgtggatgaggagggacgcatgcctttctatgcagaagaatgtgcctccatgctggcagtcaccttcagtggtggggacaagatgcttcggagcattgtgaccactgactgggaccttcagaagggcactggctgcactgagggccacacagggacctcagctgcagcgcctctggcagctggcatgatagccttaatgctgcaggtgcggccctgcctcacgtggcgtgacgtccagcacatcattgtcttcacagccacccggtatgaggatcgccgtgcagagtgggtcaccaacgaggcaggcttcagccatagccaccagcacggtttcggcctcctcaacgcctggaggctcgtgaatgcagccaagatctggacatctgtcccttacttagcatcctacgtcagtcccgtgttaaaagaaaacaaggcgattccgcagtccccccgttccctggaggtcctgtggaatgtcagcaggatggacctggagatgtcagggctgaagaccctggagcatgtggcagtgacagtctccatcactcacccacggcgcggcagcttggagctgaagctgttctgccccagtggcatgatgtccctcatcggcgccccccgcagcatggactcggatcccaacggcttcaatgactggaccttctccactgtgcgatgctggggggagagagcccgagggacctacaggcttgtcatcagggatgtcggggatgagtcattccaggtcggcatcctccggcaatggcagctgaccctatatggctctgtgtggagtgcagtagacatcagggacagacaaaggctgttagagagtgccatgagtggaaaatacctgcacgatgacttcgccctgccctgcccaccggggctgaaaattcctgaggaagatggttacaccatcacccccaacaccctcaagaccctggtgctggtaggctgtttcaccgtcttctggactgtttactacatgctggaagtatatttgagccagaggaatgtggcttccaatcaagtttgtaggagtggaccctgccactggccccatcggagccggaaagccaaggaggaagggacagagctagaatcagtgccactttgcagcagcaaggatccagacgaagtggaaacagagagcaggggccctcccaccacctctgacctccttgccccagacctgctggagcaaggggactggagcctgtcccagaacaagagcgccctggactgccctcatcagcacctagacgtaccgcacgggaaggaggagcagatctgctgacctcagggcctgacagtgtgggacaggctcttctttcccaaaattagggagctcttgacagaaagcagttctgatgcttacatctggaatctgaggcatcctctgactccactcaaagagggtgagggccttcttaagatacaaatggtggaggattgctgccagagaagtctggtcagagccacagggtctgcctccagccaaacgggagcttttggtgagaaggtgttggacaggggattggcgcccccctttggtttggcctccatcctcatctctcttgggccaagccagctgcctaggtcccccaagcatgggggaccccttcccacatataagttgagaaggtgcctgccatagccaggagcgcatctcaatggaaacatcactggggtcacttgggaagaggacttcggggtagaggctgggaggagcccctggacatgcctgtcctgaaagcggctgcctccattatccattcccaagatgcctgatcagaaaccaaccatgaatgaacccctggctccttcaccacccccacgattggtatgatgctgccggcacagctgggatacacacggctcccccaggcctgagctgcttcactagggaatcctgcggcaggactgcagagcagatggcagatgcacatgttggaggagagagccttgggagccactgccactccagtcctgccaccaccctgtcttcctctgcaagtgctcagggaaatggccttcccgccggaggccagctatctgcctgacaggctgtgactcttctctcaaccttggccttctcccctcttctgagctagttggttgaattttttttaatgcttaagatttgtttttctcttttcacagcaacattttcttgaatttttttctgcacagcttttccaaaataaaaaccttccaaacaattctgccactcgcaatctctcctttcctctgtctccccaaagccactgcatgctgctgagtggctcctttttcccttcggtccccaagattcactctcctgttctatggcctgtttcctctgaaagaatctgactgtcctggaatcttggcacatgaagggtccttcagaggacggcagccaggaacacatacaagcccgagatgcctgcctgtcccctgcgcagatctgaaaccataacaaaagtgaccagggcaaatcaaactctgccagccaggcctgagaaaagattgattttttttttttttttttgagttccaaccccaaaaatattccaggacaagatagggggcaggctgggctggttcttcttcaatgggcttttgccgccaaggaggacagtggacttggcccacatccaggctacccccagcccgcttctcccctgcttagcccagggaggagacagtagaggtgatgggggcagccgggagggaggggccaaggcagtgatgctttcgggtaagaagttgggctgaggctgggggcacagggaggagctgcccaggtgcagttaccattgctcagtgacagagcctcaaagcttggccagggctgaaggtaccacacgggtgtgggtgaggcaggctaagcgggatggctgcagccaaggagctgggggagggccgggctcagggctagccctctccgctctaactgatgatctgccgaggtc

SEQ ID NO: 5716 - DNA, 567 bp, Homo sapiens
ttctgcgtttctctagtgcagtgcctggagatgaccaccaaacggaaaatcatcggccgtctggtgccatgccgatgtttccgaggtgaagaagaaatcatctcagttttagattactcccactgcagtcttcagcaggtgccaaaggaggtctttaacttcgaacgaacattagaggagctttatctagatgccaatcaaattgaagaactacccaagcaattgttcaactgtcaagctctacgaaaactaagtattcctgataacgacctttcaaatctgccaaccactattgctagtttagttaatcttaaagaactcgacatcagtaaaaatggtgtacaagaatttccagaaaacataaagtgctgtaagtgtttaacaattattgaagccagtgtcaatcccatttctaaactacctgatggcttcacacagctcctaaacctgacccagctctacctgaatgacgcctttcttgaatttcttccagccaattttggaagacttgtcaaattgcggatcttggagttaagagaaaatcacttgaaaactctaccaaaaatt

SEQ ID NO: 5717 - DNA, 4844 bp, Homo sapiens
gaaaagcttattagctgctgtacggtaaaagtgagctcttacgggaatgggaatgtagttttagccctccagggattctatttagcccgccaggaattaaccttgactataaataggccatcaatgacctttccagagaatgttcagagacctcaactttgtttagagatcttgtgtgggtggaacttcctgtttgcacacagagcagcataaagcccagttgctttgggaagtgtttgggaccagatggattgtagggagtagggtacaatacagtctgttctcctccagctccttctttctgcaacatggggaagaacaaactccttcatccaagtctggttcttctcctcttggtcctcctgcccacagacgcctcagtctctggaaaaccgcagtatatggttctggtcccctccctgctccacactgagaccactgagaagggctgtgtccttctgagctacctgaatgagacagtgactgtaagtgcttccttggagtctgtcaggggaaacaggagcctcttcactgacctggaggcggagaatgacgtactccactgtgtcgccttcgctgtcccaaagtcttcatccaatgaggaggtaatgttcctcactgtccaagtgaaaggaccaacccaagaatttaagaagcggaccacagtgatggttaagaacgaggacagtctggtctttgtccagacagacaaatcaatctacaaaccagggcagacagtgaaatttcgtgttgtctccatggatgaaaactttcaccccctgaatgagttgattccactagtatacattcaggatcccaaaggaaatcgcatcgcacaatggcagagtttccagttagagggtggcctcaagcaattttcttttcccctctcatcagagcccttccagggctcctacaaggtggtggtacagaagaaatcaggtggaaggacagagcaccctttcaccgtggaggaatttgttcttcccaagtttgaagtacaagtaacagtgccaaagataatcaccatcttggaagaagagatgaatgtatcagtgtgtggcctatacacatatgggaagcctgtccctggacatgtgactgtgagcatttgcagaaagtatagtgacgcttccgactgccacggtgaagattcacaggctttctgtgagaaattcagtggacagctaaacagccatggctgcttctatcagcaagtaaaaaccaaggtcttccagctgaagaggaaggagtatgaaatgaaacttcacactgaggcccagatccaagaagaaggaacagtggtggaattgactggaaggcagtccagtgaaatcacaagaaccataaccaaactctcatttgtgaaagtggactcacactttcgacagggaattcccttctttgggcaggtgcgcctagtagatgggaaaggcgtccctataccaaataaagtcatattcatcagaggaaatgaagcaaactattactccaatgctaccacggatgagcatggccttgtacagttctctatcaacaccaccaatgttatgggtacctctcttactgttagggtcaattacaaggatcgtagtccctgttacggctaccagtgggtgtcagaagaacacgaagaggcacatcacactgcttatcttgtgttctccccaagcaagagctttgtccaccttgagcccatgtctcatgaactaccctgtggccatactcagacagtccaggcacattatattctgaatggaggcaccctgctggggctgaagaagctctccttctattatctgataatggcaaagggaggcattgtccgaactgggactcatggactgcttgtgaagcaggaagacatgaagggccatttttccatctcaatccctgtgaagtcagacattgctcctgtcgctcggttgctcatctatgctgttttacctaccggggacgtgattggggattctgcaaaatatgatgttgaaaattgtctggccaacaaggtggatttgagcttcagcccatcacaaagtctcccagcctcacacgcccacctgcgagtcacagcggctcctcagtccgtctgcgccctccgtgctgtggaccaaagcgtgctgctcatgaagcctgatgctgagctctcggcgtcctcggtttacaacctgctaccagaaaaggacctcactggcttccctgggcctttgaatgaccaggacaatgaagactgcatcaatcgtcataatgtctatattaatggaatcacatatactccagtatcaagtacaaatgaaaaggatatgtacagcttcctagaggacatgggcttaaaggcattcaccaactcaaagattcgtaaacccaaaatgtgtccacagcttcaacagtatgaaatgcatggacctgaaggtctacgtgtaggtttttatgagtcagatgtaatgggaagaggccatgcacgcctggtgcatgttgaagagcctcacacggagaccgtacgaaagtacttccctgagacatggatctgggatttggtggtggtaaactcagcaggtgtggctgaggtaggagtaacagtccctgacaccatcaccgagtggaaggcaggggccttctgcctgtctgaagatgctggacttggtatctcttccactgcctctctccgagccttccagcccttctttgtggagctcacaatgccttactctgtgattcgtggagaggccttcacactcaaggccacggtcctaaactaccttcccaaatgcatccgggtcagtgtgcagctggaagcctctcccgccttcctagctgtcccagtggagaaggaacaagcgcctcactgcatctgtgcaaacgggcggcaaactgtgtcctgggcagtaaccccaaagtcattaggaaatgtgaatttcactgtgagcgcagaggcactagagtctcaagagctgtgtgggactgaggtgccttcagttcctgaacacggaaggaaagacacagtcatcaagcctctgttggttgaacctgaaggactagagaaggaaacaacattcaactccctactttgtccatcaggtggtgaggtttctgaagaattatccctgaaactgccaccaaatgtggtagaagaatctgcccgagcttctgtctcagttttgggagacatattaggctctgccatgcaaaacacacaaaatcttctccagatgccctatggctgtggagagcagaatatggtcctctttgctcctaacatctatgtactggattatctaaatgaaacacagcagcttactccagagatcaagtccaaggccattggctatctcaacactggttaccagagacagttgaactacaaacactatgatggctcctacagcacctttggggagcgatatggcaggaaccagggcaacacctggctcacagcctttgttctgaagacttttgcccaagctcgagcctacatcttcatcgatgaagcacacattacccaagccctcatatggctctcccagaggcagaaggacaatggctgtttcaggagctctgggtcactgctcaacaatgccataaagggaggagtagaagatgaagtgaccctctccgcctatatcaccatcgcccttctggagattcctctcacagtcactcaccctgttgtccgcaatgccctgttttgcctggagtcagcctggaagacagcacaagaaggggaccatggcagccatgtatataccaaagcactgctggcctatgcttttgccctggcaggtaaccaggacaagaggaaggaagtactcaagtcacttaatgaggaagctgtgaagaaagacaactctgtccattgggagcgccctcagaaacccaaggcaccagtggggcatttttacgaaccccaggctccctctgctgaggtggagatgacatcctatgtgctcctcgcttatctcacggcccagccagccccaacctcggaggacctgacctctgcaaccaacatcgtgaagtggatcacgaagcagcagaatgcccagggcggtttctcctccacccaggacacagtggtggctctccatgctctgtccaaatatggagcagccacatttaccaggactgggaaggctgcacaggtgactatccagtcttcagggacattttccagcaaattccaagtggacaacaacaaccgcctgttactgcagcaggtctcattgccagagctgcctggggaatacagcatgaaagtgacaggagaaggatgtgtctacctccagacatccttgaaatacaatattctcccagaaaaggaagagttcccctttgctttaggagtgcagactctgcctcaaacttgtgatgaacccaaagcccacaccagcttccaaatctccctaagtgtcagttacacagggagccgctctgcctccaacatggcgatcgttgatgtgaagatggtctctggcttcattcccctgaagccaacagtgaaaatgcttgaaagatctaaccatgtgagccggacagaagtcagcagcaaccatgtcttgatttaccttgataaggtgtcaaatcagacactgagcttgttcttcacggttctgcaagatgtcccagtaagagatctgaaaccagccatagtgaaagtctatgattactacgagacggatgagtttgcaattgctgagtacaatgctccttgcagcaaagatcttggaaatgcttgaagaccacaaggctgaaaagtgctttgctggagtcctgttctcagagctccacagaagacacgtgtttttgtatctttaaagacttgatgaataaacactttttctggtcaa

SEQ ID NO: 5718 - DNA, 6894 bp, Homo sapiens
gacgccccttcgccgggacctggcacccgaatccggcctgccgggcctctttgtgcagcgccttgctgacgcccagggttctgatgtagaagcctacaccagggcctgaggttgtgaaactcatggcagtccacgcctgagaagagaaggcctgaaagagaaggaagagcccatgggacttgccacggttttgacttacatctgcaactccaaggctacaggcaggaatgttacctggaatgtcagagagctgaaagcagtcatattttgggatcatgcacctactgcggcagtatataaagaaagataattaagtatgcacccaagaagtagctgcgcccctacccatcacaaactgtatagaaggatatctcctaaggattttatcatgtgaaaactttctgaattttagttggctctttttagaaatgcagataagatgaaggatattggacagcagctatacactacacacttgaacggcggacataattccttgaccatgtcacccaaacagcctgatgctaatggagcacctcggccaaatagacaagaagcacaaacccttttgtatcaaggctcagaggcagaggctgccatgatgaccattgctacatgtgcaaagtgcaaaagtgttcacaagatctctcttcaagatttgcagaagggtacagggaaggacggtatgtatgtctgcttccagtgcagcctcggtgcagctcctcccaattttcattttgtgagcaataattccagtgcgactcatgttggaaataaaactgaaaacttctcaagttctgtcaatagcaaatttaaggtaaggaactttaagccaggcaaatactattgtgataaatgtcgattctctacaaaggacccgctgcagtacaaaaagcacacccttcaacacgaggagattaaattcatttgttctcactgcagctacatttcgtatacgaaaggagagtttcagaggcatttggtgaaacacacaggcatatttccttatcagtgtgagtattgtgactatggtgctattagaaatgattatattgtcaaacacacgaagagagtacatgaaagggcaggtgcgaaacggccagtcaaagctgttgccaagctggagccaaaaagaaccggaacttcaaaacaaaacccagagcttctaaaagcttccaatccacggactacatttcaaaataagtggtcagaccaactgtcaggtttctctctccatgcaaataaagacaaaatgcacaatatcatgttgttacctgaaccaaaggaataccaaaaagatgtagtttgtattccaaataaaatgaccctgtctgagccaaatgaagtcaacctatttgagaacaaaaatgttgaagtagaagtgttatcccctgcaaaagaacctgttcagccaggtatgccattgacagttgttgcaccagcagaactagttgtccctgcaaactgtttagcccagttgatagatgtgaaggttgtcaatggtacacagcagcttgttctgaaactgtttccgctggaagaaaataattgccttgaagctgggagggataatggaggtaattctgaacgtatggtgaaagagaagggttcaaatgaacaagaaaaagtactttctgcagaaaaaacaaagtcactgacagttgacgggaatgttggaaaactcgtaggcattgatagttttcaaccttcagttcagaaacagcttaaaaatgtgaaatgggtaaggtcttatgattttattatgccaaattctagtgtgcacaacaatggaaaatccttcattaattcggaaacaattgaggattttcagaaaaaaaataatttgtatccacatagaactgcttttccttccgttgccttaaaaggtcattctctagcatctgtatttaaaaacagtgttttacgtagtcttggagctgcatcaaacccttttccatataaagctgctgtttgttttgctgaaagtggaagaaatttacacagtagctcacagcagttactcccatttgctgcatcacctgcaacctgttccttctctggagaaaagggcttattgcctgtaagtgaaaatgacttggaatctacaagtaaagtcaatattcctgtaaaagtggtttcctctaataggaagcaggaagataaccagacagaggaacacaaggcagtttcaactgtaggccagatttcctctcaacataagagtgagtatttacatataaacataactggagaagatagatctcaacagcctggggataagcctttggaattaaagaattctgaaaggactaacaacactaatgatggcccagtcatctcatcagtattttctctgagctctggatctgaaaatgtccccgagggcattaagtggaatagctcaacgtctaaaataaagtcaattgaactgttgcgcagaaagatagctcagttaattgagtcctgtgggaagccgtcatctttggcttcaaatagtgcacatcgtcgctctgtagggcaggcatcaaagggaacttcaaaagctacctctgaaggtattcaagaaatcaacgtgtcactcactggtcttggccattccacaggtactcttcagaaacctccgaatgatggtggtattactggtaatagacagcttactcatcaacaaatatatccacactttgcagatggcagtaataggaaaaccaaaagcagagtggccaggaaggctcatgttgccacgccagtgttaatccccaaaggggctgtgttgagggttcttaattcctctgagaatgcccacatcatagaggctacatgtgaagcacctgtcagcataccttgcagtgaaagacagttaataaaaccagttccattttgccctgtgagacaggcggactcagacttacagcctttaagaagtgaaagggggccaatagatatgtccccaaatatcgagacacctctgcggcctaaactgagaaaagagagtgctgtctgtagcaccatccatagaaaaactggcctcttgtatggacagcaaggaagcagtgaattaaataagcaagggagactgctttccagaagtctttctataagtagaaataaaaccaaacaagtacacttatccaggaagaaaaacaaaattcaagctgaacctagccgctgtctcaaggatccttcaatttttcaggttgcaaggcaactaagactgatagcagctaagccagatcagttgattaagtgtccccgtcggaaccagccagtcattgtgttaaaccaccctgatgtggactcgccagaagtgaccaatgtgatgaaggtaataaataaatacaaaggcaatgtcctcaaagttgttttatcagagaggactaggtgtcagctaggcatcagacggcatcatgtacgcctgacctaccagaatgcggaagaagccagtcaaattaaaaggcaaatgatgttgaaaatgaaactcaaaaaagttcataaaaacaactaccaggtagtggattccttgcctgatgattcttcacagtgtgtatttaagtgctggttttgtgggcgactgtatgaagaccaggaagagtggatgagtcatggccaacggcatttgatagaagcaactagagattgggatgttctttcctccaagggcaaataagtaaacagttactctttaaagcaagttatcttttagtttattctggtttggagtccctccaccaagattcagtagaagaaatacagactgtagaaatgagaggactgctaattcttcagaactgtaggaatattgggagctaggagtctgaacctgaagtatgtgattggaccccagaatgtatttgaaggctctgaaattgtacatgcaaattggtacatatgcatttttctggagagagcctgtgaaactgaacagattttcagtgggatctgagacttttctttgtttagcaccccgttttctgagtacatactgatctttcataatccattcagaggggcagattgagaatgttttacacatgctcttcatataaatgctacagaaaaacctttgttttggtgtgcacatccattttgtttttgctttaatttgtgttctgagtatttggtgcacaatggaaattatattttctactttactgtcttcaatttggttatagagaaatggccattcttttactccctccctggttttgtaatactcccgagtgttccgtatagcacaaagagttttgcttttactggccattttaaagaatgttttcaactgcttgcctgaatttactcctttcacagcaagtgttagaagaaagataacattttcaaatacttagcttttgctttctttaaaatacattggtttatgacatatgggaagggaacgtacctttttgcaaagacaaaaagagattacaaaaggaaaatatctaaaactattttctctttgcccttaccactcccagaaacataagtgaccaatttaaaatgctagggaacaggcttacaacataggtaaaactcgcaaacacagttcaaggtaggctcataaagttgtgaaaagggtttcatatgccctttagttttcatttgggattcatccaaagaccatgggtggatgctgtcttctctcttcttgatccctttgattcatggacactagactccctttgccatttcttctgaaccggccctcctgtggactagcacaacttccttgcccactgtttcttcctttctgtgcctttgagaccccttaaggttttccctcatgcgattactagaaaatggcaggaatcaacaaaatggagacctcccactgtttttgctaaagttacaggaacacgatccctagttttcattgatagtaacgctgtttctaatttgtcttaaccacattcatgcttaccctgctgctcagctttctcagggaagcaactccaggaacactccttccactcccctctctaccaacagatgtcaggactgtcatttatctacacatttgtgttctttagaaaaaggcccaccccctgcacaagcacagcctcttgggcagataggtggctgggtcagtgcttaagacaggattctagtcttcacttgcctgtgcagctgggcgctgaccttccaggtagagcacagatggcacaaccccgaggcagccccaacttgcatttccctccctccaggggctattcctgtcttaggcgatttgtggggtgcagtgaatgaaactaaagagttgttgcacctgaaaaagacaccagtgattgtttattgggtagtcgattggagactttgatttttttttttttttttcacatgggaaagtcttagattccagtagatggaattgcaatcctttgcagtttgttctcattacagataatcaacatttcttttgtataattcaatacatgatcatcaagttaattggtaaatttttattgaaatttaaaacttgcatttttatatatgtgtatgtgtacacataaaaatattttttaccatatgaaaattgcagtagctaattttctgatttcctattttataatgatacatgggctggaaaaatgtagaacgtttttatattctagaaatttattttggaagtacatttttataagggtctaatctcacttttggaaaatgaaagcacaggaatgatggggtctggtttatgtgaacaagtgagtagaaacccctttggatcattttattactgcatttttatttggtgctttttaggaagtagatctttggtaccacttcactacgtagagcattcgaagttttatccatgttatatattgtactcctgtggcatgaaaaatagctcccaagatatagagaggagaggagtgaagaaaaggctgtggtttttttttgttttgttttgtttgccacttttttatctcctattcctcaccacatagtgctttttcctgaaaagctggactgagaattggccttgaatcaggtcagagtgttaactgtcaacatgaagtattttcacttcgcagcatcaactttcaagcataagtaaaaacacaacttgcatactttgatggagcttaattgtgtgagtagaatatgtagcaaagctttttaggattttcagaactagaatactttttaaggaattaaaagtgtttctggaagtcaaaaatgggaaagcaaaaagtagctgtcctccctaaagagctttagaagatagcttaacctgtaggtacatgttatgaaataaacacatttctaacaatacaagggagtaggggcagacctgtgttgagtatttgtgtgggttcttaattttgaaggacctccaatcactacattttgttaatactgccaataaaatcattttcaacttattttttaaagtaggttttcttactttggtggaccagaagtgagagattgttatatttaggatataggcaaatacagtaaaagttaaaaaaaaaaaacctgacccaaagtatactctgatagactatattatattcaattttgtatccccagtcgagaacatcttgtaagccttcattaagggccacctgctgtctgttgaactagactgaacaaaatatattttctcacaagctccatccctttttctttaggacatgttatatataatccatctcagaagttgaagatgtgatgttgctcggcctttggaataatttttaaatctgtaaatgtctatatgagcagaaacaaaacattgtgtaacatgttttaagcattattgtaattcctgtgttaacagtttgtgtgtctgctgctctggttttgaaacatgtttgtatatagatacaggagttggcataaattttgttaaataaagcaacaaaaattttctttgccctttgatttcaa

SEQ ID NO: 5719 - DNA, 5232 bp, Homo sapiens; identical to SEQ ID NO: 327

SEQ ID NO: 5720 - DNA, 1189 bp, Homo sapiens
ccctttaatgagttcttgttttcctgactgcagctctcttcattctgccaaccttttccaactccatgatgatcctgcaggtttcagggggcccctggacagtggctctgacagcattactgatggtgctgctcatatctgtggtccagagcagggccactccagagaattccgtctaccaggaacggcaggaatgctatgcgttcaatgggactcagcgcgttgtggacgggctcatctacaaccgggaggaatacgtgcattttgacagcgcagtgggggagttcctagcagtgatggagctggggcggcccataggcgagtacttcaatagccagaaggactttatggaacggaagcgagccgaggtggacaaggtgtgcagacacaagtacgagctgatggagccactcatccggcagcgccgaggagacgtaaccataactgctgttagggggtgttggacgacgattctttctggctacttcctgctgaaaaggggcgtcgtgttggggggctgcagttggggctcctcctgaggttgatctaaggcttcttggaagaatggcatgtccatgtgtggctttgtttgcagcaccatttgaagtttgattgcttctaggcaaaaagagataaattttacaagaaggtttaaaatatagggttaccatatgagtattaagattaccacctatagactgtaactatgacagtagagtttgatacctgttacaccaatggattgtaatactggtttgtctccactagatgtcgctgtacattaccagaaacgttaatataaaagcatcatttcctttgagaaaaacatgtttcccccttgacttgctattagggcataatttttggtttaggccattctttataacttatgatatgattgggagaaaaacgttattgggtggctaaaataactttggtgttaatcttggcaattcctttcctttaattattaaatttcttaattattaaattctttcatgactttcacagaccctcttacaatgtactcaactttctgacttgtcttaaacaaccagtcatttccttttaggacaagaatttactatacaagatcctttcttatataaaatccctttatttgtaaccttctttccatagcttagagtgcaccatttaccaatcttcaataaaaaagtcctatcaaact

SEQ ID NO: 5721 - DNA, 2295 bp, Homo sapiens
tttactcctaacgcgtggaacttgtgtcgacatccacccccggttactgcatactcagtcacacaagccatagcaggaaacagcgagcttgcagcctcaccgacgagtctcaactaaaagggactcccggagctaggggtggggactcggcctcacacagtgagtgccggctattggacttttgtccagtgacagctgagacaacaaggaccacgggaggaggtgtaggagagaagcgccgcgaacagcgatcgcccagcaccaagtccgcttccaggctttcggtttctttgcctccatcttgggtgcgccttcccggcgtctaggggagcgaaggctgaggtggcagcggcaggagagtccggccgcgacaggacgaactcccccactggaaaggattctgaaagaaatgaagtcagccctcagaaatgaagttgactgcctgctggctttctgttgactggcccggagctgtactgcaagacccttgtgagcttccctagtctaagagtaggatgtctgctgaagtcatccatcaggttgaagaagcacttgatacagatgagaaggagatgctgctctttttgtgccgggatgttgctatagatgtggttccacctaatgtcagggaccttctggatattttacgggaaagaggtaagctgtctgtcggggacttggctgaactgctctacagagtgaggcgatttgacctgctcaaacgtatcttgaagatggacagaaaagctgtggagacccacctgctcaggaaccctcaccttgtttcggactatagagtgctgatggcagagattggtgaggatttggataaatctgatgtgtcctcattaattttcctcatgaaggattacatgggccgaggcaagataagcaaggagaagagtttcttggaccttgtggttgagttggagaaactaaatctggttgccccagatcaactggatttattagaaaaatgcctaaagaacatccacagaatagacctgaagacaaaaatccagaagtacaagcagtctgttcaaggagcagggacaagttacaggaatgttctccaagcagcaatccaaaagagtctcaaggatccttcaaataacttcaggctccataatgggagaagtaaagaacaaagacttaaggaacagcttggcgctcaacaagaaccagtgaagaaatccattcaggaatcagaagcttttttgcctcagagcatacctgaagagagatacaagatgaagagcaagcccctaggaatctgcctgataatcgattgcattggcaatgagacagagcttcttcgagacaccttcacttccctgggctatgaagtccagaaattcttgcatctcagtatgcatggtatatcccagattcttggccaatttgcctgtatgcccgagcaccgagactacgacagctttgtgtgtgtcctggtgagccgaggaggctcccagagtgtgtatggtgtggatcagactcactcagggctccccctgcatcacatcaggaggatgttcatgggagattcatgcccttatctagcagggaagccaaagatgttttttattcagaactatgtggtgtcagagggccagctggaggacagcagcctcttggaggtggatgggccagcgatgaagaatgtggaattcaaggctcagaagcgagggctgtgcacagttcaccgagaagctgacttcttctggagcctgtgtactgcggacatgtccctgctggagcagtctcacagctcaccatccctgtacctgcagtgcctctcccagaaactgagacaagaaagaaaacgcccactcctggatcttcacattgaactcaatggctacatgtatgattggaacagcagagtttctgccaaggagaaatattatgtctggctgcagcacactctgagaaagaaacttatcctctcctacacataagaaaccaaaaggctgggcgtagtggctcacacctgtaatcccagcactttgggaggccaaggagggcagatcacttcaggtcaggagttcgagaccagcctggccaacatggtaaacgctgtccctagtaaaaatacaaaaattagctgggtgtgggtgtgggtacctgtattcccagttacttgggaggctgaggtgggaggatcttttgaacccaggagttcagggtcatagcatgctgtgattgtgcctacgaatagccactgcataccaacctgggcaatatagcaagatcccatctctttaaaaaaaaaaaaaaaggacaggaactatctta

SEQ ID NO: 5722 - DNA, 3153 bp, Homo sapiens
aatgctgtgtatttacttgaactcatacatcagaagatagtgatcttaacacattatgtttgggaagtttaaaatatctcttccaaatgcttgatgaaaaaggtgggaggatcacttgagccagggagttgaaggctgcagtgagccctgtttttgccaccacactccagcttggagaggtgaggggctgtcctctggatggcaattgatgaaggatgagtctgtgccctgaaggggagatcagtccagcccagctccccactgctgcctcgtgtgtggtggcttctccaggagagaggattgattcctaaagactcatgttacgtgaggaagcagctcagaagaggaaaggaaaggagccaggcatggctcttcctcagggacgcttgactttccgggatgtggctatagaattctcattggcagagtggaaatgcctgaacccttcacagagggctttgtacagggaagtgatgttggagaactacaggaacctggaggctgtggatatctcttccaaatgcatgatgaaggaggtcttgtcaacagggcaaggcaatacagaagtgatccacacagggacattgcaaagacatgaaagtcatcacattggagatttttgcttccaggaaattgagaaagaaattcatgacattgagtttcagtgtcaagaagatgaaagaaatggccttgaagcacccatgacaaaaataaaaaagttgactggtagcacagaccaacatgatcacaggcatgctggaaacaagcctattaaagatcagcttggatcaagcttttattcacatctgcctgaactccacatatttcagatcaaaggtgaaattggtaatcaacttgagaagtctactaatgatgctccctcagtttcaacattccaaagaatttcctgtaggccccaaacccagatttctaataactatgggaataatcccctgaattcttcattactcccacaaaaacaggaagtacacatgagagaaaaatctttccaatgtaataagagtggcaaagcctttaattgtagctcactcttaaggaaacaccagataccccatttaggagacaaacaatataaatgtgatgtatgtggcaagctctttaatcacgagcaataccttgcatgccatgatagatgtcacactgttgagaaaccttacaagtgtaaagagtgtggcaagaccttcagtcaggagtcatcccttacctgccatcgtagacttcatactggagtaaaacgttacaattgtaatgagtgtggcaagatctttggtcaaaattcagcccttctaattgataaggcaattgatactggagaaaatccttacaagtgtaatgaatgtgacaaggcttttaatcaacaatcacaactttcacatcatagaattcatactggagagaaaccttacaaatgtgaagaatgtgacaaagttttcagtcggaaatcaaccattgagacacataagagaattcatactggagagaaaccatacagatgtaaggtttgtgacacagctttcacgtggcattcacagctggctcgacatagaagaattcatactgcaaagaaaacttataaatgtaatgagtgtggcaagaccttcagtcacaagtcatcccttgtatgccatcatagacttcatggtggagagaaatcttacaaatgtaaggtttgtgacaaggcttttgtgtggagttcacaactggcaaaacatactagaattgactgtggagaaaaaccttacaagtgtaatgaatgtgggaagacctttggtcaaaattcagatcttttaattcataagtcaattcatactggggagcaaccttacaaatgtgatgaatgtgaaaaggttttcagtcgtaaatcaagccttgagacacataagataggtcatactggagagaaaccatacaaatgtaaggtttgtgacaaggcttttgcgtgtcattcctatctggcaaaacatactagaattcatagtggagagaaaccttacaagtgtaatgagtgcagcaagaccttcagtcacaggtcataccttgtatgccatcatagagttcatagtggtgagaaaccttacaagtgtaatgagtgcagcaagaccttcagtcgcaggtcatcccttcattgccatcgtagacttcatagtggtgagaaaccttacaagtgtaatgagtgtggcaataccttccgtcactgctcatcccttatataccatcgtagacttcatactggagagaaatcttacaaatgtacaatttgtgacaaggctttcgtgcgtaattcactcctgtcaagacataccagaattcacactgcagagaaaccttacaagtgtaatgaatgtgggaaggcttttaatcaacaatcacacctttcacgtcatcatagaattcatactggagagaaaccttagaaatgtgaagcatgtgacaaagtttccatttggaaatcacaccttaaagacataggagaatttatactggagagaaagcttacaaatgtaaggtttctgacaagacttgggagtgattcacacctggaacaacatactggacttcacactggagagaaaccttacaagtgtaatgagtgtggcaaagcctttggcaagcagtcaacacttattcaccatcaggcaattcatggtgtagggaaacttgactaatgtaatgattgtcacaaagtcttcagtaatgctacaacgattacaaatcattggagaatccataatgaagagagatcttacaagtgtaataaatgtggcaaatttttcagagatcgttcacatattgcaggtcatcggtgaactcatactggagagaaaccttacaaatgtcatgactgtgccaaggtcttcagtcaagcttcatcctatgcaaaacataggagaatttatacaggagagaaacctcacaagtgtgatgattgtggcaaagcctttgcttcacgttcacacgtcattagacatcagagaatctatactggacagaaatcttacaaatgtcatcagtgtggcaaggtcttcagtccaagatcactccatgcagaacatcagaaaattcatttttgagataaccgttcccaatgaaatgagtatagcaaaccatcaagcattaattgacattggagtc

SEQ ID NO: 5723 - DNA, 3787 bp, Homo sapiens
caggtgatttttggtggggcggggacatgaaaaaaaagttaaaatgtccttataaagacaaaatctttttctttcctggctgatgatttgtcattctagtcacttcctgccttgtgaccacacacccaggcttgacaaagctgttctgcagatcagaaagaaggggttcctggtcatacaccagtactaccaaggacagcttttttcctgcaagatctgttacctaaagcaataaaaaatggccagaggatcagtgtccgatgaggaaatgatggagctcagagaagcttttgccaaagttgatactgatggcaatggatacatcagcttcaatgagttgaatgacttgttcaaggctgcttgcttgcctttgcctgggtatagagtacgagaaattacagaaaacctgatggctacaggtgatctggaccaagatggaaggatcagctttgatgagtttatcaagattttccatggcctaaaaagcacagatgttgccaagacctttagaaaagcaatcaataagaaggaagggatttgtgcaatcggtggtacttcagagcagtctagcgttggcacccaacactcctattcagaggaagaaaagtatgcctttgtcaactggataaacaaagccctggaaaatgatcctgattgtcggcatgtcatcccaatgaacccaaacacgaatgatctctttaatgctgttggagatggcattgtcctttgtaaaatgatcaacctgtcagtgccagacacaattgatgaaagaacaatcaacaaaaagaagctaacccctttcaccattcaggaaaatctgaacttggctctgaactctgcctcagccatcgggtgccatgtggtcaacataggggctgaggacctgaaggaggggaagccttatctggtcctgggacttctgtggcaagtcatcaagattgggttgtttgctgacattgaactcagcagaaatgaagctctgattgctcttttgagagaaggtgagagcctggaggatttgatgaaactctcccctgaagagctcttgctgaggtgggctaattaccacctggaaaatgcaggctgcaacaaaattggcaacttcagtactgacatcaaggactcaaaagcttattaccacctgcttgagcaggtggctccaaaaggagatgaagaaggtgttcctgctgttgttattgacatgtcaggactgcgggagaaggatgacatccagagggcagaatgcatgctgcagcaggcggagaggctgggctgccggcagtttgtcacagccacagatgttgtccgagggaaccccaagttgaacttggcttttattgccaacctctttaacagataccctgccctgcacaaaccagagaaccaggacattgactggggggctcttgaaggtgagacgagagaagagcggacatttaggaactggatgaactccctgggtgttaaccctcgagtcaatcatttgtacagtgacttatcagatgccctggtcatcttccagctctatgaaaagatcaaagttcctgttgactggaacagagtaaacaaaccgccataccccaaactgggaggcaatatgaagaagcttgagaattgtaactacgcggtagaattggggaagaatcaagcgaagttctccctggttggcatcggtggacaagatctcaatgaaggaaaccgcactctcacactggccttgatttggcagctaatgagaaggtatacactgaatatcctcgaagaaattggtggtggccagaaggtcaatgatgacattattgtcaactgggtgaatgaaacattgagggaagcaaagaaaagttcatccatctctagtttcaaggacccgaagattagtacaagtctgcctgttctggacctcatcgatgccatccaaccaggttccattaactatgaccttctgaagacagaaaatctgaatgatgatgagaaactcaacaatgcaaaatatgccatctctatggcccgaaaaattggagcaagagtgtatgccctgccagaagacctggttgaagtgaaccccaaaatggtcatgaccgtgtttgcctgcctcatggggaaaggaatgaagagggtgtgaggcccaatggggctgggtgggaggcggtgcactcactcctgactgcccggcacagatgctccagggatgattcaagccattccaaagttcaacttggtgacactctataagattccaaaaagcacatattagtgcagccaagtagcctctcctgtatttaacaaaaagtgcttcattctttgcaggaggcccaacctcctatatataggtttctattcttgatttatttgcttcttcgaaaatctagaggaaaagaaagaagttattttccaggtacccttctcgcttttgccattagccaaggatagaagctgcagtggtattaattttgatataatctttcaaaccagcttcatgtggcttcccttttctttgttcaagatgagggccaggaggggaaacatcacacctgccctaaaccctgttcctggaggtcagcatttgatctgttgcaagcccctctttctgtcccctcttcctaccctgcctcccttgactttgctcctcacacttttggaaccatgccttccgggggggcccatctcttctggccgtccttgtctctgggccacttggagtgtgtgataaatcagtcaagctgttgaagtctcaggagtctctggtagcctgcagaagtaagcctcatcatcagagcctttcctcaaaactggagtcccaaatgtcatcaggttttgttttttttcagccactaagaacccctctgcttttaactctagaatttgggcttggaccagatctaacatcttgaatactctgccctctagagccttcagccttaatggaaggttggatccaaggagggtgtaatggagcatcaagccactcggcggcagcatggagctataactaagcatcctttagggttctgcctctccaggcatttagccctcacattagatctagttactgtggtatggctaatacctgtcaacatttggaggcaatcctaccttgcttttgcttctagagcttagcatatctgattgttgtcaggccatattatcaatgtttacttttttggtactataaaagctttctgccacccctaaactccaggggggacaatatgtgccaatcaatagcacccctactcacatacacacacacctagccagctgtcaagggcagaatgaatctatgctggataagaaatggtggaactgcgttatgaagagctaatttactggacaaagaattccaaagcaaaaccagaacagtatgaatttgagcaggtctcataggttgagcaatttccccctaaaccaactgaaggctaaaaagcaacaggccattgtgaaccaatgcaagacgccctctatcatggtgaaaagctccatcaatgaggtatcttctttagtggtggtatgtaatggaacttagccatttttcaaagcaattgaaatgcattgctctggatctgttccttggcagtggactcagaaagccaacatgtggctcctcccagcccataaccagtatttttgctgcttctgaatacaaattggttggttttgacttcagattgaacttactgtagcctcagatgatttcccccctccgcctccaggaagaaagaatgttactgccttaataaaaaatgaaaagagaatgatgctcaaaatctttccaaataaaatgttccct

SEQ ID NO: 5724 - DNA, 3421 bp, Homo sapiens; identical to SEQ ID NO: 4374

SEQ ID NO: 5725 - DNA, 9056 bp, Homo sapiens
cttgactcaatcctgcaagcaagtgtgtgtgtgtccccatcccccgccccgttaacttcatagcaaataacaaatacccataaagtcccagtcgcgcagcccctccccgcgggcagcgcactatgctgctcgggtgggcgtccctgctgctgtgcgcgttccgcctgcccctggccgcggtcggccccgccgcgacacctgcccaggataaagccgggcagcctccgactgctgcagcagccgcccagccccgccggcggcagggggaggaggtgcaggagcgagccgagcctcccggccacccgcaccccctggcgcagcggcgcaggagcaaggggctggtgcagaacatcgaccaactctactccggcggcggcaaggtgggctacctcgtctacgcgggcggccggaggttcctcttggacctggagcgagatggttcggtgggcattgctggcttcgtgcccgcaggaggcgggacgagtgcgccctggcgccaccggagccactgcttctatcggggcacagtggacggtagtccccgctctctggctgtctttgacctctgtgggggtctcgacggcttcttcgcggtcaagcacgcgcgctacaccctaaagccactgctgcgcggaccctgggcggaggaagaaaaggggcgcgtgtacggggatgggtccgcacggatcctgcacgtctacacccgcgagggcttcagcttcgaggccctgccgccgcgcgccagctgcgaaacccccgcgtccacaccggaggcccacgagcatgctccggcgcacagcaacccgagcggacgcgcagcactggcctcgcagctcttggaccagtccgctctctcgcccgctgggggctcaggaccgcagacgtggtggcggcggcggcgccgctccatctcccgggcccgccaggtggagctgcttctggtggctgacgcgtccatggcgcggttgtatggccggggcctgcagcattacctgctgaccctggcctccatcgccaataggctgtacagccatgctagcatcgagaaccacatccgcctggccgtggtgaaggtggtggtgctaggcgacaaggacaagagcctggaagtgagcaagaacgctgccaccacactcaagaacttttgcaagtggcagcaccaacacaaccagctgggagatgaccatgaggagcactacgatgcagctatcctgtttactcgggaggatttatgtgggcatcattcatgtgacaccctgggaatggcagacgttgggaccatatgttctccagagcgcagctgtgctgtgattgaagacgatggcctccacgcagccttcactgtggctcacgaaatcggacatttacttggcctctcccatgacgattccaaattctgtgaagagacctttggttccacagaagataagcgcttaatgtcttccatccttaccagcattgatgcatctaagccctggtccaaatgcacttcagccaccatcacagaattcctggatgatggccatggtaactgtttgctggacctaccacgaaagcagatcctgggccccgaagaactcccaggacagacctacgatgccacccagcagtgcaacctgacattcgggcctgagtactccgtgtgtcccggcatggatgtctgtgctcgcctgtggtgtgctgtggtacgccagggccagatggtctgtctgaccaagaagctgcctgcggtggaagggacgccttgtggaaaggggagaatctgcctgcagggcaaatgtgtggacaaaaccaagaaaaaatattattcaacgtcaagccatggcaactggggatcttggggatcctggggccagtgttctcgctcatgtggaggaggagtgcagtttgcctatcgtcactgtaataaccctgctcccagaaacaacggacgctactgcacagggaagagggccatctaccgctcctgcagtctcatgccctgcccacccaatggtaaatcatttcgtcatgaacagtgtgaggccaaaaatggctatcagtctgatgcaaaaggagtcaaaacttttgtggaatgggttcccaaatatgcaggtgtcctgccagcggatgtgtgcaagctgacctgcagagccaagggcactggctactatgtggtattttctccaaaggtgaccgatggcactgaatgtaggctgtacagtaattccgtctgcgtccgggggaagtgtgtgagaactggctgtgacggcatcattggctcaaagctgcagtatgacaagtgcggagtatgtggaggagacaactccagctgtacaaagattgttggaacctttaataagaaaagtaagggttacactgacgtggtgaggattcctgaaggggcaacccacataaaagttcgacagttcaaagccaaagaccagactagattcactgcctatttagccctgaaaaagaaaaacggtgagtaccttatcaatggaaagtacatgatctccacttcagagactatcattgacatcaatggaacagtcatgaactatagcggttggagccacagggatgacttcctgcatggcatgggctactctgccacgaaggaaattctaatagtgcagattcttgcaacagaccccactaaaccattagatgtccgttatagcttttttgttcccaagaagtccactccaaaagtaaactctgtcactagtcatggcagcaataaagtgggatcacacacttcgcagccgcagtgggtcacgggcccatggctcgcctgctctaggacctgtgacacaggttggcacaccagaacggtgcagtgccaggatggaaaccggaagttagcaaaaggatgtcctctctcccaaaggccttctgcgtttaagcaatgcttgttgaagaaatgttagcctgtggttatgatcttatgcacaaagataactggaggattcagcactgatgcagtcgtggtgaacaggaggtctacctaacgcacagaaagtcatgcttcagtgacattgtcaacaggagtccaattatgggcagaatctgctctctgtgaccaaaagaggatgtgcactgcttcacgtgacagtggtgaccttgcaatatagaaaaacttgggagttattgaacatcccctgggcttacaagaaacactgatgaatgtaaaatcaggggacatttgaagatggcagaactgtctcccccttgtcacctacctctgatagaatgtctttaatggtatcataatcattttcacccataatacacagtagcttcttcttactgtttgtaaatacattctcccttggtatgtcactttatatcccctggttctattaaaatatccatatatatttctataaaaaaagtgtttgaccaaagtaggtctgcagctatttcaacttccttccgtttccagaaagagctgtggatattttactggaaattaagaacttgctgctgttttaataagatgtagtatattttctgactacaggagataaaatttcagtcaaaaaaccattttgacagcaagtatcttctgagaaattttgaaaagtaaatagatctcagtgtatctagtcacttaaatacatacacgggttcatttacttaaacctttgactgcctgtatttttttcaggtagctagccaaattaatgcataatttcagatgtagaagtagggtttgcgtgtgtgtgtgtgatcatactcaagagtctaaaaactagtttccttgtgttggaaatttaaaaggaaaaaaatcgtatttcactgtgttttcaatttatattttcacaactactttctctctccagagctttcatctgatatctcacaatgtatgatatacgtacaaaacacacagcaagttttctatcatgtccaacacattcaacactggtatacctcctaccagcaagcctttaaaatgcatttgtgtttgcttatttgttttgttcaagggttcagtaagacctacaatgttttgtatttcttgacttattttattagaaacattaaagatcacttggtagttagccacattgagaagtggttatcattgttaatgtggttaatgccaaaaagtggttaatattaataagactgtttccacaccataggcaataatttcttaatttaaaaaatctaagtatattcctattgtactaaatatttttcccaactggaaagcacttgattgtacccgtaagtgtttgagtgatgacatgtgatgattttcagaaagttgttgtttttgtttccatagcctgtttaagtaggttgtaagtttgaatagttagacatggaaattattttataagcacacacctaaagatatctttttagatgataaaatgtacacccccccatcaccaacctcacaacttagaaaatctaagttgtttgatttctttgggatttcttttgttgtgaaacactgcaaagccaatttttctttataaaaattcatagtaatcctgccaaatgtgcctattgttaaagatttgcatgtgaagatcttagggaaccactgtttgagttctacaagctcatgagagtttatttttattataagatgtttttaatataaaagaattatgtaactgatcactatattacatcatttcagtgggccaggaaaatagatgtcttgctgttttcagtattttcttaagaaattgcttttaaaacaaataattgttttacaaaaccaataattatcctttgaattttcatagactgactttgcttttgacgtagaaattttttttctcaataaattatcactttgagaaatgaggcctgtacaaggctgataacctatatgtgatggagatcacccaatgccaagggcagaaagcaaacctagttaaataggtgagaaaaaaaataataatcccagtgccatttgtctgtgcaaagagaattaggagagaggttaatgttacttttttccattttggaaataattttaatcaagtaactcaaatgtgacaaaatttatttttattttttgtggttatattcccaacaacattaaaaaatactcgaggcataaatgtagttgtctcctactctgcttctcttactatactcatacatttttaatatggtttatcaatgattcatgtttccctcaaatagtgatggtttacacctgtcatggaaacaatcctagagagctcagagcaattaaaccactattccatgcttttaagtagttttctccacctttttcttatgagtctcactagattgactgaggaatgtatgtctaaattcctggagaagatgatatggattggaaactgaaattcagagaaatggagtgttcaatagataccacgaattgtgaacaaagggaaaattctatacaactcaatctaagtcagtccactttgacttcgtactgtctttcacctttccattgttgcatcttgaattttttaaaatgtctagaattcaggatgctaggggctacttctttaaaaaaaaaaaaaaaaaagaattcgtctgaaaatgctcaggtttgtaagaatctaatctcacttacataactaagcactccataataagttttattaagtacaaagggagccagaaaaaatgacatttatttcttctagatcagaaaaatttaaattaagccctgccttgctgtttagaaatatgtgggcattgttataatttattcaataaatttatgttcctttgccttcctgtggaaacagttttatcccactaaactaggaattaggggataaatcacaaacaaaaaaaaagttgcagcactgaaaaaaagtaatttattgtttttgcaactggtatgtgaatttgtgtgataaaattatttattcttatttaacaaaaatatgttcaaatttttctatatttaaaatgttttgctgttgtcctactttttaatttatgcttcatgtttgtgtataaagtacacttttacactttgtgagtttacataatatacagcactggttgcttttgtatttttttacagaaagctttctgtgtgaagcaggtgtatatgtatatattcctcatgtattcttattctgatactatcatttttctttccaaggaaattttaatctgtcatgaccaatagtgttcattacttgtgcctatgataataggttttttacatcacattaacactattttttccaagtcacaaataagaaaaacacttattcaatgaaacaaggtgcaagttttaaatttgggtacacaaatagcctagaagcttcctacagacgctaagacacagccaataatcagatcctttcacttcatcgagaaacttggacaagtcgatattgatgtattagatgaaagttgtctacacacaacttctgagggatacaaacgataataaaaccaaatgttgtctgtttctcctttagaaacacctcctaaaattaatatcatttagtctctagtgtctgtaggattctacagatgagcacaaatagattgggtttgtataacaaatgctaatagtcataactgtttctacaaatatggggtgtccattaagagaatgtgatgttttcctactgctgttgaatcccatggggtgattataggacttgaaataggcagagtcacctctgatgacatcagcttgcctctgtgatttcacagtctgatcctggcaacaagacaaagcacccttggacacacagccaatctctggttgtgatatttccccattgattccttccttgttaacaaggtcattttaatggttcaggtgaggacagcagccagattcaaagtccagaatttgtgctgttacatagagttcacactgtcaaataacattgaatttaataatgatcaaatttttctagtagtctttggcagagtgtataatctcattggcatgattggtgaatattactaatctctttataatgaaagatgctttacaaataccttatatttgctaacatttcaaaactactaaataaatgaaatagccatgtgtacagaaatggtcatttaaagctttaatagaaccaaattcaagacaatgtatcatttagacacacagaaaaggaacttgtatgttttccctattatttttctcatttgccaacaatctatagttttaggttatcaaacagatagatcaacttaactggctagtacattgaaaaatcttcctaagaatcctttgttagcataatctatagagataatttctcaaattatatcatcatgatgcatataaactctataatgtataattgtgtttcatttatttaatgtatgagaacatattgaaatacaaaaccatgcattagccaaaaaattggaatacaggtagtgttcagatcagcaaaacattcagtctggtaaatgcctgcctggggctatgatatcattctcaatgcaggttttatggaaaaactaaaagaatatgttgttagatgatgttggttttgaaaaaaaaaagacattaacatacacattagttagcccagttaattgcattctactaatatagttgcacattagcaataattttgctgtctctggtctttattttgtggcttcaactaactggaccatgtggactgtaaaggtcaaatggaaaaaacgagcagtggcccctcatcctgtaaggtactgctacatcagagtgacctaaaagtctaacactgtgaggaaaactgtgatttgtaggaaaaaaaaaaaaaacaaataaaaaacagggcatgctttttaatttttttccactttcctttggcacacccaatgaacaattctaatttttattgaggtgctaacatctttcgtgaccgactgtcaaatgtggtatttttgagttactatttttctacatgattttacagtttgcaagaaagacctctaagctttgtgtcacggtagggcacaacttgatactcaaaatttgaaaaataagcacatccaatgattgttttgaccaacagtggtcagtgacgtaaactgcatgtgcatctgaggacatttaaggggtcattaaaatttgaggagcatcaggccggagtagcagacttttagatgagtcatatttcagcattcactaagtcctcagcattccattcaaactgtcgtgtatatttggcctgattttttttcaagctttgcaataatttatgttattggtaaacacttggtgactatatctcagccttttctttaacaactcacaatatattagaaacacgtctacctatactgagagtatatttacaatagaagaacatactgtatgtgactttgtaaagctagacttttgattaagaaatatataatctctggatgctatttttgcattatacactcaggcacaacgtaaaccttgatggctcatcttgctacaattacgagttgaaaaacactacttacgtatttgtatgacctattagtcagaggaaatcatacatatgctttgtaaatagactttgcagataactaaatagactgaagaaatatgttgcatttgatagaagcaattgcataaatatttggtttctatattagagtctgtgagtaaagtcaagtaataaacctaagtaggtataacagatttttaaaccttgaaacttgctttgatggtagagaaaatcattgaagatttacatactgtatataagatgtaaaatgtacgctgcttattaccctcaattttccagaagcaatggtatataatgcagttgaaaaaccaaaaatcttggaaaactaagacgggtcttgtttaaaatgtctctcagctttggcaaccttcaaatcttaatcaactatttaaagcattactgtgtcttgtagcctgcattccacaacagctctgttattcaggtaaaagacttgaactgagccgtttgggacctatactgtaatattttcattgaggaacaatatcctattttgtaaagcatttccctatgtgtgactttaaactgtaaaattaaacactgcttttgtgggttcagtgggcataataaatataaattgtaaactaggttaaagta

SEQ ID NO: 5726 - DNA, 4228 bp, Homo sapiens
ggaaaagagggcacccagcccttccccctccctcatcctcccatcccagtaaaccctgccaaattggaatcctggacttaatttaggagaaaggccctgtaaccaagatactgactgaacatggctggcggactcaggctggggtctgcagtgcagcattaatgggccgctgacatgaatatggagtagttttctctagcaaagagtggcttccagcttcttaaagtctgacaagaaccggatagggggaacctacaagaagaccatctataaagaatacaaggatgactcatacacagatgaagtggcccagcctgcctggttgggcttcctggggccagtgttgcaggctgaagtgggggatgtcattcttattcacctgaagaattttgccactcgtccctataccatccaccctcatggtgtcttctacgagaaggactctgaaggttccctatacccagatggctcctctgggccactgaaagctgatgactctgttcccccggggggcagccatatctacaactggaccattccagaaggccatgcacccaccgatgctgacccagcgtgcctcacctggatctaccattctcatgtagatgctccacgagacattgcaactggcctaattgggcctctcatcacctgtaaaagaggagccctggatgggaactcccctcctcaacgccaggatgtagaccatgatttcttcctcctcttcagtgtggtagatgagaacctcagctggcatctcaatgagaacattgccacttactgctcagatcctgcttcagtggacaaagaagatgagacatttcaggagagcaataggatgcatgcaatcaatggctttgtttttgggaatttacctgagctgaacatgtgtgcacagaaacgtgtggcctggcacttgtttggcatgggcaatgaaattgatgtccacacagcatttttccatggacagatgctgactacccgtggacaccacactgatgtggctaacatctttccagccacctttgtgactgctgagatggtgccctgggaacctggtacctggttaattagctgccaagtgaacagtcactttcgagatggcatgcaggcactctacaaggtcaagtcttgctccatggcccctcctgtggacctgctcacaggcaaagttcgacagtacttcattgaggcccatgagattcaatgggactatggcccgatggggcatgatgggagtactgggaagaatttgagagagccaggcagtatctcagataagtttttccagaagagctccagccgaattgggggcacttactggaaagtgcgatatgaagcctttcaagatgagacattccaagagaagatgcatttggaggaagataggcatcttggaatcctggggccagtgatccgggctgaggtgggtgacaccattcaggtggtcttctacaaccgtgcctcccagccattcagcatgcagccccatggggtcttttatgagaaagactatgaaggcactgtgtacaatgatggctcatcttaccctggcttggttgccaagccctttgagaaagtaacataccgctggacagtcccccctcatgccggtcccactgctcaggatcctgcttgtctcacttggatgtacttctctgctgcagatcccataagagacacaaattctggcctggtgggcccgctgctggtgtgcagggctggtgccttgggtgcagatggcaagcagaaaggggtggataaagaattctttcttctcttcactgtgttggatgagaacaagagctggtacagcaatgccaatcaagcagctgctatgttggatttccgactgctttcagaggatattgagggcttccaagactccaatcggatgcatgccattaatgggtttctgttctctaacctgcccaggctggacatgtgcaagggtgacacagtggcctggcacctgctcggcctgggcacagagactgatgtgcatggagtcatgttccagggcaacactgtgcagcttcagggcatgaggaagggtgcagctatgctctttcctcatacctttgtcatggccatcatgcagcctgacaaccttgggacatttgagatttattgccaggcaggcagccatcgagaagcagggatgagggcaatctataatgtctcccagtgtcctggccaccaagccacccctcgccaacgctaccaagctgcaagaatctactatatcatggcagaagaagtagagtgggactattgccctgaccggagctgggaacgggaatggcacaaccagtctgagaaggacagttatggttacattttcctgagcaacaaggatgggctcctgggttccagatacaagaaagctgtattcagggaatacactgatggtacattcaggatccctcggccaaggactggaccagaagaacacttgggaatcttgggtccacttatcaaaggtgaagttggtgatatcctgactgtggtattcaagaataatgccagccgcccctactctgtgcatgctcatggagtgctagaatctactactgtctggccactggctgctgagcctggtgaggtggtcacttatcagtggaacatcccagagaggtctggccctgggcccaatgactctgcttgtgtttcctggatctattattctgcagtggatcccatcaaggacatgtatagtggcctggtggggcccttggctatctgccaaaagggcatcctggagccccatggaggacggagtgacatggatcgggaatttgcattgttgttcttgatttttgatgaaaataagtcttggtatttggaggaaaatgtggcaacccatgggtcccaggatccaggcagtattaacctacaggatgaaactttcttggagagcaataaaatgcatgcaatcaatgggaaactctatgccaaccttaggggtcttaccatgtaccaaggagaacgagtggcctggtacatgctggccatgggccaagatgtggatctacacaccatccactttcatgcagagagcttcctctatcggaatggcgagaactaccgggcagatgtggtggatctgttcccagggacttttgaggttgtggagatggtggccagcaaccctgggacatggctgatgcactgccatgtgactgaccatgtccatgctggcatggagaccctcttcactgttttttctcgaacagaacacttaagccctctcaccgtcatcaccaaagagactgaaaaagcagtgccccccagagacattgaagaaggcaatgtgaagatgctgggcatgcagatccccataaagaatgttgagatgctggcctctgttttggttgccattagtgtcacccttctgctcgttgttctggctcttggtggagtggtttggtaccaacatcgacagagaaagctacgacgcaataggaggtccatcctggatgacagcttcaagcttctgtctttcaaacagtaacatctggagcctggagatatcctcaggaagcacatctgtagtgcactcccagcaggccatggactagtcactaaccccacactcaaaggggcatgggtggtggagaagcagaaggagcaatcaagcttatctggatatttctttctttatttattttacatggaaataatatgatttcactttttctttagtttctttgctctacgtgggcacctggcactaagggagtaccttattatcctacatcgcaaatttcaacagctacattatatttccttctgacacttggaaggtattgaaatttctagaaatgtatccttctcacaaagtagagaccaagagaaaaactcattgattgggtttctacttctttcaaggactcaggaaatttcactttgaactgaggccaagtgagctgttaagataacccacacttaaactaaaggctaagaatataggcttgatgggaaattgaaggtaggctgagtattgggaatccaaattgaattttgattctccttggcagtgaactactttgaagaagtggtcaatgggttgttgctgccatgagcatgtacaacctctggagctagaagctcctcaggaaagccagttctccaagttcttaacctgtggcactgaaaggaatgttgagttacctcttcatgttttagacagcaaaccctatccattaaagtacttgttagaacactg

SEQ ID NO: 5727 - DNA, 3622 bp, Homo sapiens
tcagcgccggaacctggaatcccggctccgcgagggaaggccggggaggcggcggcggcggcggcggctggagagggtcctcggcagcctctgaggagcgcggggcgcggccatgagcgagtccagcggcagtgcgctccagcccggcaggcccagccggcagccggcggtccatccagagaacctctctctagactccagttgcttctcttctccacctgtgaacttcctccaagaattgccaagctaccggtccattgcacgtaggagaacgactgtccattcccgggacaagcaaagcggaactttgctaaagccaaccgactcttacagctcccagctggaggacagaatcgctgaaaacctcagcagccattctcttcgaaattatgcactgaacatctctgagaagcggagactaagggacattcaagagacacaaatgaagtatctctccgaatgggaccagtggaagcggtatagcagcaagtcttggaagaggttcctagagaaggctcgagagatgacgacccacctggagctgtggcgggaggacatccgcagcatagaagggaaatttggcactgggattcagtcctatttctccttcttgagattcctggtgttgctgaatttggtgatatttctgatcatctttatgctggttttgctcccagtcttactcacgaaatacaagatcaccaacagcagcttcgtgctcattcctttcaaagacatggataaacaatgtacagtctatccagtaagcagttctggactcatttacttttacagttatatcatagacttgctttctggcactggtttcctggaggaaactagcctcttttacggacattacaccattgatggggtgaaatttcagaacttcacctatgatctgcccctggcgtatttgttaagcacaatcgcctccctggccctgagccttctttggatagtgaaaaggtcggtggaaggattcaaaatcaacctgattcggagtgaggagcactttcagagttactgcaacaagatatttgccggctgggacttctgcatcactaaccgcagcatggcggatctgaagcacagcagcttgcggtacgagctccgagcagatctggaggaagaaagaatgcggcagaaaatagcagaaaggacctcagaagaaacaatacgcatttactctttgagactgtttttgaactgtattgttctggctgttttaggggcatgcttttatgcaatatacgtagcaactgtcttctcgcaagagcacatgaaaaaggaaatcgacaagatggtttttggagagaacctcttcatattgtatctaccgtctattgtgatcacgctggccaattttatcaccccaatgatctttgccaagatcatccgctatgaggattattctccaggctttgagatccgtctgacaatccttaggtgtgtctttatgcggctggccaccatatgtgtcctggtgttcacgctgggctccaagatcacatcctgtgatgatgacacatgtgacctttgcggctacaaccagaaactctacccgtgctgggagacccaagttgggcaggaaatgtacaagctgatgatcttcgacttcatcatcatcttggctgtgacactcttcgtggattttcctagaaagctcctggtgacctactgttcctcttgcaagctgattcagtgctgggggcagcaggagtttgccattcctgataacgtcctggggatagtttacgggcaaaccatctgctggatcggagcctttttctcaccccttctccctgcaattgcaaccctgaaattcattatcatcttctatgtgaaagagtggagtctgctttacacctgcagaccctcccccaggccgttcagagcatccaattctaatttcttcttcctgttggtgttgttgatcgggctgtgtttggcaataatacctctgacaatcagcatatcacgcatcccttcctcgaaagcctgtgggccgttcaccaacttcaacaccacctgggaggtcatccccaagacggtgagcaccttccccagctcgctgcagtccttcatccatggtgtcacatccgaagcctttgcagttcctttcttcatgattatttgcctcatcatgttttacttcattgccttagctggagcacacaaacgggtggtcatccagctccgagagcagctatccctggaaagtcgtgacaagtgctacctaatccagaaactaacagaagcccaaagggacatgaggaactaactagactgagcgtgaagatggtgctgcctgttgcttctaagctgacctagtgattctgctgagcctacagagtctacctgggttttgagtggacatttaaaaatatatttttcttgagtttaggcttttccatatgtgcagctgtgtttacctaacccagcccttaattagggcttcagtgacttagaaaagcaggggaaacccaaggctttgcctgcagaccggccactctgtgacaactctaccaaaaaccaacaagccattcaagcttttacaagaatgaaagagcggagacggtagtttagtatttgagccacgagtttatgtgcacaagtgttttgggttgtggactgaagctcagcctgttaatcagaccagcccatgagtgtataacaaacagaattggaggctggtttcttaaacacacacgtccacattttttagggttgttttcctgtgcttacaatttttaatgcatgtgcctttatttcacaaaacatgtggctgggcgcagcggctcacgcctgttatcccaacactttgggaggccgaggcaggcggagcacctaagttggggagttcaagaccagcctgaccaacgtggagaaactccgtctccactaaaatacaaaattagctgggtgtggtggcacatgcctgtaatatcagctactcaggaggctgaggcaggagaattgcttgaacccaggaggtggagtttgcagtgagctgagatcacaccattgcactccagcctgggcaaaaagagcaaaactctccctaaaaaaaaaatgtagaatatctcttaagatttccgttatggtaaaaaccatatgcaataaatacctcattgtaagcttacccaaaattgatagatgtcaaccttttaacagaagaacagaagtttaagttattgtttaatgtaatcagttttcattttaatatctttgaaatctttttcaaaggactgtagttttgtaatggacttttcaagccttccttccattgtttttcttccgttcactggctccacacgtttcctggggagtagcctggaatttaaagttgggtgcaggttttagaaagctgttgctgttaacaataattctcccggccatctccactccactactcaaaaatgcctgaatccttgctcagaggagcaaaggtatcttctcgtccctttcttacagccattttcttgcttttccacaaagatattatttaaagtggaatatttttgtaactgggataccaatgagcttttcggtcttttcctgacttggtaaggtttatgggtttctaaatctaataactacagtcataccaccctgaaaa

SEQ ID NO: 5728 - DNA, 2324 bp, Homo sapiens
ggtgcgtccgcgggtggctgccccgcaggtgcgcgcggccggggctggcggcgactctctccaccgggccgcccgggaggctcatgcagcgcggctgggtcccgcggcgcccggatcggggaagtgaaagtgcctcggaggaggagggccggtccggcagtgcagccgcctcacaggtcggcggacgggccaggcgggcggcctcctgaaccgaaccgaatcggctcctcgggccgtcgtcctcccgcccctcctcgcccgccgccggagttttctttcggtttcttccaagattcctggccttccctcgacggagccgggcccagtgcgggggcgcagggcgcgggagctccacctcctcggctttccctgcgtccagaggctggcatggcgcgggccgagtactgagcgcacggtcggggcacagcagggccggggggtgcagctggctcgcgcctcctctccggccgccgtctcctccggtccccggcgaaagccattgagacaccagctggacgtcacgcgccggagcatgtctgggagtcagagcgaggtggctccatccccgcagagtccgcggagccccgagatgggacgggacttgcggcccgggtcccgcgtgctcctgctcctgcttctgctcctgctggtgtacctgactcagccaggcaatggcaacgagggcagcgtcactggaagttgttattgtggtaaaagaatttcttccgactccccgccatcggttcagttcatgaatcgtctccggaaacacctgagagcttaccatcggtgtctatactacacgaggttccagctcctttcctggagcgtgtgtgggggcaacaaggacccatgggttcaggaattgatgagctgtcttgatctcaaagaatgtggacatgcttactcggggattgtggcccaccagaagcatttacttcctaccagccccccaatttctcaggcctcagagggggcatcttcagatatccacacccctgcccagatgctcctgtccaccttgcagtccactcagcgccccaccctcccagtaggatcactgtcctcggacaaagagctcactcgtcccaatgaaaccaccattcacactgcgggccacagtctggcagctgggcctgaggctggggagaaccagaagcagccggaaaaaaatgctggtcccacagccaggacatcagccacagtgccagtcctgtgcctcctggccatcatcttcatcctcaccgcagccctttcctatgtgctgtgcaagaggaggagggggcagtcaccgcagtcctctccagatctgccggttcattatatacctgtggcacctgactctaatacctgagccaagaatggaagcttgtgaggagacggactctatgttgcccaggctgttatggaactcctgagtcaagtgatcctcccaccttggcctctgaaggtgcgaggattataggcgtcacctaccacatccagcctacacgtatttgttaatatctaacataggactaaccagccactgccctctcttaggcccctcatttaaaaacggttatactataaaatctgcttttcacactgggtgataataacttggacaaattctatgtgtattttgttttgttttgctttgctttgttttgagacggagtctcgctctgtcatccaggctggagtgcagtggcatgatctcggctcactgcaacccccatctcccaggttcaagcgattctcctgcctcctcctgagtagctgggactacaggtgctcaccaccacacccggctaattttttgtatttttagtagagacggggtttcaccatgttgaccaggctggtctcgaactcctgacctggtgatctgcccacccaggcctcccaaagtgctgggattaaaggtgtgagccaccatgcctggccctatgtgtgttttttaactactaaaaattatttttgtaatgattgagtcttctttatggaaacaactggcctcagcccttgcgcccttactgtgattcctggcttcattttttgctgatggttccccctcgtcccaaatctctctcccagtacaccagttgttcctcccccacctcagccctctcctgcatcctcctgtacccgcagcgaaggcctgggctttcccaccctccctccttagcaggtgccgtgctgggacaccatacgggttggtttcacctcctcagtcccttgcctaccccagtgagagtctgatcttgtttttattgttattgcttttattattattgcttttattatcattaaaactctagttcttgttttgtctctccgaa

SEQ ID NO: 5729 - DNA, 2555 bp, Homo sapiens
caatgacaggcggcaggcggtgaccgccgcagggcctgcggagaccgtccgcctggctcgcccgagctcgcccgctgtccgccagcccgcgggagggaggagagaagcgaagcgtttccgcggttggctactcagtgtcttggtctcaagttgcctcattgcggctggcgttcccaatacagacgcatcgtttcttttttaatactccctaagaaagggaataaccttcaagctggcgggagcaatggttcacataaagaaaggcgagctgacccaggaggagaaggagctactggaagtcatcgggaaaggtactgtccaagaagctggaacattattatccagcaagaatgttcgtgtcaactgtttggacgagaatggaatgactcctctaatgcatgcagcatataaaggaaaactcgatatgtgcaaattactactgcgacatggagccgatgtaaattgtcatcagcatgaacatggatacacagccctcatgtttgctgcactttctggtaataaagacatcacatgggtaatgttagaagctggtgctgagacagatgttgtcaactctgtgggaagaacagcagctcagatggcagcctttgtgggtcaacatgattgtgtgaccataatcaacaatttctttcctcgagagagactggattattacactaagccccagggactggataaagagccaaaactgcccccaaagttggcaggcccgctgcacaaaattatcaccacaacgaatcttcatcctgtcaagatcgtgatgcttgtaaatgagaatcctctgctgacagaagaagcagccctgaataaatgctacagagtgatggatttgatttgtgagaaatgtatgaagcaaagagacatgaatgaagtattggctatgaagatgcattacataagctgtatctttcagaaatgcattaacttcttaaaagatggagagaataaactggacaccttgatcaaaagcttgttaaaaggccgagcttctgatggctttccagtgtatcaagaaaagatcattagagaaagtatcagaaaatttccttactgtgaagctacactcctccagcagctggttcgaagcattgctcctgttgaaattggttctgatcccactgcattctccgtccttacccaagccatcactggccaggtgggttttgtggatgtggaattttgcactacctgtggagaaaagggagcaagtaaaagatgttcagtttgcaaaatggtaatatattgtgatcaaacctgccagaaaacacactggtttactcataagaaaatctgtaagaatctgaaggacatttacgaaaagcaacagttggaggctgccaaagaaaagagacaagaggaaaaccacggcaaacttgatgtcaattctaactgtgttaatgaagagcaaccagaggctgaagtaggtatctctcaaaaggattccaatcctgaagattccggggaaggaaagaaagaatctcttgaaagcgaagctgagttggaaggcttacaggatgctcctgcagggccacaggtgtctgaggagtaaaagccagagcaagtgccagtgtggatgatcctcaccctgcaagaagctggaaaactcctaggaatgcattgtcctcaccttgttatacctgcgtggcaccatggcaggattccacatttcatagaatacaggttttcaagcaaacccctgttgaccatgccctaatttcctattgatttctgttctataattgaatggatattcctatggaaaattttttgtttcaaaatacaggaaaaacattcctattacctttctgaggctggctttccagcaattgtttcaaaggaaaatagatccccttaaagaaaaaatacaggctttagggaacaaagggacaagcagaacaggtgtggaagagagattttcaggaagggaaaaatttatagctacagagggtagttagaaaaatcataacttatatgtgaataaaatacatataagcagcatttacggtagtggcattctacttattaagatgcaatgaaatgaagaaaggctttatgttcaaggacctttgccatagttcagctaattgtagttttatatagaaatgatcctgaacactctgaacttgacgtagtcctgcggtgatattctatctgcagtatttgtacctccagaatggcagatccctcagcaggaacaaaggcatattgacggttctctcagcgtatgcattaaaaaaggtacttcctgaaacttttgattcaataatgactaaacatactatgtacacaattactgtaaggctaattcacgtgccatactccacctgaaagcctgagttatcttgctataagcttttcatggagcacttcctttccagaaactgatttgtaactcatttagagaatgtcctggcgtcggtttttagcatatgtggtatttaaacagagctagaatgtgatgtctgaagataatgctgcatttctgggtttcttgtgtggattttaaaataaattgtgcctacaaatataaacaa

SEQ ID NO: 5730 - DNA, 1107 bp, Homo sapiens
tggaggcctggctggtgctcacatacaataattaactgctgagtggccttcgcccaatcccaggctccactcctgggctccattcccactccctgcctgtctcctaggccactaaaccacagctgtcccctggaataaggcaagggggagtgtagagcagagcagaagcctgagccagacggagagccacctcctctcccagggacagacatggctcagcggatgacaacacagctgctgctccttctagtgtgggtggctgtagtaggggaggctcagacaaggattgcatgggccaggactgagcttctcaatgtctgcatgaacgccaagcaccacaaggaaaagccaggccccgaggacaagttgcatgagcagtgtcgaccctggaggaagaatgcctgctgttctaccaacaccagccaggaagcccataaggatgtttcctacctatatagattcaactggaaccactgtggagagatggcacctgcctgcaaacggcatttcatccaggacacctgcctctacgagtgctcccccaacttggggccctggatccagcaggtggatcagagctggcgcaaagagcgggtactgaacgtgcccctgtgcaaagaggactgtgagcaatggtgggaagattgtcgcacctcctacacctgcaagagcaactggcacaagggctggaactggacttcagggtttaacaagtgcgcagtgggagctgcctgccaacctttccatttctacttccccacacccactgttctgtgcaatgaaatctggactcactcctacaaggtcagcaactacagccgagggagtggccgctgcatccagatgtggttcgacccagcccagggcaaccccaatgaggaggtggcgaggttctatgctgcagccatgagtggggctgggccctgggcagcctggcctttcctgcttagcctggccctaatgctgctgtggctgctcagctgacctccttttaccttctgatacctggaaatccctgccctgttcagccccacagctcccaactatttggttcctgctccatggtcgggcctctgacagccactttgaataaaccagacaccgcac

SEQ ID NO: 5731 - DNA, 4544 bp, Homo sapiens; identical to SEQ ID NO: 1358

SEQ ID NO: 5732 - DNA, 3160 bp, Homo sapiens
cgctaagcgtcccagccgcatccctcccgcagcgacggcggcccgggacccgcgggctgtgaaccatgaacacccgcaatagagtggtgaactccgggctcggcgcctcccctgcctcccgcccgacccgggatccccaggacccttctgggcggcaaggggagctgagccccgtggaagaccagagagagggtttggaggcagcccctaagggcccttcgcgggagagcgtcgtgcacgcgggccagaggcgcacaagtgcatacaccttgatagcaccaaatataaaccggagaaatgagatacaaagaattgcggagcaggagctggccaacctggagaagtggaaggagcagaacagagctaaaccggttcacctggtgcccagacggctaggtggaagccagtcagaaactgaagtcagacagaaacaacaactccagctgatgcaatctaaatacaagcaaaagctaaaaagagaagaatctgtaagaatcaagaaggaagctgaagaagctgaactccaaaaaatgaaggcaattcagagagagaagagcaataaactggaggagaaaaaaagacttcaagaaaaccttagaagagaagcatttagagagcatcagcaatacaaaaccgctgagttcttgagcaaactgaacacagaatcgccagacagaagtgcctgtcaaagtgctgtttgtggcccacaatcctcaacatggaaacttcctatcctgcctagggatcacagctgggccagaagctgggcttacagagattctctaaaggcagaagaaaacagaaaattgcaaaagatgaaggatgaacaacatcaaaagagtgaattactggaactgaaacggcagcagcaagagcaagaaagagccaaaatccaccagactgaacacaggagggtaaataatgcttttctggaccgactccaaggcaaaagtcaaccaggtggcctcgagcaatctggaggctgttggaatatgaatagcggtaacagctggggttctctattagttttttcgaggcacctaagggtatatgagaaaatattgactcctatctggccttcatcaactgacctcgaaaagcctcatgagatgctttttcttaatgtgattttgttcagcctcactgtttttaccttaatttcaactgcccacacacttgaccgtgcagtcaggagtgactggcttctccttgtcctcatttatgcatgtttggaggagctgattcctgaactcatatttaatctctactgccagggaaatgctacattatttttctaattggaagtataattagagtgatgttggtagggtagaaaaagagggagtcacttgatgctttcaggttaatcagagctatgggtgctacaggcttgtctttctaagtgacatattcttatctaattctcagatcaggttttgaaagctttgggggtctttttagattttaatccctactttctttatggtacaaatatgtacaaaagaaaaaggtcttatattcttttacacaaatttataaataaattttgaactccttctgtataaatgggtcatttttatttttaatgaaaagttattggggttttctctcttgaagggtctcattttaattcccttttccaggccgtatagatcaaatatagtactgtcattactgttggctcttgttttggtcttgacttactaatagtgttaccctgattttcagagggggacagtttatctccagaaaggccaatgtttgtatacacatcagctagacacaaatatagacatcatatgtagtttgtacatgtttcagaaacttgttttttctttgctctgtgtaacctatttcctattgctagttcagttggctttcttattcacttctgtgaccctgaaccagttctcagaccctagagtgtaagagcattgattttctacgctgtgtaatctagctcaatccctctgtcccctccgcctcaccgtcccccagccaccacattgtatagcaaaagcattacattcaatcctagaataaaggtaaatacaacaaatcatctttgcagctggacaactaataatactttgcagcattaagagatcttctgtgttaccagtcactctgttgaaatgaactttccgaatctctttattcaggaaaacatggggttttgaaattcttgggccaagagacataactgaggggttcgcagagctaggcaagggtgcactaggaaagggccacattggtgggtggggggtaacagagaacagatggtgtcaggaagtttctctggagtaaataatgtggatattcttggtttccctctcctccgccagctgaagctgtgttagtgctgttgacactaatataaaatgtttggtccatttgaaatccttgtcattgccttatatgggggaaactcaatcccccagcctgtgttggaaatatcaccaaactgattgtaaatgtgcggctgtagcagacattttagtgtggtggtgtgcagccatttcggccctacacctgccagcctggctaccttacagttgtgttccgatttttgcgtctatgcttggtgtgcctcacttgctgcattttccagcatgcaaccaggagttgacgtaggaaaaagggatgctttcttactttggaagctctcagggaagttggtgtcaatttctcctccactgcctggcctaccctgcactcccaaagattttgtgcagatgggtagttccattttttaaaaattgtgcagatatggaaaattgtgacttacttcatgaccagaactatctagaatatgtgtgggggtataaacatcttgcttaaccaaatatctatgtaggcagaggtaaccaggagagaagcaagacttgctgcctaaaggagcccaccattttacttttcacatttaatctgccacgttgaatcaattggaataaaacctgactcgcaggtgactggacaggaaatcccaaagttccaccatttctatgcttaattttaatgtccccccgcttttttttttgtagaaaataaaaacaagaaaatcgttccaatgtaagatgtttgttatagaaactttaggcaatacaggtgtgtaataaaatgtttaataaacttctaaacacttttgtatttggattta

SEQ ID NO: 5733 - DNA, 6700 bp, Homo sapiens
atggaactatctcctgagtgctgcaagttgtaacgggcaccgctgagcctgtttccctttggagcacttcttatctagaagcagtgtttagtttcttccaaactgggccacttcgtccacctactctgttctgagtaaggaaacagcctccaagcatcagcagagcccagatgagcacgggccgcggagccgcttagcagtctcccgggacccagctccggaggagccgcaagcatgcaccctgggttgtggctgctcctggttacgttgtgcctgaccgaggaactggcagcagcgggagagaagtcttatggaaagccatgtgggggccaggactgcagtgggagctgtcagtgttttcctgagaaaggagcgagaggacgacctggaccaattggaattcaaggcccaacaggtcctcaaggattcactggctctactggtttatcgggattgaaaggagaaaggggtttcccaggccttctgggaccttatggaccaaaaggagataagggtcccatgggagttcctggctttcttggcatcaatgggattccgggccaccctggacaaccaggccccagaggcccacctggtctggatggctgtaatggaactcaaggagctgttggatttccaggccctgatggctatcctgggcttctcggaccacccgggcttcctggtcagaaaggatcaaaaggtgaccctgtccttgctccaggtagtttcaaaggaatgaagggggatcctgggctgcctggactggatggaatcactggcccacaaggagcacccggatttcctggagctgtaggacctgcaggaccaccaggattacaaggtcctccagggcctcctggtcctcttggtcctgatgggaatatggggctaggttttcaaggagagaaaggagtcaagggggatgttggcctccctggcccagcaggacctccaccatctactggagagctggaattcatgggattccccaaagggaagaaaggatccaagggtgaaccagggcctaagggttttccaggcataagtggccctccaggcttcccgggccttggaactactggagaaaagggagaaaagggagaaaagggaatccctggtttgccaggacctaggggtcccatgggttcagaaggagtccaaggccctccagggcaacagggcaagaaagggaccctgggatttcctgggcttaatggattccaaggaattgagggtcaaaagggtgacattggcctgccaggcccagatgttttcatcgatatagatggtgctgtgatctcaggtaatcctggagatcctggtgtacctggcctcccaggccttaaaggagatgaaggcatccaaggcctacgtggcccttctggtgtccctggattgccagcattatcaggtgtcccaggagccctagggcctcagggatttccagggctgaagggggaccaaggaaacccaggccgtaccacaattggagcagctggcctccctggcagagatggtttgccaggcccaccaggtccaccaggcccacctagtccagaatttgagactgaaactctacacaacaaagagtcagggttccctggtctccgaggagaacaaggtccaaaaggaaacctaggcctcaaaggaataaaaggagactcaggtttctgtgcttgtgacggtggtgttcccaacactggaccacccggggaaccaggcccacctggtccatggggtctcataggccttccaggccttaaaggagccagaggagatcgaggctctgggggtgcacagggcccagcaggggctccaggcttagttgggcctctgggtccttcaggacccaaaggaaagaagggggaaccaattctcagtacaatccaaggaatgccaggagatcggggtgattctggctcccagggcttccgtggtgtaataggagaaccaggcaaggacggagtaccaggtttaccaggtctgccaggccttccgggtgatggtggacagggcttcccaggtgaaaaggggttacctggacttcctggtgaaaaaggccatcctggtccacctggcctcccaggaaatgggttaccaggacttcctggaccccgtgggcttcctggagataaaggcaaggatggattaccgggacaacaaggccttcccggatctaagggaatcaccctgccctgtattattcctgggtcatacggtccatcaggatttccaggcactcccggattcccaggccctaaagggtctcgaggcctccctgggaccccaggccagcctgggtcaagtggaagtaaaggagagccagggagtccaggattggttcatcttcctgaattaccaggatttcctggacctcgtggggagaagggcttgcctgggtttcctgggctccctggaaaagatggcttgcctgggatgattggcagtccaggcttacctggttccaagggagccactggtgacatctttggtgctgaaaatggtgctccgggggaacaaggcctacaaggattaacagggcacaaaggatttcttggagactctggccttccaggactcaagggtgtgcacgggaagcctggcttactaggccccaaaggtgagcggggcagccctgggacaccaggacaggtgggacagccaggcaccccaggatctagtggtccatatggcatcaagggcaaatctgggctcccaggagcaccaggcttcccaggcatctcaggacatcctggaaagaaaggaacaagaggcaagaaaggtcctcctggatcaattgtaaagaaagggctgccagggctaaaaggccttcctggaaatccaggcctagtaggactgaaaggaagcccaggctctccaggggtcgctgggttgccagccctctctggacccaagggagagaaggggtctgttggattcgtaggttttccaggaataccaggtctgcctggtattcctggaacaagaggattaaaaggaattccaggatcaactggaaaaatgggaccatctggacgtgctggtactcctggtgaaaagggagacagaggcaatccggggccagtcggaatacctagtccaagacgtccaatgtcaaacctttggctcaaaggagacaaaggctctcaaggctcagccggatccaatggatttcctgggccaagaggtgacaaaggagaggctggtcgacctggaccaccaggcctacctggagctcctggcctcccaggcattatcaaaggagttagtggaaagccagggccccctggcttcatgggaatccggggcttacctggcctgaaggggtcctctgggatcacaggtttcccaggaatgccaggagaaagtggttcacaaggtatcagagggtcgcctggactcccaggagcatctggtctcccaggcctgaaaggagacaacggccagacagttgaaatttccggtagcccaggacccaagggacagcctggcgaatctggttttaaaggcacaaaaggaagagatggactaataggcaatataggcttccctggaaacaaaggtgaagatggaaaagttggtgtttctggagatgttggccttcctggagctccaggatttccaggagttgccggcatgagaggagaaccaggacttccaggttcttctggtcaccaaggggcaattgggcctctaggatcccccggattaataggacccaaaggcttccctggatttcctggtttacatggactgaatgggcttccgggcaccaagggtacccatggcactccaggacctagtatcaccggtgtgcctgggcctgctggtctccctggacccaaaggagaaaaaggatatccaggaattggcatcggagctccagggaagccgggcctgagagggcaaaaaggtgatcgaggtttcccaggtctccagggccctgctggtctccccggtgccccaggcatctccttgccctcactcatagcaggacagcctggtgaccccgggcgaccaggcctagatggagaacgaggccgcccaggccccgctggacccccaggtccccctgggccatcctcgaatcaaggcgacaccggagaccctggcttccctggaattcctggacctaaagggcctaagggagaccaaggaattccaggtttttctggcctccctggagagctaggactgaaaggcatgagaggtgagcctggcttcatggggactccaggcaaggttgggccacctggagacccaggatttcccggaatgaaggggaaggcagggccaagaggctcttctggcctccaaggtgatcctggacaaacaccaactgcagaagctgtccaggttcctcctggacccttgggtctaccagggatcgatggcatccctggcctcactggggaccctggggctcaaggccctgtaggcctacaaggctccaaaggtttacctggcatccccggtaaagatggccccagtgggctcccaggcccacctggggctcttggtgatcctggtctgcctggactgcaaggccctccaggatttgaaggagctccagggcagcaaggccccttcgggatgcctggaatgcctggccagagcatgagagtgggctacacgttggtaaagcacagccagtcggaacaggtgcccccgtgtcccatcgggatgagccagctgtgggtggggtacagcttactgtttgtggaggggcaagagaaagcccacaaccaggacctgggctttgctggctcctgtctgccccgcttcagcaccatgcccttcatctactgcaacatcaacgaggtgtgccactatgccaggcgcaatgataaatcttactggctctccactaccgcccctatccccatgatgcccgtcagccagacccagattccccagtacatcagccgctgctctgtgtgtgaggcaccctcgcaagccattgctgtgcacagccaggacatcaccatcccgcagtgccccctgggctggcgcagcctctggattgggtactctttcctcatgcacactgccgctggtgccgagggtggaggccagtccctggtctcacctggctcctgcctagaggactttcgggccactcctttcatcgaatgcagtggtgcccgaggcacctgccactactttgcaaacaagtacagtttctggttgaccacagtggaggagaggcagcagtttggggagttgcctgtgtctgaaacgctgaaagctgggcagctccacactcgagtcagtcgctgccaggtgtgtatgaaaagcctgtagggtggcacctgccactctgccccttgccctcccctgcccctcacaacagtcacctcacaaacctgaatggtctgaagaaggaaggcctgagcccctttgcctgtcaagttgtacattggagtctcatttgggctagactaccggacactcgtcaccccagccctcgggtccatagagatgagcccaccctgctgagatctgctgtcctgtttctgtcaagctggtgctactgtttgatttggatgattgtgtgactattcatggctacctcagaaagatttgatgggccacaactgtcttagactgctagctttctccttaccgtcttgatcggaaagctcttcctaatcgctaatcagtcatttcttcatgtacagaggtcagcacacattatttggcttaaaccagaacccagtgtttccacacttaaattctctaaccgaatattcatggatggctcaagtctgcacagagcaagtcctcactcttcaaggaggcccactgtgtctaggcaggcaagagaattgaaatgaggtgccacccagtagcccagagtgagctttagctctctctagaatgagcaagactgggccccacatggcttagagaggcttgaaggccagcagctgggttgggggtggtggtcattaatggcatatggtcctagacaaaccatctcctccttgccggctccccctccagccagagacagaggatgtggcctggttcaaagtaaagcagaggatgcaacaaatgtggccaagcctatcaaaggaaatgagaatgacagccttttttcctgggccagaagtagaggggtgggtgcgtaaggatgtgtgagttttgcttttgactccaggaacaaaaaggtaaatcccacatcccagtttctcagaagtccctgtttattccaaatgccatccagatgtgtgcaatgtggcaaactgaagctgcacagtgttggtttccttgtattctgaggatgttaaagactttgttaaatggttatccaattgctctttcacaggtagcctattaaactattttaatatgtttttttaaacctcataaaaatctagcacactcttctcttgagcagttagcagacctaaagcaagcctgaattggctatgcagtacattgtattctgtttgggggaatttgttttagccattttctttaattaccagttttccagaacactcttagctatgttgacatgaggcagttccttccaggtgattctgtttccttaagtattatataaactgtgccaatacagacaaagcataatcaatataatctgaattattgttatctttacctcctgagtaataagcatggtgtcagttttgtacatagcaaataaaataaatgaaatctgaacatgtga

SEQ ID NO: 5734 - DNA, 760 bp, Homo sapiens; identical to SEQ ID NO: 311

SEQ ID NO: 5735 - DNA, 3408 bp, Homo sapiens; identical to SEQ ID NO: 766

SEQ ID NO: 5736 - DNA, 3126 bp, Homo sapiens
ccatgggcagcggcacacggcggcgcgatgatggacgttaacagcagcggccgcccggacctctacgggcacctccgctctttccttctgccagaagtggggcgcgggctgcccgacttgagccccgacggtggcgccgacccggtcgcgggctcctgggcgccgcacctgctgagcgaggtgacagccagcccggcgcccacctgggacgcgcccccggacaatgcctccggctgtggggaacagatcaactacggcagagtcgagaaagttgtgatcggctccatcctgacgctcatcacgctgctgacgatcgcgggcaactgcctggtggtgatctccgtgtgcttcgtcaagaagctccgccagccctccaactacctgatcgtgtccctggcgctggccgacctctcggtggctgtggcggtcatgcccttcgtcagcgtcaccgacctcatcgggggcaagtggatctttggacactttttctgtaatgtcttcatcgccatggacgtcatgtgctgcacggcctcgatcatgaccctgtgcgtgatcagcattgacaggtaccttgggatcacaaggcccctcacataccctgtgaggcagaatgggaaatgcatggcgaagatgattctctccgtctggcttctctccgcctccatcaccttacctccactctttggatgggctcagaatgtaaatgatgataaggtgtgcttgatcagccaggactttggctatacgatttactctaccgcagtggcattttatatccccatgtccgtcatgcttttcatgtactaccagatttacaaggctgccaggaagagtgctgccaaacacaagtttcctggcttccctcgagtggagccagacagcgtcatcgccctgaatggcatagtgaagctccagaaggaggtggaagagtgtgcaaacctttcgagactcctcaagcatgaaaggaaaaacatctccatctttaagcgagaacagaaagcagccaccaccctggggatcatcgtcggggcctttaccgtgtgctggctgccatttttcctcctctcgacagccagacccttcatctgtggcacttcctgcagctgcatcccactgtgggtggagaggacatttctgtggctaggctatgcaaactctctcattaacccttttatatatgccttcttcaaccgggacctgaggaccacctatcgcagcctgctccagtgccagtaccggaatatcaaccggaagctctcagctgcaggcatgcatgaagccctgaagcttgctgagaggccagagagacctgagtttgtgctgagggcctgcacaaggagggtgctgttgagaccagaaaagaggccaccggtatctgtgtgggtgctacaatctccagaccatcacaattggttagcagacaaaatgctgactactgtagaaaaaaaggtcatgattcatgattgaaagcagaacaatggagatgaaataaacaaggcaaaatagaggtggaaacagaaggaagtcatttgctgagtctgcagaatggaatgcagcttctgtcctttcttgggatgtctaaaacatgacaaacagggtgatctgttgtacacactatcttatgagggagatggtgacttctccttttttctgtggatcagtgctattgtgtgttctcagtttaagatagcagatcatctcagcagtaagcacaccaacagaactgagttccagaaaggaagcagtttctggtgctttgcatatgtccaaatccatgcaagtgggagaaagttccagtgcacacttcccatgcttctgagtctaggcgttgtggtgaatatgcaggaatcattcatgagacagaatgtattttgttgtatgacagaaggcttttccaagcaaactgcggtgagcgtagtgttgaatatgttgcatgtccatgttagaaaacagaatccagtcatcagctaatacaaatgatttcccagagcagtgtttgtttcaagcttctgtcaaatagtttggcttttctgcagggtctctgtgatttccccacctatgtacttttctgtgttaactcacttattatggtataactcaggaacaggtctcaggatggagagaagcatacaacatgagcaaagctttttctcgtgctctgaagggtcttgagaggggagtgggatgccttctgtgaggatttttatcgcagtgaagctcaagtggtacccaactgcgttgtaattaacatgattattggcatgtttttgactctcattttctacaaggctgcagtgggcccacccatgggctggcccataactgtatgttatgtggaagaagtgtgggaatgatgggttttccatgaaatgtgatgcttctggagatggggcataaacatgttcattcttgttgagctgcattgtgttaaaccaaattgtgtgaagcgaggtcacctggaccactcttgggaaatgcttcagaacaccagtctgttccttctagagaatttgtttttgtgttctatgtatcttaaatcaaatgtgtgcctaagcaattctgtcctctgattcccacccctacccaccaaaaaatggtagacatgaaaggcaggtgaggaaacagaaaaggtctctttgcagatatatattttttaaatggcactatgtagtaattaagagctaaggagacagaaagacagtagatgagaatagaagagtacctgtacctacaaggggaaaaatgaatgcaattctttatttgataagagtgaactgaaagagaatattattttcctacaataaagcaagctgtcctctcacaggataaagtggaattctgacatggattatggacttcttctaactcccattgacattgcttcttaccagacatggggaaaagctacctttcctgaaaggggaggagggcactgtcctttcagacaaagcttgtacaaattcctgaaccgcaaatttgctgaagtgaccgtatatattatattcataatttaaatgattatttatggtcagatacatattgttaaacttgaaaatgttttattacattacatcaaataaagtttatttgtagctgaaataaagcaacgtaagtaacaatttttaa

SEQ ID NO: 5737 - DNA, 1985 bp, Homo sapiens
gctgaagtgccagggtgcttgtgaagtctaagcccttgtctggcatttgtcaggaatataggctgctgtatgtttccaggaaacttctaggacagaggctattcaacaagctcatgaagatgaccttctatgggcattttgtagccggggaggaccaggagtccatccagcccctgcttcggcactacagggccttcggtgtcagcgccatcctggactatggagtggaggaggacctgagccccgaggaggcagagcacaaggagatggagtcctgcacctcagctgcggagagggatggcagtggcacgaataagcgggacaagcaataccaggcccactgggccttcggggaccgcaggaatggtgtcatcagtgcccgcacctacttctacgccaatgaggccaagtgcgacagccacatggagacattcttgcgctgcatcgaagcctcaggtagagtcagcgatgacggcttcatagccattaagctcacagcactggggagaccccagtttctgctgcagttctcagaggtgctggccaagtggaggtgcttctttcaccaaatggctgtggagcaagggcaggcgggcctggctgccatggacaccaagctggaggtggcggtgctgcaggaaagtgtcgcaaagttgggcatcgcatccagggctgagattgaggactggttcacggcagagaccctgggagtgtctggcaccatggacctgctggactggagcagcctcatcgacagcaggaccaagctgtccaagcacttggtagtccccaacgcacagacaggacagctggagcccctgctgtcccggttcactgaggaggaggagctacagatgaccaggatgctacagcggatggatgtcctggccaagaaagccacagagatgggcgtgcggctgatggtggatgccgagcagacctacttccagccggccatcagccgcctgacgctggagatgcagcggaagttcaatgtggagaagccgctcatcttcaacacataccagtgctacctcaaggatgcctatgacaatgtgaccctggacgtggagctggctcgccgtgagggctggtgttttggggccaagctggtgcggggcgcatacctggcccaggagcgagcccgtgcggcagagatcggctatgaggaccccatcaaccccacgtacgaggccaccaacgccatgtaccacaggtgcctggactacgtgttggaggagctgaagcacaacgccaaggccaaggtgatggtggcctcccacaatgaggacacagtgcgctttgcactgcgcaggatggaggagctgggcctgcatcctgctgaccaccgggtgtactttggacagctgctaggcatgtgtgaccagatcagcttcccgctgggccaggccggctaccccgtgtacaagtacgtgccctatggccccgtgatggaggtgctgccctacttgtcccgccgtgccctggagaacagcagcctcatgaagggcacccatcgggagcggcagctgctgtggctggagctcttgaggcggctccgaactggcaacctcttccatcgccctgcctagcacccgccagcacacccttagcctccagcaccccccgcccccgcccaggccatcaccacagctgcagccaaccccatcctcacacagattcaccttttttcaccccacacttgcagagctgctggaggtgaggtcaggtgcctcccagccctgcccagagtatgggcactcaggtgtgggccgaacctgatacctgcctgggacagccactggaaacttttgggaactctcctcgaatgtgtgggcccaaggcccccacctctgtgacccccatgtccttggacctagaggattgtccaccttctgccaaggccagcccacacagcccgagccccttggggagcagtggccgggctggggaggcctgcctggtcaataaaccactgttcctgc

SEQ ID NO: 5738 - DNA, 3114 bp, Homo sapiens
ggaatcccatcttgagactcgctaagcgtcccagccgcatccctcccgcagcgacggcggcccgggacccgcgggctgtgaaccatgaacacccgcaatagagtggtgaactccgggctcggcgcctcccctgcctcccgcccgacccgggatccccaggacccttctgggcggcaaggggagctgagccccgtggaagaccagagagagggtttggaggcagcccctaagggcccttcgcgggagagcgtcgtgcacgcgggccagaggcgcacaagtgcatacaccttgatagcaccaaatataaaccggagaaatgagatacaaagaattgcggagcaggagctggccaacctggagaagtggaaggagcagaacagagctaaaccggttcacctggtgcccagacggctaggtggaagccagtcagaaactgaagtcagacagaaacaacaactccagctgatgcaatctaaatacaagcaaaagctaaaaagagaagaatctgtaagaatcaagaaggaagctgaagaagctgaactccaaaaaatgaaggcaattcagagagagaagagcaataaactggaggagaaaaaaagacttcaagaaaaccttagaagagaagcatttagagagcatcagcaatacaaaaccgctgagttcttgagcaaactgaacacagaatcgccagacagaagtgcctgtcaaagtgctgtttgtggcccacaatcctcaacatgggccagaagctgggcttacagagattctctaaaggcagaagaaaacagaaaattgcaaaagatgaaggatgaacaacatcaaaagagtgaattactggaactgaaacggcagcagcaagagcaagaaagagccaaaatccaccagactgaacacaggagggtaaataatgcttttctggaccgactccaaggcaaaagtcaaccaggtggcctcgagcaatctggaggctgttggaatatgaatagcggtaacagctggggtatatgagaaaatattgactcctatctggccttcatcaactgacctcgaaaagcctcatgagatgctttttcttaatgtgattttgttcagcctcactgtttttaccttaatttcaactgcccacacacttgaccgtgcagtcaggagtgactggcttctccttgtcctcatttatgcatgtttggaggagctgattcctgaactcatatttaatctctactgccagggaaatgctacattatttttctaattggaagtataattagagtgatgttggtagggtagaaaaagagggagtcacttgatgctttcaggttaatcagagctatgggtgctacaggcttgtctttctaagtgacatattcttatctaattctcagatcaggttttgaaagctttgggggtctttttagattttaatccctactttctttatggtacaaatatgtacaaaagaaaaaggtcttatattcttttacacaaatttataaataaattttgaactccttctgtataaatgggtcatttttatttttaatgaaaagttattggggttttctctcttgaagggtctcattttaattcccttttccaggccgtatagatcaaatatagtactgtcattactgttggctcttgttttggtcttgacttactaatagtgttaccctgattttcagagggggacagtttatctccagaaaggccaatgtttgtatacacatcagctagacacaaatatagacatcatatgtagtttgtacatgtttcagaaacttgttttttctttgctctgtgtaacctatttcctattgctagttcagttggctttcttattcacttctgtgaccctgaaccagttctcagaccctagagtgtaagagcattgattttctacgctgtgtaatctagctcaatccctctgtcccctccgcctcaccgtcccccagccaccacattgtatagcaaaagcattacattcaatcctagaataaaggtaaatacaacaaatcatctttgcagctggacaactaataatactttgcagcattaagagatcttctgtgttaccagtcactctgttgaaatgaactttccgaatctctttattcaggaaaacatggggttttgaaattcttgggccaagagacataactgaggggttcgcagagctaggcaagggtgcactaggaaagggccacattggtgggtggggggtaacagagaacagatggtgtcaggaagtttctctggagtaaataatgtggatattcttggtttccctctcctccgccagctgaagctgtgttagtgctgttgacactaatataaaatgtttggtccatttgaaatccttgtcattgccttatatgggggaaactcaatcccccagcctgtgttggaaatatcaccaaactgattgtaaatgtgcggctgtagcagacattttagtgtggtggtgtgcagccatttcggccctacacctgccagcctggctaccttacagttgtgttccgatttttgcgtctatgcttggtgtgcctcacttgctgcattttccagcatgcaaccaggagttgacgtaggaaaaagggatgctttcttactttggaagctctcagggaagttggtgtcaatttctcctccactgcctggcctaccctgcactcccaaagattttgtgcagatgggtagttccattttttaaaaattgtgcagatatggaaaattgtgacttacttcatgaccagaactatctagaatatgtgtgggggtataaacatcttgcttaaccaaatatctatgtaggcagaggtaaccaggagagaagcaagacttgctgcctaaaggagcccaccattttacttttcacatttaatctgccacgttgaatcaattggaataaaacctgactcgcaggtgactggacaggaaatcccaaagttccaccatttctatgcttaattttaatgtccccccgcttttttttttgtagaaaataaaaacaagaaaatcgttccaatgtaagatgtttgttatagaaactttaggcaatacaggtgtgtaataaaatgtttaataaacttctaaacacttttgtatttggattta

SEQ ID NO: 5739 - DNA, 2900 bp, Homo sapiens
attgtttcctactccattttctctggggcaatagcagaataggagcaagccagcactagtcagctaactaagtgactcaaccaaggccttttttccttgttatctttgcagatacttcattttcttagcgtttctggagattacaacatcctgcggttccgtttctgggaactttactgatttatctcccccctcacacaaataagcattgattcctgcatttctgaagatctcaagatctggactactgttgaaaaaatttccagtgaggctcacttatgtctgtaaagatgggaaaaaaatacaagaacattgttctactaaaaggattagaggtcatcaatgattatcattttagaatggttaagtccttactgagcaacgatttaaaacttaatttaaaaatgagagaagagtatgacaaaattcagattgctgacttgatggaagaaaagttccgaggtgatgctggtttgggcaaactaataaaaattttcgaagatataccaacgcttgaagacctggctgaaactcttaaaaaagaaaagttaaaagtaaaaggaccagccctatcaagaaagaggaagaaggaagtggatgctacttcacctgcaccctccacaagcagcactgtcaaaactgaaggagcagaggcaactcctggagctcagaaaagaaaaaaatcaaccaaagaaaaggctggacccaaagggagtaaggtgtccgaggaacagactcagcctccctctcctgcaggagccggcatgtccacagccatgggccgttccccatctcccaagacctcattgtcagctccacccaacagttcttcaactgagaacccgaaaacagtggccaaatgtcaggtaactcccagaagaaatgttctccaaaaacgcccagtgatagtgaaggtactgagtacaacaaagccatttgaatatgagaccccagaaatggagaaaaaaataatgtttcatgctacagtggctacacagacacagttcttccatgtgaaggttttaaacaccagcttgaaggagaaattcaatggaaagaaaatcatcatcatatcagattatttggaatatgatagtctcctagaggtcaatgaagaatctactgtatctgaagctggtcctaaccaaacgtttgaggttccaaataaaatcatcaacagagcaaaggaaactctgaagattgatattcttcacaaacaagcttcaggaaatattgtatatggggtatttatgctacataagaaaacagtaaatcagaagaccacaatctacgaaattcaggatgatagaggaaaaatggatgtagtggggacaggacaatgtcacaatatcccctgtgaagaaggagataagctccaacttttctgctttcgacttagaaaaaagaaccagatgtcaaaactgatttcagaaatgcatagttttatccagataaagaaaaaaacaaacccgagaaacaatgaccccaagagcatgaagctaccccaggaacagcgtcagcttccatatccttcagaggccagcacaaccttccctgagagccatcttcggactcctcagatgccaccaacaactccatccagcagtttcttcaccaagaaaagtgaagacacaatctccaaaatgaatgacttcatgaggatgcagatactgaaggaagggagtcattttccaggaccgttcatgaccagcataggcccagctgagagccatccccacactcctcagatgcctccatcaacaccaagcagcagtttcttaaccacgaaaagtgaagacacaatctccaaaatgaatgacttcatgaggatgcagatactgaaggaagggagtcattttccaggaccgttcatgaccagcataggcccagctgagagccatccccacactcctcagatgcctccatcaacaccaagcagcagtttcttaaccacgttgaaaccaagactgaagactgaacctgaagaagtttccatagaagacagtgcccagagtgacctcaaagaagtgatggtgctgaacgcaacagaatcatttgtatatgagcccaaagagcagaagaaaatgtttcatgccacagtggcaactgagaatgaagtcttccgagtgaaggtttttaatattgacctaaaggagaagttcaccccaaagaagatcattgccatagcaaattatgtttgccgcaatgggttcctggaggtatatcctttcacacttgtggctgatgtgaatgctgaccgaaacatggagatcccaaaaggattgattagaagtgccagcgtaactcctaaaatcaatcagctttgctcacaaactaaaggaagttttgtgaatggggtgtttgaggtacataagaaaaatgtaaggggtgaattcacttattatgaaatacaagataatacagggaagatggaagtggtggtgcatggacgactgaccacaatcaactgtgaggaaggagataaactgaaactcacctgctttgaattggcaccgaaaagtgggaataccggggagttgagatctgtaattcatagtcacatcaaggtcatcaagaccaggaaaaacaagaaagacatactcaatcctgattcaagtatggaaacttcaccagactttttcttctaaaatctggatgtcattgacgataatgtttatggagataaggtctaagtgcctaaaaaaatgtacatatacctggttgaaatacaacactatacatacacaccaccatatatactagctgttaatcctatggaatggggtattgggagtgcttttttaatttttcatagtttttttttaataaaatggcatattttgcatctacaacttctataatttgaaaaaataaataaacattatcttttttgtgaaagg

SEQ ID NO: 5740 - DNA, 1862 bp, Homo sapiens; identical to SEQ ID NO: 3777

SEQ ID NO: 5741 - DNA, 3068 bp, Homo sapiens
gaggccaggggagggtgcgaaggaggcgcctgcctccaacctgcgggcgggaggtgggtggctgcggggcaattgaaaaagagccggcgaggagttccccgaaacttgttggaactccgggctcgcgcggaggccaggagctgagcggcggcggctgccggacgatgggagcgtgagcaggacggtgataacctctccccgatcgggttgcgagggcgccgggcagaggccaggacgcgagccgccagcggtgggacccatcgacgacttcccggggcgacaggagcagccccgagagccagggcgagcgcccgttccaggtggccggaccgcccgccgcgtccgcgccgcgctccctgcaggcaacgggagacgcccccgcgcagcgcgagcgcctcagcgcggccgctcgctctccccctcgagggacaaacttttcccaaacccgatccgagcccttggaccaaactcgcctgcgccgagagccgtccgcgtagagcgctccgtctccggcgagatgtccgagcgcaaagaaggcagaggcaaagggaagggcaagaagaaggagcgaggctccggcaagaagccggagtccgcggcgggcagccagagcccagccttgcctccccgattgaaagagatgaaaagccaggaatcggctgcaggttccaaactagtccttcggtgtgaaaccagttctgaatactcctctctcagattcaagtggttcaagaatgggaatgaattgaatcgaaaaaacaaaccacaaaatatcaagatacaaaaaaagccagggaagtcagaacttcgcattaacaaagcatcactggctgattctggagagtatatgtgcaaagtgatcagcaaattaggaaatgacagtgcctctgccaatatcaccatcgtggaatcaaacgagatcatcactggtatgccagcctcaactgaaggagcatatgtgtcttcagagtctcccattagaatatcagtatccacagaaggagcaaatacttcttcatctacatctacatccaccactgggacaagccatcttgtaaaatgtgcggagaaggagaaaactttctgtgtgaatggaggggagtgcttcatggtgaaagacctttcaaacccctcgagatacttgtgcaagtgccaacctggattcactggagcaagatgtactgagaatgtgcccatgaaagtccaaaaccaagaaaaggcggaggagctgtaccagaagagagtgctgaccataaccggcatctgcatcgccctccttgtggtcggcatcatgtgtgtggtggcctactgcaaaaccaagaaacagcggaaaaagctgcatgaccgtcttcggcagagccttcggtctgaacgaaacaatatgatgaacattgccaatgggcctcaccatcctaacccaccccccgagaatgtccagctggtgaatcaatacgtatctaaaaacgtcatctccagtgagcatattgttgagagagaagcagagacatccttttccaccagtcactatacttccacagcccatcactccactactgtcacccagactcctagccacagctggagcaacggacacactgaaagcatcctttccgaaagccactctgtaatcgtgatgtcatccgtagaaaacagtaggcacagcagcccaactgggggcccaagaggacgtcttaatggcacaggaggccctcgtgaatgtaacagcttcctcaggcatgccagagaaacccctgattcctaccgagactctcctcatagtgaaaggtatgtgtcagccatgaccaccccggctcgtatgtcacctgtagatttccacacgccaagctcccccaaatcgcccccttcggaaatgtctccacccgtgtccagcatgacggtgtccatgccttccatggcggtcagccccttcatggaagaagagagacctctacttctcgtgacaccaccaaggctgcgggagaagaagtttgaccatcaccctcagcagttcagctccttccaccacaaccccgcgcatgacagtaacagcctccctgctagccccttgaggatagtggaggatgaggagtatgaaacgacccaagagtacgagccagcccaagagcctgttaagaaactcgccaatagccggcgggccaaaagaaccaagcccaatggccacattgctaacagattggaagtggacagcaacacaagctcccagagcagtaactcagagagtgaaacagaagatgaaagagtaggtgaagatacgcctttcctgggcatacagaaccccctggcagccagtcttgaggcaacacctgccttccgcctggctgacagcaggactaacccagcaggccgcttctcgacacaggaagaaatccaggccaggctgtctagtgtaattgctaaccaagaccctattgctgtataaaacctaaataaacacatagattcacctgtaaaactttattttatataataaagtattccaccttaaattaaacaatttattttattttagcagttctgcaaatagaaaacaggaaaaaaacttttataaattaaatatatgtatgtaaaaatgtgttatgtgccatatgtagcaattttttacagtatttcaaaacgagaaagatatcaatggtgcctttatgttatgttatgtcgagagcaagttttgtacagttacagtgattgcttttccacagtatttctgcaaaacctctcatagattcagtttttgctggcttcttgtgcattgcattatgatgttgactggatgtatgatttgcaagacttgcaactgtccctctgtttgcttgtagtagcacccgatcagtatgtcttgtaatggcacatccatccagatatgcctctcttgtgtatgaagttttctttgctttcagaatatgaaatgagttgtgtctactctgccagccaaaggtttgcctcattgggctctgagataatagtagatccaacagcatgctactattaaatacagcaagaaactgcattaagtaatgttaaatattaggaagaaagtaatactgtgattt

SEQ ID NO: 5742 - DNA, 3071 bp, Homo sapiens
gacaactgagacggctgcagaccatggggcagggagcatatggagcacggatatgccagacagagggatgattcatatcccaggcaggatggagcagggcagtgtgctatttcatcgtgctactcagaacttatgaattgtttatttctggaatttcccatttaatatttttggactgtggttgatcgagggtaaatgaaattgcagaaagcaaaaatacagataagggggactgcttgctgtacaaagatagagacaagaggaaggagctgtcctcaagggccttttgtgtgaagacatctggcacacagatacgctgcatgcaggtggcttgagagaacatgcatccaggccctgaggaggcgggaagtggccgctatggaccccgttatatcaccgacatgggagctggtgaggatgatgaaggatttgaagacgacttagatttggatatttcctttgaggaggttaaaccacttcctgctaccaaaggagggaataagaaatttttggtggaaagcaagaagatgtctatatctaacccaaagaccatttctaggctcatcccccctacctcagcatctctccctgtgaccacggtggctccccagcccattcccatacagagaaaggggaagaatggtgtggccataatgtcaaggctctttgacatgccttgtgatgaaactctctgctctgctgacagcttctgtgtcaatgactacacctgggggggctcgcgatgccagtgcaccctgggcaaaggtggtgagagctgctcagaagatattgttatccagtatcctcagttctttggccactcctatgtaacgtttgaacctctgaagaattcttatcaggcatttcaaattactcttgaatttagggcggaggcagaggatggcttactgctctactgtggggagaacgaacacgggaggggggatttcatgtccctggctatcatccgacgctccctgcagttcaggtttaattgtggaactggggttgccatcatcgtaagtgagaccaaaatcaaactagggggttggcacacggttatgctctacagagatgggctgaacgggctgctgcagctgaacaatggcaccccagtgacaggccagtctcagggccaatacagtaaaattactttccggacacctctctatcttggtggcgctcccagcgcttactggttggttagagcaacagggacaaaccgaggctttcaaggctgtgtgcagtcgctcgctgtgaatgggaggagaattgacatgaggccctggcccctgggaaaagcactcagtggggctgatgtgggggaatgcagcagtggaatctgtgatgaggcctcgtgcatccatggtggcacctgcacagcaatcaaagccgactcctacatttgcctctgtccccttgggtttaaaggtcgacactgtgaagatgctttcaccttgaccattcctcagttcagagagtctctgagatcttacgctgcaactccctggccactggagccccagcattacctttccttcatggaatttgagatcacatttcggccagactcaggagatggtgtcctcctgtacagctatgacacaggcagcaaagacttcctgtccatcaacttggcagggggccacgtggagttccgctttgactgtggctctgggaccggtgtcctcaggagtgaagatcccctcaccctgggcaactggcacgagcttcgtgtatctcgcacagcaaagaatggaatcttacaggtggataagcagaagatagtggagggaatggcagagggaggcttcacacagattaagtgcaacacagacattttcattggcggagtccccaattatgatgatgtgaagaagaactcgggtgtcctgaagcctttcagcgggagcatccagaagatcatcctgaatgaccgaaccatccatgtgaagcatgacttcacctccggagtgaatgtggagaatgcggcccacccctgtgtgagagccccttgtgcccatgggggcagctgccggcccaggaaggagggctatgactgtgactgccccttgggctttgaggggcttcactgccagaaagcgatcatagaagccattgagatcccgcagtttatcggccgcagttacctgacgtatgacaacccagatatcttgaagagggtgtcaggatcaagatcaaatgtgttcatgaggtttaaaacaactgccaaggatggccttttgctgtggaggggagacagccccatgagacccaacagcgacttcatttccttgggccttcgggatggagccctcgtgttcagctataacctgggcagtggtgtggcatccatcatggtgaatggctccttcaacgatggtcggtggcaccgagttaaggccgttagggatggccagtcaggaaagataaccgtggatgactatggagccagaacaggcaaatccccaggcatgatgcggcagcttaacatcaatggagctctgtatgtgggtggaatgaaggaaattgctctgcacactaacaggcaatatatgagagggctcgtgggctgtatctctcacttcaccctgtccaccgattaccacatttccctcgtggaagatgccgtggatgggaaaaacatcaacacttgtggagccaagtaacaccagctggccttgtccaagggacagagccttctattctgagaatcccaggggccctcagaccctgcctgatgctatatgcagaggcccagggaccaggtgtgtttcctctcaccaagaagaaagtacacactgatgagaaactgagaaccaagacaggcatccctgggtggcctttcctgctgacactccacgagctgacccagcagaattctctgtgtaggaagcatcggactttgtccattgaatatgtagcggctgccagagatcacacatcaatgcaaattccagagcctgtctgctatagctcagtgactgtgttgtgattcatagtacattaaaaagagagagagagagaaagaatcccacagggcactattaaaatacttctctccttccctg

SEQ ID NO: 5743 - DNA, 905 bp, Homo sapiens
ctcacctcacagacactcctctctggatcctccagagctataaagacgggccttccaccaccagacaggcgcactctaccaccatgaatccactcctgatccttgcctttgtgggagctgctgttgctgtcccctttgatgatgatgacaagatcgttgggggctacacctgtgaggagaattctgtcccctaccaggtgtccttgaattctggctcccacttctgcggtggctccctcatcagcgaacagtgggtggtgtcagcaggtcactgctacaagccacaaatccatgaagaattttcaggaagagggtgtgaatatcaccacatccaggtgagactgggagagcacaatatcgaagtcctggaggggaatgagcagttcatcaatgcagccaagatcatccgccaccccaaatacaacaggattattctgaacaatgacatcatgctgatcaagctctccacacctgccgtcatcaatgcccatgtgtccaccatctctctgcccactgcccctccagctgctggcaccgagtgccttatctccggctggggcaataccctgagctctggggccgactacccagatgagctgcagtgcctggacgctcctgtgctgacccaggctaagtgtaaagcctcctaccctttaaagattaccagcaacatgttctgtgtgggcttccttgagggaggcaaggattcctgccagggtgactctggtggccctgtggtctgcaatggacagcttcaaggaattgtctcctggggctatggctgtgcccagaagagaaggcctggagtctacaccaaggtctacaactatgtggactggattaaggacaccatagctgccaacagctaaagcccctggtcactctgcagtctctataccaataaa

SEQ ID NO: 5744 - DNA, 5416 bp, Homo sapiens; identical to SEQ ID NO: 274

SEQ ID NO: 5745 - DNA, 3390 bp, Homo sapiens; identical to SEQ ID NO: 420

SEQ ID NO: 5746 - DNA, 3108 bp, Homo sapiens
agcttgaaataatgctggagcccaaggtctggagagaagctgctactcaagtgttctttgccttaggtctgggatttggtggtgtcattgccttttcaagctacaacaagagagacaacaactgccactttgatgctgtcctggtgtccttcatcaattttttcacttctgtcctggcaacattggtggtgtttgcagttctgggcttcaaagcaaatgtcataaatgagaaatgcattacacaaaattcagagacgatcatgaaatttttgaaaatggggaacattagtcaggatattattccccatcatatcaacctttcaactgttactgcagaagattatcatttagtttatgacatcattcaaaaagtgaaagaagaagagtttcctgctcttcatctcaattcctgtaaaattgaagaagagctaaataaagctgttcaggggaccggcttagcttttattgcctttacagaagcgatgacacattttcctgcatctcccttctggtcagtgatgtttttcctcatgctggtcaatctaggccttggcagtatgtttggaaccattgaagggattgtcacgcctattgtggacactttcaaagtgaggaaagaaattcttactgttatctgttgtcttctggcattttgtattggcctgatatttgtgcaacgctctggaaattactttgttacaatgtttgatgattattctgctacactgcctctgctaattgtagtcattttggagaatattgctgtatgctttgtttatggcatagataagtttatggaagacctaaaagatatgctgggctttgctcccagcagatattactactatatgtggaaatatatttctcctctaatgctattatcattgctaatagctagtgttgtgaatatgggattaagtcctcctggctataacgcatggattgaagataagcatctgtgacctataagagaggaagggtcctgaaagagcctgtgaacttagagggcgatgatacaagcctcattcacggaaaaataccgagcgagatgccatctccaaattttggtaaaaatatttatcgaaaacagagtggatccccaactctggatactgctcccaatggacggtatggaatagggtacttgatggcagatattatgccagatatgccagaatctgatttgtagctgggggaaaagtcagtgggttttatttggttcatttttaccaatgaacattggccctagtaggagaagcattaggcttcacttatcagagggcaatctcaggtgttccgtggctgtgatctttaatcctaacagtatatgtcagttcaacttgagcattcttttggattctttggtttacatttgtgcagaaaggattgcagacaaatcttaggagggctgaggtacatgtttgccaggatttttttttaagtacctttggtgtattttcaaatatttctatctcttaaaaaaatggtattacctcagtttctaataatttctgggtttagtagtgttgacaattaaaaatggtatacattaaaatttataagtttgccttcagggtaacttccagtgtcacaatgagcagttctgtaagtgggtgcctctcagcacatttctatgaatatattatgtagataggctgtattgattttggtagcattgacaccttcttaggcaattagttgaagaaaactgcaaaatattttcttatgtaatagctgtatagagcaatagcaatcaaagcatgagaaggcactaacgctgggatgaaagatgagattcagaggtgactgagaatcatgtgagtgatggctgtatattttgtgtaaaatatatgtgtgaaaatgaactaagagtgagttactcagcactctcaagaattatgcagattctgcatttttcttatgccgtgtgcctaaaaacctacttgatatttattgtggtttcaagattattcatagtatatttatacaatatacttgcaatgcatttaagtacttaaagtactaatttgaaaacttgaagcaagatggcattttaattaatatatttctgttttgcttctgttttatgcaaatataaatcatttttaagtgattgttaaaattgtaatgcattacattttaatctacaaataaacaaagtttaaaaatgatgtttgtttttcacattgattttctttgtatcacctgaactggattgtctttcatttcagtcagcacttagacatttcataataactaaacatcacattccaagtgggatgaattacattaattgaatagagttaccaccgcttcagagtctaaggaaaaatagagtattatggttcaatggtgttcttatgtagtcttatgattcttgaaaaagtacttacagcctcccaagaaaccatgtgtacaattgactgcttgctgattcaatattgtctgcaaagtataaaagactatgatttttaaataaaactgttgtatatatgaaattggatagagcagaggaacctcactgagtgtcctctagttaaaaatctttcatttatcctaccaccagatcagttacatttttaaaacaatgatggatatagcagcaaaataagtgaggtaatacacatgccatatcaattgatttatttcagccagtattctcgctctgctatagatagatgttaataaatggtatcacagcatttaaagtattaaatccactggtgcataaatttttagtcttttaaaatatattcatgaatattgtgtttgtatccctttaaaatgtttaatattttataaataggcagtatatgcacattatacaaaactaaaaaattatgacaattcagtgtgaagtaagttctcatccaacatttctcctggccatccattctccatctttaaaggcaatcaccattgccagtttcttctgtatccttctggaaatacaatatattacataaatgacagcattctatattctctcttctatatcttacctatttctgtgaataatttattttggacagcattttatgtatgaatattcacaaatgtgcttccttatttcagaggctgaactaataaaaattttgtttatttttg

SEQ ID NO: 5747 - DNA, 753 bp, Homo sapiens
atgagtgagaacgccgcaccagacttttattacgttgccatggatttcggaggtcatgggctctcgtcccattacagcccaggtgtcccatattacctccagacttttgtgagtgagatccgaagagttgtggcaggtggcgtcgtgggcggaatgtttttctgtaccttccccgagatggtggataaacttatcttgctggacacgccgctctttctcctggaatcagatgaaatggagaacttgctgacctacaagcggagagccatagagcacgtgctgcaggtagaggcctcccaggagccctcgcacgtgttcagcctgaagcagctgctgcagaggttactgaagagcaatagccacttgagtgaggagtgcggggagcttctcctgcaaagaggaaccacgaaggtggccacaggtctggttctgaacagagaccagaggctcgcctgggcagagaacagcattgacttcatcagcagggagctgtgtgcgcattccatcaggaagctgcaggcccatgtcctgttgatcaaagcagtccacggatattttgattcaagacagaattactctgagaaggagtccctgtcgttcatgatagacacgatgaaatccaccctcaaagagcagttccagtttgtggaagtcccaggcaatcactgtgtccacatgagcgaaccccagcacgtggccagtatcatcagctccttcttacagtgcacacacatgctcccagcccagctgtag

SEQ ID NO: 5748 - DNA, 1468 bp, Homo sapiens
cagaaattcagacaagagcattctccttatctcatctgcacaggaagcaggtctaagtgtaatttcacaagcccctgactctgtgtagacacccagctctccagaaaaatgctttgaagacaaaggatacagcatacagtcccgtgtctcggctgagtcatcgcattccttaatagtgtcttctccccgggtttggtggcctgcttctggagtggtcagttctgctgccgacatgcccacccagctcgagatggccatggacaccatgattagaatcttccaccgctattctggcaaggaaaggaagagattcaagctcagcaagggggaactgaaactgctcctgcagcgagagctcacggaattcctctcgtgccaaaaggaaacccagttggttgataagatagtgcaggacctggatgccaataaggacaacgaagtggattttaatgaattcgtggtcatggtggcagctctgacagttgcttgtaatgattactttgtagaacaattgaagaagaaaggaaaataaaggaagttcgtgaatgctaatcaagggctaaataaagtggaaagcagcatccttgaaaatcatcgctctcaggacggggtctgcctggaatagcactgaatgtgtttagtagtgcctttggcttgggggctttggagaaagctgcttgagcccttcccatgctcataaattaggtaaggagcagtgaggaagtgtctacagcaacctcagccaatgtgatgtgcctctacagctgtatgaagtagattctctgattttatcttgaaatccacaacttccacaaaaaagaaaaatcttttaccatttctcattaaaaaagtaatataagtttattgtagggggaaataatcaaatgtaatctcattacccagatataatcactgttaacttcttcattcgaattttccctaggtccatgtatctatatatctatggttcataaaaatgagattacaccaaaaaatatcttttgttatctatatagttccagcttaataaatatacaactgtattattatttttgtctgaatagtattttcattgatatatcacaatatatttactccaattccctattgcatatagattatttctaatttttctattaataatactaagggagcttttaagtcaatacatctgaatcttgaataaaattcttgttccttctctttggatgggtattcagactcttaattttacaaatgaagaaataaagtcccagaaggtaacagagatagaactaggcacgattttctattcttctttccttcctttctttgtgagagttaacgattatttaaaagtattcataattttctgataataaaagtaagacatggcattatgacactggatattcaaaaaccacgatgtccttttacttgaagattttaaaaggaaatgattacaataaatacccagagtcaacaatta

SEQ ID NO: 5749 - DNA, 2712 bp, Homo sapiens
cagggtaacgctgtcttgtggacccgcacttcccacccgagacctctcactgagcccgagccgcgcgcgacatgagccacgggaagggaaccgacatgctcccggagatcgccgccgccgtgggcttcctctccagcctcctgaggacccggggctgcgtgagcgagcagaggcttaaggtcttcagcggggcgctccaggaggcactcacagagcactacaaacaccactggtttcccgaaaagccgtccaagggctccggctaccgctgcattcgcatcaaccacaagatggaccccatcatcagcagggtggccagccagatcggactcagccagccccagctgcaccagctgctgcccagcgagctgaccctgtgggtggacccctatgaggtgtcctaccgcattggggaggacggctccatctgcgtcttgtacgaggaggccccactggccgcctcctgtgggctcctcacctgcaagaaccaagtgctgctgggccggagcagcccctccaagaactacgtgatggcagtctccagctaggcccttccgcccccgccctgggcgccgccgtgctcatgctgccgtgacaacaggccaccacatacctcaacctggggaactgtatttttaaatgaagagctatttatatatattatttttttttaagaaaggaggaaaagaaaccaaaagttttttttaagaaaaaaaatccttcaagggagctgcttggaagtggcctccccaggtgcctttggagagaactgttgcgtgcttgagtctgtgagccagtgtctgcctataggagggggagctgttagggggtagacctagccaaggagaagtgggagacgtttggctagcaccccaggaagatgtgagagggagcaagcaaggttagcaactgtgaacagagaggtcgggatttgccctgggggaggaagagaggccaagttcagagctctctgtctcccccagccagacacctgcatccctggctcctctattactcaggggcattcatgcctggacttaaacaatactatgttatcttttcttttatttttctaatgaggtcctgggcagagagtgaaaaggcctctcctgattcctactgtcctaagctgcttttcttgaaatcatgacttgtttctaattctaccctcaggggcctgtagatgttgctttccagccaggaatctaaagctttgggttttctgaggggggggaggagggaactggaggttattggggttaggatggaagggaactctgcacaaaacctttgctttgctagtgctgctttgtgtgtatgtgtggcaaataatttgggggtgatttgcaatgaaattttgggacccaaagagtatccactggggatgttttttggccaaaactcttccttttggaaccacatgaaagtcttgatgctgctgccatgatccctttgagaggtggctcaaaagctacagggaactccaggtcctttattactgccttcttttcaaaagcacaactctcctctaaccctcccctcccccttcccttctggtcgggtcatagagctaccgtattttctaggacaagagttctcagtcactgtgcaatatgccccctgggtcccaggagggtctggaggaaaactggctatcagaacctcctgatgccctggtgggcttagggaaccatctctcctgctctccttgggatgatggctggctagtcagccttgcatgtattccttggctgaatgggagagtgccccatgttctgcaagactacttggtattcttgtagggccgacactaaataaaagccaaaccttgggcactgttttttctccctggtgctcagagcacctgtgggaaaggttgctgtctgtctcagtacaatccaaatttgtcgtagacttgtgcaatatatactgttgtgggttggagaaaagtggaaagctacactgggaagaaactcccttccttcaatttctcagtgacattgatgaggggtcctcaaaagacctcgagtttcccaaaccgaatcaccttaagaaggacagggctagggcatttggccaggatggccaccctcctgctgttgccccttagtgaggaatcttcaccccacttcctctacccccaggttctcctccccacagccagtcccctttcctggatttctaaactgctcaattttgactcaaaggtgctatttaccaaacactctccctacccattcctgccagctctgcctccttttcaactctccacattttgtattgccttcccagacctgcttccagtctttattgctttaaagttcactttgggcccacagacccaagagctaattttctggtttgtgggttgaaacaaagctgtgaatcactgcaggctgtgttcttgcatcttgtctgcaaacaggtccctgcctttttagaagcagcctcatggtctcatgcttaatcttgtctctcttctcttctttatgatgttcactttaaaaacaacaaaacccctgagctggactgttgagcaggcctgtctctcctattaagtaaaaataaatagtagtagtatgtttgtaagctattctgacagaaaagacaaaggttactaattgtatgatagtgtttttatatggaagaatgtacagcttatggacaaatgtacacctttttgttactttaataaaaatgtagtaggataaa

SEQ ID NO: 5750 - DNA, 1359 bp, Homo sapiens
cttcaaaaaaagagcgggacagggacaagcgtatctaagaggctgaacatgaatccacagatcagaaatccgatggagcggatgtatcgagacacattctacgacaactttgaaaacgaacccatcctctatggtcggagctacacttggctgtgctatgaagtgaaaataaagaggggccgctcaaatctcctttgggacacaggggtctttcgaggccaggtgtatttcaagcctcagtaccacgcagaaatgtgcttcctctcttggttctgtggcaaccagctgcctgcttacaagtgtttccagatcacctggtttgtatcctggaccccctgcccggactgtgtggcgaagctggccgaattcctgtctgagcaccccaatgtcaccctgaccatctctgccgcccgcctctactactactgggaaagagattaccgaagggcgctctgcaggctgagtcaggcaggagcccgcgtgacgatcatggactatgaagaatttgcatactgctgggaaaactttgtgtacaatgaaggtcagcaattcatgccttggtacaaattcgatgaaaattatgcattcctgcaccgcacgctaaaggagattctcaggctaagaatcttctctgtggcttttacggccgccatgcggagctgcgcttcttggacctggttccttctttgcagttggacccggcccagatctacagggtcacttggttcatctcctggagcccctgcttctcctggggctgtgccggggaagtgcgtgcgttccttcaggagaacacacacgtgagactgcgcatcttcgctgcccgcatctatgattacgaccccctatataaggaggcgctgcaaatgctgcgggatgctggggcccaagtctccatcatgacctacgatgagtttgagtactgctgggacacctttgtgtaccgccagggatgtcccttccagccctgggatggactagaggagcacagccaagccctgagtgggaggctgcgggccattctccagaatcagggaaactgaaggatgggcctcagtctctaaggaaggcagagacctgggttgagcagcagaataaaagatcttcttccaagaaatgcaaacagaccgttcaccaccatctccagctgctcacagacaccagcaaagcaatgtgctcctgatcaagtagattttttaaaaatcagagtcaattaattttaattgaaaatttctcttatgttccaagtgtacaagagtaagattatgctcaatattcccagaatagttttcaatgtattaatgaagtgattaattggctccatatttagactaataaaacattaagaatcttccataa

SEQ ID NO: 5751 - DNA, 2019 bp, Homo sapiens
atggacagtagctgccacaacgcgactaccaaaatgttagcgactgctccagctcggggcaacatgatgagcacgtccaaacccttggctttctccattgaacgaatcatggcgcgcaccccagagcccaaggccctgccagtcccccacttcctgcagggagccttacccaagggggaacccaagcactctctgcatctcaactcgtcgatcccctgcatgatccccttcgtgcctgtggcctacgacacgagccccaaggcaggagtgacgggctccgagccgcggaaggccagtctggaggccccggcggcgcccgcggcggtgccctcggctcccgcattcagctgcagcgacctgctcaactgcgcactgagtctcaagggcgacctggcccgcgacgcgctgccgctgcagcagtacaagctggtaaggccgcgtgtggtcaaccactcttcattccacgccatgggcgccttgtgctacctgaaccgaggtgacggcccatgccacccggcagccggcgtgaacatccacccggtggcctcctacttcctcagttcccctttgcacccgcagccaaaaacgtatttagccgaaaggaataaactggtggtcccggcggtggagaaatacccttctggagtagctttcaaagacctgtcccaggctcagctgcagcattacatgaaagaaagcgcccagcttctgtcggaaaaaatcgcgttcaaaacctcggatttcagccgaggctctcctaatgccaagcccaaagttttcacttgcgaagtctttaatgcgcactataacttaacccgtcacatgccagtgcacacaggagccagacccttcgtttgcaaagtgtgcggaaaaggtttcaggcaagcaagcaccctgtgcaggcacaagatcattcacacgcaggaaaaacctcacaaatgtaaccagtgtggcaaagcatttaatagaagttccactttaaacactcatacccgaatacacgcgggctacaaaccgtttgtgtgtgaattctgtggcaaagggtttcatcaaaaagggaattacaaaaaccacaagttgacccacagcggggagaagcagttcaagtgcaatatctgcaacaaggctttccaccaggtttacaacctcaccttccacatgcacacccacaacgacaagaagcctttcacctgccccacgtgcggcaagggtttctgcaggaactttgacctcaagaagcatgtccgcaagctgcacgacagcagcctggggctggcccgcacgccagctggcgaaccaggcactgaaccgccgcccccgctaccgcagcagccgccgatgacgctgcctcctctgcagccgccgctgccaaccccggggcccctgcagcccgggctccaccagggccaccagtgatcgaggctaagggtcctcccagcctcagccgtgcccccacgctgaggcagcggcagactagagctcctggtccgagttcgtctgcagaccccagggcatgttgggccccacacttcagggccgaccagaagcctctgcatcccctggcctttcgcctcttgcatgcacctgctaaatggttttgtgtattatattctatataggcactaacaattatgaaaaatttggagggttttgcttgttttctgtttttctttttctttttttttaatttggaaagacttttcatcttgggtggagagatggtgtttattttgttttgttttgtttaaacaaatttctgctatatttattgagatctgtattattctacccgggaatgctgcatcattttaattttattattgtatatatttccattgtgttgattctccggtctcaagatgtctgctggatgttgatcatttcctctttccctgaagtaacaaaacactgtgtgtatgtcatatatacacgcatagatgtgtgcgcccataggggtacattccacattcgtgagcacacacccatacacattagataagggtggttcattatggatga

SEQ ID NO: 5752 - DNA, 2368 bp, Homo sapiens
gttagtcgtcgccgtctgaggtgttccctggctttgtctcgccgtcgttgccgccccgtccctgccttcgtgccccccgccttggcccctgcccagccgctctccctgtcctcctccccttaaccacccccacggtttctgccgtcggggcccgggggccgggcggatgatgccgtcggagagcggagctgagcgcagggaccgggcggctgctcaggtggggacggctgcggccacggcggtggccacggcagccccggcaggcggcggccccgacccggaggccttatcggccttccccggacggcacctgagtgggctgagctggccacaggtgaagcgactggacgctcttctgagcgagccgattcccattcacgggcgcggcaacttccccacgctgagcgtgcagccccggcagatcgtgcaggtggtccgcagcaccctggaggagcagggactacatgtgcacagtgtgcggctgcatggttcagctgccagccacgtgctgcaccctgagagtggcctgggctacaaggatctggacctggtgttccgggtggacctgcgcagtgaggcatccttccagctgaccaaggcagtggtgctggcctgcctactagacttcctgccggccggtgtgagccgggccaagatcacgccactgacactcaaggaggcatacgtgcagaagctggtgaaagtgtgcacagactcggaccgctggagcctcatctcactgtccaacaagagcggcaagaacgtggagctcaagtttgtggactcggtgagacgccagtttgaattcagcatagactccttccagatcatcctggactccctgttgctctttggccagtgctcgtccactcccatgtctgaggccttccacccaacggtcacaggcgaaagcctgtacggggacttcaccgaggccctggagcacctgcggcaccgtgtcatcgccacgcgcagtcccgaggagatccgaggtggtggcctcctcaagtactgccacctcctggtgcggggcttccggccccggcccagcaccgatgtgcgcgccctgcagcgctacatgtgctcccgcttcttcatcgactttccagacctggtggagcagcggcgcaccctagagcgctacctggaggcccacttcggtggggcagatgcagcccgccgttacgcctgcctggtgacactgcaccgggtggtcaacgagagcaccgtgtgcctcatgaaccacgagcgccgccagacgctggacctcattgccgcactggcgctgcaggcactggctgagcagggcccagctgccactgccgccctggcctggcgccctccaggcactgacggggttgtgccagccactgtcaattactacgtgacccccgtgcaacctctcctggctcacgcctatcccacctggctgccttgtaactgactcagaccctggccagaagggaagggactgggcctcacggggtggggtggggcctccaagagtgtgtggaggacatgaccagaggcgcagaatgtgccaggaggcccagcactgcagggttgggcctttgattgaacagaccagactttcccgagcacgaggcccctgtgggcttaatgccagcctggggctctcagcaggaggaccctttggttattgcatcacacttttggaccagcatgccggtggggtgcaggcgccatttgtcttggaagtcaatttccttcaggagacaaagcaagtttggggtggtagccttaatgcccagcaccttggattgattcccatggtctaagagggtctttttgactaaggccagcctgtggtgatcccagcagctttggagggcctgcagcccacacactgactgatacatggtatgttacagggacttgtcactttggatcaggctgggccactacagggcctgatgggccaacttgggtaatcactgggaggagggaaactgaggcccgaggcagatacctgggtttggggagggctgggtttagcccggttctctgaactacatacccccagctgtgaagccttcctcttgaggggttgaggtgggcagtatacaggagccaagcagcccagggtgggtcgcagcccaggccccttccagggtgccactcctttcccccttgtgttgcaaggagccctcctgcctgggagcttgttctttggaaggtgctgagcctgaatttgccacagtcaagtcaacgttcccaccccactggcttggttacagggctctcacatggggtaggggagccatactcccacccccttgcgtattcccctgggtttgttgatattttgcactcttaacacctgccaataaagacggtctacactgaa

SEQ ID NO: 5753 - DNA, 1533 bp, Homo sapiens
caaaaaaagagcgggacagggacaagcgtatctaagaggctgaacatgaatccacagatcagaaatccgatggagcggatgtatcgagacacattctacgacaactttgaaaacgaacccatcctctatggtcggagctacacttggctgtgctatgaagtgaaaataaagaggggccgctcaaatctcctttgggacacaggggtctttcgaggccaggtgtatttcaagcctcagtaccacgcagaaatgtgcttcctctcttggttctgtggcaaccagctgcctgcttacaagtgtttccagatcacctggtttgtatcctggaccccctgcccggactgtgtggcgaagctggccgaattcctgtctgagcaccccaatgtcaccctgaccatctctgccgcccgcctctactactactgggaaagagattaccgaagggcgctctgcaggctgagtcaggcaggagcccgcgtgacgatcatggactatgaagaatttgcatactgctgggaaaactttgtgtacaatgaaggtcagcaattcatgccttggtacaaattcgatgaaaattatgcattcctgcaccgcacgctaaaggagattctcagatacctgatggatccagacacattcactttcaactttaataatgaccctttggtccttcgacggcgccagacctacttgtgctatgaggtggagcgcctggacaatggcacctgggtcctgatggaccagcacatgggctttctatgcaacgaggctaagaatcttctctgtggcttttacggccgccatgcggagctgcgcttcttggacctggttccttctttgcagttggacccggcccagatctacagggtcacttggttcatctcctggagcccctgcttctcctggggctgtgccggggaagtgcgtgcgttccttcaggagaacacacacgtgagactgcgcatcttcgctgcccgcatctatgattacgaccccctatataaggaggcgctgcaaatgctgcgggatgctggggcccaagtctccatcatgacctacgatgagtttgagtactgctgggacacctttgtgtaccgccagggatgtcccttccagccctgggatggactagaggagcacagccaagccctgagtgggaggctgcgggccattctccagaatcagggaaactgaaggatgggcctcagtctctaaggaaggcagagacctgggttgagcagcagaataaaagatcttcttccaagaaatgcaaacagaccgttcaccaccatctccagctgctcacagacaccagcaaagcaatgtgctcctgatcaagtagattttttaaaaatcagagtcaattaattttaattgaaaatttctcttatgttccaagtgtacaagagtaagattatgctcaatattcccagaatagttttcaatgtattaatgaagtgattaattggctccatatttagactaataaaacattaagaatcttccataattgtttccacaaacactagcaaa

SEQ ID NO: 5754 - DNA, 1427 bp, Homo sapiens
actcgcgcccttgccgctgccaccgcaccccgccatggagcggccgtcgctgcgcgccctgctcctcggcgccgctgggctgctgctcctgctcctgcccctctcctcttcctcctcttcggacacctgcggcccctgcgagccggcctcctgcccgcccctgcccccgctgggctgcctgctgggcgagacccgcgacgcgtgcggctgctgccctatgtgcgcccgcggcgagggcgagccgtgcgggggtggcggcgccggcagggggtactgcgcgccgggcatggagtgcgtgaagagccgcaagaggcggaagggtaaagccggggcagcagccggcggtccgggtgtaagcggcgtgtgcgtgtgcaagagccgctacccggtgtgcggcagcgacggcaccacctacccgagcggctgccagctgcgcgccgccagccagagggccgagagccgcggggagaaggccatcacccaggtcagcaagggcacctgcgagcaaggtccttccatagtgacgccccccaaggacatctggaatgtcactggtgcccaggtgtacttgagctgtgaggtcatcggaatcccgacacctgtcctcatctggaacaaggtaaaaaggggtcactatggagttcaaaggacagaactcctgcctggtgaccgggacaacctggccattcagacccggggtggcccagaaaagcatgaagtaactggctgggtgctggtatctcctctaagtaaggaagatgctggagaatatgagtgccatgcatccaattcccaaggacaggcttcagcatcagcaaaaattacagtggttgatgccttacatgaaataccagtgaaaaaaggtgaaggtgccgagctataaacctccagaatattattagtctgcatggttaaaagtagtcatggataactacattacctgttcttgcctaataagtttcttttaatccaatccactaacactttagttatattcactggttttacacagagaaatacaaaataaagatcacacatcaagactatctacaaaaatttattatatatttacagaagaaaagcatgcatatcattaaacaaataaaatactttttatcacaacacagtacatatttgtcatttttaaaaagccacacaatagaaacaagacaccaagatatttaattatcttgttgactcctgtaaaatagctaaacactcatcattcgcggtgcaatactcatagacataagttcctgaaacaatagtttgcatgcgtaaggcattcgcaccaaagaaatctgaaaagaaaaaacaaatggtaattagcagaattgtattgaagtgaccccacttctctaccccagaaaaagacaaagatctggtactgtagataatgaataaatgagtggagctgagaacacaca

SEQ ID NO: 5755 - DNA, 3784 bp, Homo sapiens
aggtaggtcccccgctccgacagggctcttacgccatatgtgacgcaaattagcttacgagccgggggtggaggtgtcgtcagcacccgcctgcggttggccgcgttgcagcgagaggggcatgtagaccccgcctcgtagggaggtggggagcggcaagccccgcctcagcccctctggcaggctcccgccagcgtcgctgcggctccggcccgggagcgagcgcccggagctcggaaagatgcggcgcccgcggcggcctgggggtctcgggggatccgggggtctccggctgctcctctgcctcctgctgctgagcagccgcccggggggctgcagcgccgttagtgcccacggctgtctatttgaccgcaggctctgctctcacctggaagtctgtattcaggatggcttgtttgggcagtgccaggtgggagtggggcaggcccggccccttttgcaagtcacctccccagttctccaacgcttacaaggtgtgctccgacaactcatgtcccaaggattgtcctggcacgatgacctcacccagtatgtgatctctcaggagatggagcgcatccccaggcttcgccccccagagccccgtccaagggacaggtctggcttggcacccaagagacctggtcctgctggagagctgcttttacaggacatccccactggctccgcccctgctgcccagcatcggcttccacaaccaccagtgggcaaaggtggagctggggccagctcctctctgtcccctctgcaggctgagctgctcccgcctctcttggagcacctgctgctgcccccacagcctccccacccttcactgagttacgaacctgccttgctgcagccctacctgttccaccagtttggctcccgtgatggctccagggtctcagagggctccccagggatggtcagtgtcggccccctgcccaaggctgaagcccctgccctcttcagcagaactgcctccaagggcatatttggggaccaccctggccactcctacggggaccttccagggccttcacctgcccagctttttcaagactctgggctgctctatctggcccaggagttgccagcacccagcagggccagggtgccaaggctgccagagcaagggagcagcagccgggcagaggactccccagagggctatgagaaggaaggactaggggatcgtggagagaagcctgcttccccagctgtgcagccagatgcggctctgcagaggctggccgctgtgctggcgggctatggggtagagctgcgtcagctgacccctgagcagctctccacactcctgaccctgctgcagctactgcccaagggtgcaggaagaaatccgggaggggttgtaaatgttggagctgatatcaagaaaacaatggaggggccggtggagggcagagacacagcagagcttccagcccgcacatcccccatgcctggacaccccactgccagccctacctccagtgaagtccagcaggtgccaagccctgtctcctctgagcctcccaaagctgccagaccccctgtgacacctgtcctgctagagaagaaaagcccactgggccagagccagcccacggtggcaggacagccctcagcccgcccagcagcagaggaatatggctacatcgtcactgatcagaagcccctgagcctggctgcaggagtgaagctgctggagatcctggctgagcatgtgcacatgtcctcaggcagcttcatcaacatcagtgtggtgggaccagccctcaccttccgcatccggcacaatgagcagaacctgtctttggctgatgtgacccaacaagcagggctggtgaagtctgaactggaagcacagacagggctccaaatcttgcagacaggagtgggacagagggaggaggcagctgcagtccttccccaaactgcgcacagcacctcacccatgcgctcagtgctgctcactctggtggccctggcaggtgtggctgggctgctggtggctctggctgtggctctgtgtgtgcggcagcatgcgcggcagcaagacaaggagcgcctggcagccctggggcctgagggggcccatggtgacactacctttgagtaccaggacctgtgccgccagcacatggccacgaagtccttgttcaaccgggcagagggtccaccggagccttcacgggtgagcagtgtgtcctcccagttcagcgacgcagcccaggccagccccagctcccacagcagcaccccgtcctggtgcgaggagccggcccaagccaacatggacatctccacgggacacatgattctggcatacatggaggatcacctgcggaaccgggaccgccttgccaaggagtggcaggccctctgtgcctaccaagcagagccaaacacctgtgccaccgcgcagggggagggcaacatcaaaaagaaccggcatcctgacttcctgccctatgaccatgcccgcataaaactgaaggtggagagcagcccttctcggagcgattacatcaacgccagccccattattgagcatgaccctcggatgccagcctacatagccacgcagggcccgctgtcccataccatcgcagacttctggcagatggtgtgggagagcggctgcaccgtcatcgtcatgctgaccccgctggtggaggatggtgtcaagcagtgtgaccgctactggccagatgagggtgcctccctctaccacgtatatgaggtgaacctggtgtcggagcacatctggtgcgaggactttctggtgcggagcttctacctgaagaacgtgcagacccaggagacgcgcacgctcacgcagttccacttcctcagctggccggcagagggcacaccggcctccacgcggcccctgctggacttccgcaggaaggtgaacaagtgctaccggggccgctcctgccccatcatcgtgcactgcagtgatggtgcggggaggaccggcacctacatcctcatcgacatggtcctgaaccgcatggcaaaaggagtgaaggagattgacatcgctgccaccctggagcatgtccgtgaccagcggcctggccttgtccgctctaaggaccagtttgaatttgccctgacagccgtggcggaggaagtgaatgccatcctcaaggccctgccccagtgagaccctggggccccttggcgggcagcccagcctctgtccctctttgcctgtgtgagcatctctgtgtacccactcctcactgccccaccagccacctcttgggcatgctcagcccttcctagaagagtcaggaagggaaagccagaaggggcacgcctgcccagcctcgcatgccagagcctggggcatcccagagcccagggcatcccatgggggtgctgcagccaggaggagaggaaaggacatgggtagcaattctacccagagccttctcctgcctacattccctggcctggctctcctgtagctctcctggggttctgggagttccctgaacatctgtgtgtgtccccctatgctccagtatggaagaatggggtggagggtcgccacacccggctccccctgcttctcagccccgggcctgcctctgactcacacttgggcgctctgccctccctggcctcacgcccagcctcctcccaccaccctcccaccatgcgctgctcaacctctctccttctggcgcaagagaacatttctagaaaaaactacttttgtaccagtgtgaataaagttagtgtgttgtctgtgcagctgcaa

SEQ ID NO: 5756 - DNA, 2168 bp, Homo sapiens; identical to SEQ ID NO: 404

SEQ ID NO: 5757 - DNA, 4460 bp, Homo sapiens
gacgtcggcggttgccgtggagagacccgctcggtcccgaccgagagctggcgtcaggagccgcagggtcacagcgtgtctttgaagctgcctccgccgccaccatgagcggccgaagtcggggtcgaaagtcctcccgcgccaaaaaccggggcaaaggccgcgccaaagcccgagtccgccctgctccggacgacgccccgcgcgacccggacccttcacagtaccagagtctcggggaagacacccaggcggcacaggtgcaggctggcgcggggtggggtggcctggaagccgctgcgtccgcgcagctcctccggctcggggaggaggccgcctgccggctccccctggactgtggcctcgcgctgcgggcccgagctgcgggggaccacgggcaggccgcggccaggcccggcccggggaaggccgcatctctctcggagcgcctggccgcagacactgtcttcgtgggaacagcgggaaccgtgggaaggccgaaaaatgccccccgcgttggaaaccggcgtggccctgccgggaagaaggccccagaaacctgtagcaccgcggggagggggcctcaggtcatagctggtgggaggcagaagaaaggggcggcaggggagaatacctcggtgtcagctggggaggaaaagaaggaagagagggatgcagggtcggggcccccagcgacggaaggcagcatggatacgctggagaacgtgcagctgaagctggagaacatgaacgcccaggcggacagggcctaccttcggctctccaggaagtttgggcagttgcgactgcagcacttggagcgcaggaaccacctcatccaaaatatcccgggcttctgggggcaagcatttcagaaccatccccagctagcatcctttctgaatagccaagagaaagaggtactgagctacttaaacagcttggaagtggaagagctcggccttgccagattgggctacaaaatcaagttctacttcgatcgcaacccgtatttccaaaataaggtgctcatcaaggaatatgggtgtggtccttctggccaggtggtgtctcgttctactccaatccagtggctcccagggcatgatctccagtccctaagccagggaaacccagaaaacaaccgtagtttctttgggtggttttcaaaccacagctccattgagtctgacaagattgtggagataatcaacgaagaattgtggcccaatcccttgcagttctaccttttgagtgaaggggctcgtgtagagaaaggaaaggaaaaagaaggcaggcaaggtccaggaaagcagccaatggagactactcagcctggggtgagccaatccaactgatcctgcacaagtctccctgctacctcctgctgggctgctcctggttgactacatatttggctctctgccttctcttcatgttggcctctgtgtactatagaccctttggactttagttacaagaatatggcatttatgatcatgttcttttgcctcccatagcctcttgcttttctacgttagtgtcacatgttatgtgatcgcacccggactgttcatatgttaagcacacatactttagatgtgtgctccctgttatctacattgcctggaccttgttcttggctctggcctttcctacttgtctttaacatggacactcatgagtcatcctccaggacgaccagtgcatcctcaagctctgctccttcagggccagtgacttgctgggcttcgtgttcatgctggccatgcatgtcatctatgcaagcgtttccattgccactgcagaatgaagccagtgcacatggtattagtcatcagccagaacttcctgttctgtgggtctggggtcaccagctgagatgtcacctgctttatttctggctttggcctgtggtctgtgatacccatcctgcttgatgttctgcagaatggcacttgactgctgggcatgcatgaagttaagggcaagaaacagtatgccatgtgttctgtaccatcatgtgtctcttcttgcttctgggcccttctactggtgaactttcatcaagatctgcgccatgccgtgtcactatcaagccattaagttttgtctgggttgctgtcagccccagttggcttcctggtcaacaaggacctcaagaactgcctgtggaccgaggccccctaccagtgcatgagacacacacctaccctccccagctttccaggaaccctactggctgccagactgatgggcgggctggtatgtgtggacatgtgttcactgtcattatgctgtggctccaggtgagggtgaggactgggcctatatagaatccagataccattgtcaacttcccttattcccgtctaagatgtgagcagagtgccatagtaggggttctgggaagaggtatttctgatttgtgggcctctgcttgcttgacttcaggtcacttatacttcttattttgcttgcctgccttcatccctcatttcctccctctcattcttctttcctccctccctttcctggtagcctcctttcctcctcttctgccttccccttccttctttccttattcttttttattttgtttaaatagtaccacagagaaaacaactgaaaaaccacatttttctacatacagctggggaggtagctgagaacttggcactgcgcacacatactaggttgaaagagagttgaggaaaccagaaggccaagtggatctgctggcaaaccctgaacctgtctcctgcgcttgctctacagttctgaagttgaaaatccttttcatgcctagcatctgcttgagttataaaccccaaggcagccatgtcatagactagtgtttactcttgttttgactttgttttaatgcttcctaagacccaagtgcctcctgctgtttcctcctttgtggtagcctctggccatctggacctcaatccccagctttcccactttcagcagtcctttgctctctttgcttctacctcaaatagccccaggagtgggctttagtctccaatatggagcatctcaagcttctcctgggggatggggattgggatgggcagaatctgttttggatctccgggttatttccagtgggtgtaaaagcagagctgggcctttccctctcttatccctgagggtgggtaagaaggactgtatctacacctgttcttccctaccttctcttttgttagggaggcctcattctaagttcctcaagagagtccttggcttaaagctgtagcaagggtgtgctaggtgggggatttggagcaaaaccgtcgagtaggcatgatactggtatggagtgggcctgcaaaatcagacagaaatggcttgagaagccgcagggggagcatgcctgtctctcagtgatagagtatgggagggacctccctagcttggaaaatgagaattgaaggggttatgaacaaataggatgcctagttgaggatgttcccaaagttttgtccaatcttatcattagtagattttataagccacagagacaaaccagaaacggaataatgttactttggatgctttatttttttgttctaggtgtggctttgtacatgcagaagaatgctatatgctgcacattttgcctttaaagtcttacgactttccccattttagtctaatgggaagatacagatgtgcaagtctgcttttttgttttttgttattatttttttttttttgctctgtgttatggacattttcagacatgcacagaagtggagaggatggtccttggaccccatgtgtccatcacctagctgcatcacttatcagctatggtcaacctggtttcatctgtatctctctcttttcacctgtattgtttattgaaaatccaagacactatgccaatgcaaccgtgactactttgggagattggtagtctcttttgatggtgatagtgatggggtgcactatcataatcacatcaggtctgctttttgcttttaatgttaactaatgaagttccagagatgggccttagaaatgtgttttaagaattaacaaggagtctcaaaaagaaatgagagggatgcttcctttcccttgcatctacaaaacaagagagagactgttctgttgtaaaactctttcaaaaattctgatatggtaaggtacttgagacccttcaccagaatgtcaatctttttttctgtgtaacatggaaacttgtgtgaccattagcattgttatcagcttgtactggtctcataactctggttttggaagaataatttggaaattgttgctgtgttctgtgaaaataacctccccaaaataattagtaactggttgttctacttggtaatttgacaccctgttaataacgcaattatttctgtgttcttaaacagtataaatagttgtaagtttgcatgcatgatggaaaaataaaaacctgtatctctgtt

SEQ ID NO: 5758 - DNA, 11723 bp, Homo sapiens
acttggctaaggcgaaccgccccagacgcgtccgcgcgccggcagctgcaggctcaggccatctccagtcttcctgccgcgcccgcctctcctcctgggattctcctcctcctcctggacttccccgcagctgcccacgcctcggcggccgccaggtgctcctggagtgcagcgcctatcgccggggcgtgtgggggccacaccgagcaccagcttctccgacgccgggaagccgctgtcgccgccgctacctctccctgttgccgccgcctcagatctcttcatgccgctgtaagctcggaggccaaggatgcggagtaggcttcccccagcgcttgccgccctgggcgcggccctgctcctgtcttccattgaggcagaagttgacccaccttcagacttgaattttaaaattatagatgaaaatactgttcatatgtcatgggcaaaaccagttgatccaattgtgggttacagaataacggtggaccctacaacggatgggcctactaaagaatttaccctttcagctagtaccactgaaactttattgtcagaacttgtacctgaaacagagtatgtggtgacaataacttcatatgatgaagtagaagaaagtgtaccagttataggacaactaacaattcaaacaggtagttcgacaaagccagtggagaagaaacctggaaaaaccgagatacaaaaatgctctgtcagtgcctggactgatttggttttcctcgtggatggctcttggagtgtgggaagaaataatttcaagtacattttagacttcattgctgctcttgtgtctgcttttgacattggggaagagaagacaagagttggagttgttcaatacagctctgataccaggactgaatttaacttaaatcagtactaccaaagggatgaacttcttgctgcaataaaaaaaattccatataaaggtggcaacacaatgacaggggatgccattgattatttagttaaaaatactttcacggaatctgctggggcaagagttggctttcctaaagtggcaattattattacggatggaaaatcccaggatgaagtggaaattccagcaagagagcttcgtaatgttggagttgaagttttctccttgggcattaaagctgcagatgcaaaagaactcaaacaaattgcctccacaccttcactgaaccatgttttcaatgtggccaactttgatgcaattgtggatattcagaatgagatcatctcccaggtgtgctcaggtgttgatgaacaacttggtgaattggttagtggagaagaagttgttgagcctccttcaaatttgattgccatggaagtctcttcaaaatatgttaagctaaattggaatccatctcctagtccagtgactggctacaaagtcatcctcacaccaatgactgcaggaagccgacagcacgctctgagtgtggggcctcagacaaccacgctcagtgttcgcgacctctcagcagacacagaataccagatcagtgtttccgccatgaagggaatgacatccagtgaacccatttcaataatggagaagactcagccaatgaaagttcaagtggaatgctcacgtggtgtggatataaaagccgatattgtgtttttggttgatggctcctatagcattgggattgcaaactttgttaaagttagagcctttttggaagttcttgtaaaaagttttgaaatttcaccaaatagggtccagattagtcttgtgcaatacagccgggatcctcatactgagttcactttgaaaaaattcaccaaagttgaagatataattgaagcaataaacaccttcccttacagaggaggatctacaaatactggcaaagcaatgacttatgtcagagagaaaatatttgtgcctagcaagggatcaagaagcaatgtgccaaaggtcatgattcttatcacggatgggaaatcatcagatgctttcagagatcctgcgataaaactgaggaattcagatgttgaaatctttgcagttggtgtgaaggatgccgttcgctcagaattggaagctattgcctctcctcctgcagagacccatgtgttcacagtggaagattttgatgcttttcagaggatatcttttgaactcacacagtctatctgccttagaattgagcaagaattggcagctataaagaagaaagcttacgtccctccaaaggatcttagtttttcagaagtgacttcttatggtttcaaaaccaactggtctccagctggagaaaatgttttttcatatcacatcacctacaaggaagcggctggggatgatgaggtcactgtggtggagccagcatcgagcaccagtgttgttctcagcagcctgaagccagagaccttgtatttggtcaatgtgactgcggagtatgaggatggcttcagcattcccttagctggagaggagaccaccgaagaagtaaaaggagcacctcgaaacctaaaggtgacagatgagactacagatagtttcaaaattacttggactcaagctccagggagagttttaagatatcgaattatatatagaccagttgctggtggagagagcagagaagttaccaccccacccaatcagaggaggagaacactggagaacttgattccagacacgaaatatgaagtatctgtaattcctgaatatttctcaggacctggtactccattaactggaaatgcagccactgaagaagttagagggaatccaagagacttaagagtttctgaccctacgacgtctactatgaaattatcttggagtggggcaccaggaaaagtgaaacagtatctcgtcacatataccccagtggcagggggtgaaactcaagaggtcactgtgaggggagatacaaccaatacggtgctgcagggattgaaggaagggacacaatacgccttatctgtgacagccttgtatgcgtctggggctggagacgccctctttggtgaaggaacaacacttgaagaacgtggttctcctcaagatttagttactaaagacatcactgacacatcaattggggcttattggacatctgctccaggaatggttcgcggttacagggtctcatggaaatcactttatgatgatgttgacactggagagaaaaatctgcctgaagatgcaattcatacgatgatagaaaatctgcagccagagaccaaatacagaatttcagtatttgccacttacagcagtggagaaggagaacctttgactggagatgccacaactgaattatctcaagattccaaaaccctgaaagtagatgaagaaacagaaaacacaatgagagttacatggaaaccagcaccagggaaagtcgtcaactaccgtgttgtctatcgccctcatgggagagggaagcaaatggttgctaaggtgccccccacagtcacttcgacagtgttaaagcgacttcagccacagaccacatatgacatcacagttcttcctatttacaagatgggagaaggaaagcttaggcaaggatcaggaacaacagcttctcggtttaagtctcctagaaacctcaaaacatctgacccaaccatgtcaagcttccgagtgacttgggagcctgcccctggggaagtgaagggttataaagtcacattccaccctacgggggatgacagaagactgggggagttagtggttggaccctatgacaacacagttgttttggaggaacttagggctggtaccacctataaagtaaatgtttttggaatgtttgatggaggagaaagctcaccacttgttggacaagaaatgacaaccctttccgacacaactgttatgccaattttatcttctgggatggagtgtctcaccagagctgaggcagacattgtgttgctggtggatggatcatggagcatcggccgggcaaattttagaaccgtgaggagtttcatttctcgtattgtggaagtctttgacattggccccaaaagagtacaaattgctcttgctcagtatagtggggatcccagaacagagtggcagttaaatgcacacagagacaagaagagcttgttgcaagctgtggcaaacttgccgtacaaaggaggcaatactctcacaggcatggctttgaatttcattcgccaacagaacttcaggacccaagctggcatgagacctcgagctcgaaaaattggtgtgctcattactgatggaaaatcacaagacgatgttgaagcaccttcaaagaaactcaaggatgagggagtggagctgtttgctattggtattaaaaatgctgatgaagtcgaattaaagatgattgcaactgatcctgatgatacccatgcatacaatgtggcagattttgagtcactctccaggatagtggatgatctcaccattaatttgtgtaacagtgtcaaaggtccaggtgatttggaagcaccttctaacttagttatttctgagcgaacccatcgttcttttagagtgagctggacaccaccttctgacagtgtggatcgatataaggtggaatactatccagtttctggagggaaacgtcaagaattttatgtgagtcgaatggaaactagcacagtgctgaaagatctgaaacctgaaactgaatatgttgtcaatgtgtattctgtggtagaagatgaatatagtgagcctctgaaggggacagaaaaaaccttgccagtgcctgtagtcagcctgaatatttatgatgttggccctaccaccatgcatgtgcagtggcagcctgtgggaggagctactggctacatcttgtcatacaaacctgttaaggacacagagccaacaagacccaaagaggtgcgtttggggccaacagtgaatgacatgcagctgactgaccttgttcccaacacggagtatgcagtcacagtccaggctgtcctgcacgacctcactagtgaacctgtcactgttcgggaagtcaccttgcctttacccagacctcaggatctgaaactcagagatgtgactcacagcactatgaatgtcttttgggaacctgtgcctggaaaagtgcgtaaatatattgttcgatacaaaacaccagaagaggatgtcaaagaggtagaggtggacagatcagagaccagcacttccctcaaagacctcttctcacagaccttgtacacagtcagcgtttctgcagtacatgacgagggggagtctcctccagtgactgctcaagaaactacccgacccgtgccagccccaacaaacttaaagattactgaagtaacatcagagggtttcagagggacttgggatcatggagcttcagatgtgtctctctacagaataacttgggcaccttttggaagctcagataagatggagaccatcttaaatggagatgaaaacactttggtgttcgaaaacctgaaccccaacaccatctatgaagtttccattactgccatctatcctgatgagtcagaaagtgatgacctgattggcagtgagcgcacactgcctatcttaacaacacaagctcccaaaagtggcccacgaaaccttcaagtgtacaatgcaacatctaacagcctgactgttaagtgggatcctgctagtggtcgtgtgcagaaatataggatcacttatcagccttccacaggggaaggcaatgagcaaacgaccacaataggaggacggcagaacagtgtggtcctgcagaaactgaagccagacactccttacactatcaccgtatcctctctgtatcctgatggtgaaggaggtcggatgacgggaagaggcaagaccaaacctctaaacactgtaaggaacctgagagtgtatgacccttctaccagcaccttgaatgtccgctgggaccatgcagagggaaatcctcgtcagtacaagctcttctatgcaccagcagcaggtggtccagaggaactggtaccaatccccgggaataccaattatgccattcttaggaatctgcagccagatacctcatacactgtgactgtagttcccgtttatactgaaggtgatgggggacgcacatcagatactggaaggacattgatgagaggactggcaagaaatgtccaagtatacaatcctacacctaacagcctcgatgttcgctgggaccctgctccaggacctgtgctgcaatatcgcgttgtgtattctcctgtggatggcacaagaccctcagaatctatagtagtgccaggaaacacgcgcatggtgcatctggagcggctgattccggacacactctattccgtgaaccttgtggctctgtactcggatggagagggaaatcccagccctgcccagggccgaacgctaccacgcagtggaccaaggaacctgagagtctttggtgaaacaaccaatagcctctcggtagcctgggatcatgctgatgggccagttcagcagtacaggatcatctattctcccactgttggtgatccaattgatgaatataccacagtcccaggcagaagaaacaatgtaatactgcagcccctgcaacctgacactccatataaaattactgttattgctgtttatgaagatggagatggtggccatctaacaggaaatggaagaactgtgggactccttcctcctcagaacatacacatctctgacgaatggtatacaagattcagggtgtcctgggatccttcaccttctccagttcttggatataaaatagtatataagccagtgggttccaatgagcccatggaagcctttgttggagaaatgacatcatataccttacacaatctcaatcccagcaccacctacgatgtgaatgtttatgctcaatatgattctggactcagtgtccccttgacagatcaaggcactacattatatttaaatgtaacagatctgaaaacttaccagattgggtgggatacattctgtgtcaaatggtcacctcaccgggcagccacctcctacaggctaaaactaagccctgcagatggaacaaggggacaagaaattacagtgcgtggatcagaaaccagtcactgcttcactggcctttcaccagacactgattatggtgtcactgtttttgtgcagacaccaaatctcgagggaccaggagtctctgttaaagaacataccactgtgaaaccaacagaagcccctacagagccacccacacctcctccccctcccaccattccaccagcccgggatgtatgcaaaggggccaaggcagatattgtgttcttgactgatgcctcctggagcattggggacgataattttaacaaagttgtaaaattcatcttcaatactgtgggaggctttgatgaaatcagtcctgctgggattcaggtttcatttgtgcaatacagcgatgaggtcaagtctgagttcaagctgaacacgtacaatgacaaggccctagcccttggggccctccagaatattaggtacagaggaggaaacacaagaacaggcaaggccctcacgtttatcaaggagaaagtcttgacttgggagagcggcatgaggaagaatgtccctaaggtgttggttgtggtcacggacggtcggtcccaggatgaggtcaagaaggcggctttggtcatccagcagtcagggttcagtgtctttgtagttggtgtggctgatgtcgactacaatgagcttgccaacattgccagcaaaccaagtgaacggcacgtgttcattgtggacgactttgaatcttttgagaagatcgaagacaatcttattacatttgtttgtgaaactgccacttcaagttgtcctctcatttatttggatggctacacctcaccaggttttaaaatgcttgaagcatacaacctgacagaaaagaattttgcttctgtacaaggagtatctttggagtcagggtctttccccagctactcagcatacaggattcagaagaatgcgtttgtgaatcagcctacagcagacctacacccaaatggactccctccttcatacacgattatattattattcagacttctcccagaaactcccagtgacccttttgcaatttggcaaatcacagacagagactacaaaccacaagttggagtgattgcagatccttctagcaagacgttatcattctttaacaaggatacaagaggcgaggtgcaaactgttacatttgacacagaagaagtaaagacattattttatggaagttttcacaaggttcatattgtagtgacctcaaaaagtgttaagatttacattgactgctatgaaattatagaaaaagacatcaaggaagctggaaatataacaactgatggttatgaaattcttggaaaactccttaaaggggaaaggaaatcagccgcattccaaatccagagttttgacattgtctgcagtccagtgtggaccagtagagacagatgctgtgatattccctctaggagagatgagggaaaatgccctgcttttccaaattcttgcacatgtacacaggacagcgttggacctccaggacctccaggccctgcaggaggacctggtgctaaaggtcccagaggtgaaagaggtatcagtggggcaattgggccccctggtcctcgtggagacataggtcctccaggcccccagggtcctccaggccctcagggacccaatggactctctattccgggagagcaaggtcgccaagggatgaaaggtgatgctggagagccaggacttccaggccgaacaggaaccccaggattacctggcccaccaggaccaatgggacctccaggagacagaggcttcactggaaaagacggtgcaatgggacccaggggcccaccagggccgccgggaagcccaggctccccaggagtcacaggaccaagtgggaagccaggaaaacctggagatcatggcagaccaggtccatctgggttgaaaggagaaaaaggtgataggggagacattgcttcccagaacatgatgcgagcagttgcaagacaagtctgtgaacaattgataagtggtcagatgaacagattcaatcagatgctgaatcagattccaaatgattaccagtccagtcgcaaccagccaggcccgccgggtccaccgggacctcctggtagcgcaggagccagaggagaacctgggcctggggggcggccaggcttcccgggcacaccagggatgcagggaccccctggggaacgaggtttgccaggagagaaaggtgaaaggggtactggatcttcaggacctcgggggctgcctggccccccaggtccacaaggagaatccagaacaggtccaccagggtccacaggttcaagaggtccccctggcccccctggccgtcctggaaactcaggtatccgaggacccccaggtcctcctggatactgtgattcttctcagtgtgccagcatcccatacaacgggcaaggctatccaggttccggctaacacattttctaagtcgccagtgctgcttacagtttgaatacatgaaaatcctgtttctgagatgtttgcgcacgtgcttattaggaaatgagtctgtatggaaatctcaccacagataatggttaacgaaccgggtcgacatcacaaaggagggtggagactctttttactaacttgaatgagacaaaagcagtggtgtcagtttataatcctgatgcatttcagtaataatgtagaaaaacattattttaaaaaagttccaacacacagccatgaggagcctcagttttgaaagaggtgcataataaaactactaaccagaggagtctatgccattttaagaaaaacaattaacctggttaaagagaaatgtcttatgtaaataataaactaattgtggcttgtaaatgatttgtatgtgatcctgtcgactaaaatcacttaacaattctacaataagcttctgcatcaaagcctgccgcttgctctatgccggaataacaccaaatggaatctcctcatctcttgcttgttagcgatgtgtctgattcagggcatctgtctttttgttacttttttgtccgtgtcctctcatttgggttttgtaactgcaattttcaaaccaaagtttaaaatcaccttttcttcctgttttgctgtagtcactggtgttcctcacccaccagctgtaactcagtttgtgtgaggtacagccacagaagatgtcatgtactgtatattacctggtgatagttgcttttcaccccccgagttcagtttctaggagccaatgaaacttcccctcacctcctcatctttccaagttgttctttgaattgaggagtttgaaggcataaacagttacttggggatttgcgaaaatcctacttagttactgcgtttacagttctttggcccagtctctgacccttcccaagtatttgtgcaatgattgtgtttactgctggatttttgaaggtttttttttttaagaaagtgccatttcattatttgattatcaccaaattatctggaaataattgggacattgtaacttatctatttatagttatgagattaagactggagtgccatcaccgcgggtgatgatttagcttttgctgtgtgtgtgtgtgtgtgccttccaaatcatgccataattgtaatgttgaatcggacagagccttacgtgcccgagggcggggcctacctgcctgagcgcgagcccttcatcgtgccggtggagcccgagcggacagcggaatacgaggactacggcgcagacgagcctgcagaggagcctcctgagccccaccggcgctggcggcgcgccctgccccacggacccgggcagtgaaccagagatcacgcgccgcgccgcgaggcttgggggaggtgttgaaattctcatttacaggtcagatagagcagtgtacgtcttttctgaggtgtttcttccagcgttgctcatccaggagtaccctttctgattgtagagaaccttgtttctgcaggaagcctagctccaagcacgcagtctgtagacatttttgcctttgcccttgaaatgcttgcaaaatactttgttaacaaaagctgcaaagagagaacatgccgtgtgcctttagttagcacagcgggcagcctcagtgaaactcttaggttaagcagttaagtcctggaacccagagctgctgtgtatttcgagcgggcagtttatcttttgctatacttattttcaattcaattacaccacgattcaaataattcccctcctaaaaccaaaaaggagggaaacgtcaactccattgcaattacttatcttcctcttctatctctgttatacgccggggcatagaatgctcgtatacatctctttaacaaccacaaaccttaagccatgtagatgaagttagtgcatcaacgggatacagttccatattgccttaaacctccttgttttagacacactaacatttataccaaattgcagattattctgcagagagggaattgcatgtttgtgttgtatatttagtatgaacttttttcagaatataatatttcttagttatcaaaagtagttggaaaacatttgcaagactatgaacatagaattgctgcttttatattttaactgcagattgtgaatttcactgccttatattatttatttctgaaacaaaagaggcatttttcaataaaactactgaaaatttga

SEQ ID NO: 5759 - DNA, 3276 bp, Homo sapiens
ccggcaccgacaagtgcgctgcaccagtggcaccggctgggggcgagccgacctcgagcagccgccgccgccgccgtcgttgctactgccgcagcggagttcagagggcccggaggtgggagacttcccacacggtgactgagatgtcgtccactgcggctttttaccttctctctacgctaggaggatacttggtgacctcattcttgttgcttaaatacccgaccttgctgcaccagagaaagaagcagcgattcctcagtaaacacatctctcaccgcggaggtgctggagaaaatttggagaatacaatggcagcctttcagcatgcggttaaaatcggaactgatatgctagaattggactgccatatcacaaaagatgaacaagttgtagtgtcacatgatgagaatctaaagagagcaactggggtcaatgtaaacatctctgatctcaaatactgtgagctcccaccttaccttggcaaactggatgtctcatttcaaagagcatgccagtgtgaaggaaaagataaccgaattccattactgaaggaagtttttgaggcctttcctaacactcccattaacatcgatatcaaagtcaacaacaatgtgctgattaagaaggtttcagagttggtgaagcggtataatcgagaacacttaacagtgtggggtaatgccaattatgaaattgtagaaaagtgctacaaagagaattcagatattcctatactcttcagtctacaacgtgtcctgctcattcttggccttttcttcactggcctcttgccctttgtgcccattcgagaacagttttttgaaatcccaatgccttctattatactgaagctaaaagaaccacacaccatgtccagaagtcaaaagtttctcatctggctttctgatctcttactaatgaggaaagctttgtttgaccacctaactgctcgaggcattcaagtgtatatttgggtattaaatgaagaacaagaatacaaaagagcttttgatttgggagcaactggggtgatgacagactatccaacaaagcttagggattttttacataacttttcagcatagaaaaagaggtacttagaagtattgaaggaaaaaatgaagacctaagaaaaaaatatttcatgatcatttccctaagccatttccagaatggtaaaaggtttaatcagtttttattacctcatttttaagcctgtatgagaatgtagaaactatatattatatgtatatttattttaaataatattgtatattttatgtttgtaaattgtttagaaagataattggttatgagatgtaagttttaatttcttaatgtgcatttttgtttctagatcttatacagaaatcttgattaataacatacacagaaatgtacatactacatcatctacagaaatcttgatcaataacctagaaactaggttatctaggttattgatcaagatttctgtagatgatgcagtgttctatcataagtaattctggaatcaaagactattggatacatttggcattgggctgagtgtggtggctcatgcctgtaatcccagcactttgggaggctgagacaggcggatcatctgaagtcaggagttaaagaccagcctggccaacatggcaaaaccccatctctaccaaaaatacaaaaattaaccatgcgtggtggtacacgtctgtcatcccagcagctcttaaggctgaggcacaagaattgcttgaacccgggaggcagaggctgtagtgagccaagatagcaccactgcactccagcctgggagacagagtgagactccgtctcaaaaaaaaaaaaaaaaaaaaaaaatgggaggccgaggcgggcggatcacgaggtcaggagatcgagaccatcctggctaacatggtgaaaccccgtctctactaaaaatacaaaaaattagctgggcgtggtggtgggcaccttagtcccagctactcgggaggctgagtcaggagaatggcgtgaacccgggaggcggagcttgcagtgagccgagatcgcgccactgcactccagcctgggctacagagcaagactccgtctcaaaaaaagaaaaaaagaaaaaaaattggcaatagtcttcactggaatacaatcaattagtaaaagattttttttttttttttgacatgtagtcttgctctgtcgccgaggccggagtgcagtggtgcgatcttggctcactgcaacctctgcctcccaggttccagcaattctcctgcctctgcctcccgagtacctgggattacaggtgcctgctaccatgcccagctaatttttgtatttttagtagagacagggttttgccacgttggccagactggtctcgaactcctgacctcaggtgatccacccacctcggcctctcaaagtgctgggattacaggtttgaaccactgcacccggccagtaaaagaaattttgaaggccattgcagctatttggtagtgtcttgttatttctaggtgtaccttagttaaagaggaaaaataaaacggaaaaaagcttggaaatcagtgatgtgtagttatttggcaagttatacataatcagcagcagccaggctcaagaaaataaaagttgattagttgatcagaaataaaatctgtagagtgaattagatttctgagttgttgttgttaatggaacattctatttgagacctttttcaggtgtgtagcaattctaccatgtccatttttttaagcattaaaaaggaacttaccagttgtaaattaagacaagatccaaatagtcatatttttgtgtttcctctaaaaaaatgtaagatttccatttttggcactgactaactgagcctacatctagattttaaataccatcttgaatcctaataattaaactgatgaaagtgcatatcattgttcctaacatttatgaacccccataaagatgttcctgatctttaaaactcattaatctgagtattaagtagaaacagaattttccaaagcattagacatcactttctcagtttatctgaggtgacttcgtgtacatctgtttctaatatatttgactaattttcatgatctcagattgtgaggtaaatgtaatctggaataataagtgtcttttacctagattacatctctcatttggagtttggcaatgaaactgctatgaagaatgactgtactctcctatctgtccctggatgacataaatatcatttgctttgttgtttaaactgaaataaagttttcc

SEQ ID NO: 5760 - DNA, 3189 bp, Homo sapiens
cggcctcaccttttcctgcccgaagcagaagattctcgcagtcctggtttctccctccagaagaccccccacccaaatcctctgtagctcctggtagtgccctgacccctgctgccaccgtccttcagagagcaacggaagagcttcccggagggcgaggaaaagagggaaagtagccagcaatgtcgaacgcaatgtataataagatgtggcatcagacccaagaagccctcggtgctttactcgataaagagcctcagaagatgattgaaccacaaagaaatcaggttttcatctttcaaacattagccaccttctacgtaaagtatgtgcagatctttagaaacctagagaatgtctacgaccagttcgtccacccccagaaacgaatactgatcaggaaagtcctggacggggtgatgggccgcatcctggagctgaagaacgagatggtggagctggaactcacggagttccattatttcgatgatatcctgcaggatctcaagctggccccccaacaattagatattcccatacccaagtattttttgaaggagaagttggaagtaataaaaggaagagagaaaattcttgctcaaatattagcggacagcggaatagatacatctgacatgaaataccctgtaaagagtatccctttcgatgaggctgttaaattaatccagattgctgagagggcacggcaaggtcgcctaagggctttattcatgaagcaaatctatctgcaagaatatagagcaaagcaatccaagatgcttggcaagaaagtgacagatacctgggctgctgcactccgcattcagaaggtttggcgacgtttccatcaacgtaaggaaactgaaaaactgagagaagaggagatgatcttcctgggtatgaatccacctcctctctttaatgaagtcagtgctacagtaatccaggctgaaaaggtggaccgcctgcggaatgaggtgcagataaagcatgaagaggactacagggaagccctggttaccatcaagaatgacctaaagttgatagaaggcgtggatatcaaggagaaccttcaagaccagatccggcattggttcatcgaatgcagaaatttaaccgggacatttcctgactaccctgacgttgaagaaggagggtcagctattattttttctgacaagaccatacaacaggttattgaggatatcatagcaaaccaagaggaagaagaaaaaaacaaaaagaagaagaagaaaaaggaaaaacaacccaagaaagccaaaaaacaaaagaaaggaacaaaggagaaaaataaggaagaagacgaaaaatggaaaatgtcaccaagtctttttcttcctgcaatgaaggaaggatgtaacgcatacaaagaaatctggatgaaaaaagatgagtcttggaatttctctcaggactatgatccagaactgatcaaagaggagaaacgaaaagaattacagtcagagatcaggatacaggttgatgagttgatgagacaggaacttaaaaacttaaagctagctgtggacagagaaagggagcgcccagtgaaagcaggaaagaaaaaggacaagaagaaaggaaagaaaggcaaaaagaaagagaagaaggcaaagaaggataaagatctgacagctgacaggaccatcgagtctctgtataaggaactggtggaagaaggattactgatccaggctctgaaagtcaacctctctgattacattggtgagtacagctacctggggactactcttcgccaggtgtccatagaacccatgccctccctcctggatgtcagacagctcatcacattgtacggaatctggccattaggttctgcagcagtgcatgagaaagctcctttggtgaaatcgctactgttagccgggccgtctggggtagggaagaaaatgctggtccatgccatctgcaccgaaacgggagccaacctcttcaacttgtcctcctctaacattgctgggaaataccctggcaaaaatggcctccaaatgatgctgcatgcagtcttcaaggtggctcgacagctccagccctccgtggtgtggattgaagacacagaaaaaaccttctacaaaaaagttcccaacgcagaaaagatgaatgaacctaaacgcctgaaaaaacaccttccccaaatcctgaaactcctgaaaccagatgaccggattctgattgtggggaccacacggcgtcccttcgatgctgaactccaatctttctgcaaagtttaccagaaaattattttggtgcccagaccagactatgcttccagatacgttctgtggaagcaaatcattgaacgcaatggaggagtcctcaccagtgccttgaatgtcagctgcctggcgaaggtcactgacggcttcacccaaggacatatagtcgaagtggttaaaggcgtgctcacagatcagagaatccggcggcaaattcataaacctctcactgcagttgagtttattacggcgataaccagcatgaatccagtgtacaaagaggaagaagagagctttaagaactggtatgccaaaactcctctgggtaaaaaacgtgccttggcgataacaggaggcagcacagaaaaggcaaaggacaaagggaaaaggaaataaaagaaagagaaaaaggcaaaaaagaaaaagtaatgcctttctgaagaaccatgcttgagtctctctgggatggagaggaccccaactcgccaaagaaaagattcaccattgcccgcctgaagaagccctcaggggaaggaacttagcagtgtgcaggtgagctgatgccgcaaacccgctaaccactgcatgtgctgttatgcctttcccaggctggacacctagctgggtgttcatcataactttccacagctttaatccacgccaagtttgtatataactgaaattcactcttgacaccctccacagtctttccaagttggactcttcctctcatcagtactagttgtcaaatttaaaatgtgacagttaaagaatattctagtttgacaattagtaagcaatgagtatatcatcagtacactagctttttattaatccatgtacactgtatagtatcttgcatctattttaataaattaattctttgctctagtaatagattttatataatgaaataaaggtgttgtccttg

SEQ ID NO: 5761 - DNA, 2345 bp, Homo sapiens
tttaaatggttcaattgatggcattcgccacatgtttacccctaagcttgaaataatgctggagcccaaggtctggagagaagctgctactcaagtgttctttgccttaggtctgggatttggtggtgtcattgccttttcaagctacaacaagagagacaacaactgccactttgatgctgtcctggtgtccttcatcaattttttcacttctgtcctggcaacattggtggtgtttgcagttctgggcttcaaagcaaatgtcataaatgagaaatgcattacacaaaattcagagacgatcatgaaatttttgaaaatggggaacattagtcaggatattattccccatcatatcaacctttcaactgttactgcagaagattatcatttagtttatgacatcattcaaaaagtgaaagaagaagagtttcctgctcttcatctcaattcctgtaaaattgaagaagagctaaataaagctgttcaggggaccggcttagcttttattgcctttacagaagcgatgacacattttcctgcatctcccttctggtcagtgatgtttttcctcatgctggtcaatctaggccttggcagtatgtttggaaccattgaagggattgtcacgcctattgtggacactttcaaagtgaggaaagaaattcttactgttatctgttgtcttctggcattttgtattggcctgatattgtgcaacgctctggaaattactttgttacaatgtttgatgattattctgctacactgcctctgctaattgtagtcattttggagaatattgctgtatgctttgtttatggcatagataagtttatggaagacctaaaagatatgctgggctttgctcccagcagatattactactatatgtggaaatatatttctcctctaatgctattatcattgctaatagctagtgttgtgaatatgggattaagtcctcctggctataacgcatggattgaagataaggcatctgaagaatttctgagctatccaacatggggactggttgtttgtgtctctctggttgtctttgcaatactcccagtccctgtagttttcattgttcgtcgcttcaaccttatagatgatagttctggtaatttagcatctgtgacctataagagaggaagggtcctgaaagagcctgtgaacttagagggcgatgatacaagcctcattcacggaaaaataccgagcgagatgccatctccaaattttggtaaaaatatttatcgaaaacagagtggatccccaactctggatactgctcccaatggacggtatggaatagggtacttgatggcagatattatgccagatatgccagaatctgatttgtagctgggggaaaagtcagtgggttttatttggttcatttttaccaatgaacattggccctagtaggagaagcattaggcttcacttatcagagggcaatctcaggtgttccgtggctgtgatctttaatcctaacagtatatgtcagttcaacttgagcattcttttggattctttggtttacatttgtgcagaaaggattgcagacaaatcttaggagggctgaggtacatgtttgccaggatttttttttaagtacctttggtgtattttcaaatatttctatctcttaaaaaaatggtattacctcagtttctaataatttctgggtttagtagtgttgacaattaaaaatggtatacattaaaatttataagtttgccttcagggtaacttccagtgtcacaatgagcagttctgtaagtgggtgcctctcagcacatttctatgaatatattatgtagataggctgtattgattttggtagcattgacaccttcttaggcaattagttgaagaaaactgcaaaatattttcttatgtaatagctgtatagagcaatagcaatcaaagcatgagaaggcactaacgctgggatgaaagatgagattcagaggtgactgagaatcatgtgagtgatggctgtatattttgtgtaaaatatatgtgtgaaaatgaactaagagtgagttactcagcactctcaagaattatgcagattctgcatttttcttatgccgtgtgcctaaaaacctacttgatatttattgtggtttcaagattattcatagtatatttatacaatatacttgcaatgcatttaagtacttaaagtactaatttgaaaacttgaagcaagatggcattttaattaatatatttctgttttgcttctgttttatgcaaatataaatcatttttaagtgattgttaaaattgtaatgcattacattttaatctacaaataaacaaagttt

SEQ ID NO: 5762 - DNA, 4710 bp, Homo sapiens; identical to SEQ ID NO: 2938

SEQ ID NO: 5763 - DNA, 5819 bp, Homo sapiens
acatgcgcgaggatgcgaactccccttccctcctcctccgccccctccgcctcccgggcctcttcctcctgccggtgagggagtgcttggcagattgcgcgagggggagcgagcgagcgggcgctgccaggagcccgcagccctggcgcccgccgccgcccggagccccgcaatatgccgccgcggccctctggctctaggccatggcgaggctctgccggcgtgtcccctgcaccctgcttctcggcctggccgtggtgctgctgaaagcgcggctggtccccgcggccgccagagcggaactcagccgctccgacctcagcctcatccaacagcagcagcagcagcagcaacaacaacaacaacagcaaaagcagctggaggaggctgaggaggagaggacagaggtgcctggggcaacctccaccttgacggttccagtgtctgtatttatgttgaaagtccaggtgaatgacatcatcagtcgtcagtacctgagccaagcagttgtagaagtgtttgtaaactacacgaagacaaattccacagtaactaaaagcaatggagcagtgctgataaaagtaccctacaaattaggacttagtttaactattattgcttacaaagatggctacgtgttgacccctctgccttggaaaaccagaagaatgccaatatattcatcagttacactttcactgttcccgcaaagccaagcaaatatatggctatttgaagacactgttttaattactggaaaattagctgatgccaagtctcaaccaagtgttcagttttcaaaagccttaattaaacttcctgacaaccatcatattagcaacgttactggctatcttacagttctacaacagtttttgaaagtggacaattttctgcatacaactggaattactctcaataaaccaggttttgaaaacattgaattgactcctcttgctgcaatatgtgtgaaaatatattctggaggaaaagaactaaaggtcaatggctctattcaagtttctcttcctcttctacgtctgaatgatataagtgcaggggatcgcatacctgcttggacatttgatatgaacacaggtgcttgggtaaatcatggtcggggaatggtcaaggaacataacaatcatttaatctggacatatgatgcaccacatttggggtactggatagcagctccacttccaggaactagaggttcaggtataaatgaagattccaaggacataactgcctaccacacagtgtttcttacagccatattaggaggaacaatagtcattgtcattggattttttgctgtactactttgttattgcagggacaagtgtggtactccacagaaaagagaaagaaatatcactaaacttgaggtcctcaagagagaccagacaacttcaacaacacacataaatcatatcagtacagttaaagttgcattaaaagctgaggacaagtcgcagttattcaatgccaaaaactcctcatatagtcctcagaaaaaggaaccatcaaaggcagaaacagaagaaagagtttccatggtaaaaactcgggacgattttaaaatctacaatgaagatgtttcatttctatcagtcaatcaaaataattactcaagaaacccaacacagtctttggagcccaatgtagggtccaaacaacctaaacatattaacaacaatctatcttcatctctaggtgatgctcaagatgaaaagaggtatctcacaggtaatgaggaggcgtatgggcgttcccatattcctgaacagcttatgcatatttacagccaacccattgccatccttcaaacatctgaccttttctccacaccggaacaattacatactgctaagtcagctactttgccaagaaagggacagttagtctatggccaattgatggaaccagtaaatcgagagaactttacgcagaccttgcccaaaatgccaattcattctcatgcacagcccccagatgccagggaagaggatatcatacttgaaggtcaacagagcctgccatcccaggcttcagattggagccgatactcaagcagcttactggaatccgtctctgttcctggaacactaaatgaggctgttgtaatgactccattttcatcggaacttcaaggaatttcagaacagaccctcctggagctgtccaaaggaaagccctccccgcatcccagagcctggtttgtgtctcttgatggaaagccagttgcacaagtgaggcactcctttatagacctgaaaaagggcaagagaacccagagcaatgacaccagtctggactctggggtggacatgaatgagcttcactcaagtagaaagctcgagagggagaaaacattcatcaaaagcatgcatcagcccaagatcctttacttagaagatttagacctaagcagcagtgagagtggaaccaccgtctgttcccctgaggacccagctttaaggcacatcctagatggagggagtggagtgatcatggagcaccctggagaagagtcgccaggaaggaaaagcactgttgaagattttgaagctaatacatcccccactaaaagaaggggcagaccaccactagccaaaagagatagcaagactaacatctggaagaagcgagaggaacgcccactgattcccataaattaactccaatggggattgtgtgtctgctgtctcgtgctgtttattcttgcttcttgttgtaaattgcagtacgaacttaagaaaatgagactgagcaatctcatggttcttggacatgtctcaagcagagtaaatggtaattcagtaatcagagagaaagataccaaggaatgctttttctggcctattcatttatttttgggtgatgaatttacagtatctaagttttcaaaatgtaaaatagcttcaagatgttagttatctgaaaatgttgctcagccagccagtttggccttgactctcttaagaataacagtgaaatatatactcctcaagttgcctccaaaaatgttgcctctaccatggtgactaccccatggaacatttagaaacaaaactgacttcaggcatcatattattttaaatgttactattacgtcttcttctgcctatacttaaaaataacttgataaatgacttggactgatgttactctggagttatcacaaagaaaatgttgtttggtctttaaagagcatgtgtattgtatcatcccaaacgtaaatcctacatttatataagatgggcaagaagctacttggtcattagagagggagacaccagctctttggttgtttttggatataactttacaaaataagtaagatgttaatttagaaatttgagaaattaatgctctaatactgagtttttatttaaaaattattttttcttcccctcaacaatgaagcaagcttagctgtcaagggaaactttttacaaatctgaaaaaaacaatctatgactttggtttaaggctcactgatacttttaggctaaattggttttaatatatttcttctattctaaaaacctgaactcagtcacttaaaggctatgaaatttaaaaaaaaagtcgatgtgaaagtttcttttgaacactaaaataaaatatgtgcagataaaatatacattgatttgtttttcttaaatgttgatgagaagaaaaagagatgccattttcctgaggctcaaaaataccttcaggatagttgtatatccagttattgattttcttaaaagatgtgtaaggaaaacagtttcaatttcaggggaaaagtaaaagtttttccctaagtcacttaaagcctttgcaacttcttttttcagttttgtaagtaatatatctatgttcttttcattatagcaagcattcaatgtgaacaactttttaattaactctgaattaccattcatacatcctaaaaataaaagctcgttattcattaaaatcaactgatcccatttttcttaaaatttccctgaaggcaaatgtctgaagcacctttcccttgtgggggtaaaaatcctaaattgctttatttttcattccctcctattcaacatgggagcagcatagagacccaaaccatgtaaacaagttcagtgaaccaaaacagccacattagcttcagtaaaattatagctagatgtgcaattttttcctccaacttctaacgtgtcaaataaccttcctactgttctgtgttaactgaaagaacataaagaccctaggcaaatatttgctatatattaccccaatccatagaagaaataatgttttgggtaatacctaggcttcctttttttttttttttttttttttttagtgataaggctcataacaattaattagagaaggcttcttattggtcttacacagaaagatacatcaaaagcagcatgactcaaaatgatttggaaaaggttaaagttagtgctctgctgaagtgcctttgatatagacttgcattattagaaggatataacatcttttttaagtgtgcattttctttcagttaaccaaattaaacagatgtgcagttttattaaaaatatagacctagtgtttcatgttggaacaataaatattgcatgtgagtagtatttcttgttttttgaatacagtatatattgataaattgtttatgttggaatgaagttagaaactatatagcaaaacattatattttaagtgtttatttttcccacctttaaataaaaatgtttcatctcagcttggtaatgaaatacacatattggtataagggtataccattcaggtatgccacttattttattcatttttgtgtaagggaaatgagatgatgtatcccaagggcttttctagaactacttgtttgctttcagaataaaaccttattattttttacactgcacatgctgttctcaattggtaattataggcaatttatcttttctaatgatcaaaagagtgtgacttctcatttgtgagtagttcacaaatttcctgttaaaaagctgaaaccatctactttttcttaacccaagtgataataaacaatattcacaactttcttaaatttttaaattgaaaaccaaggttttttcaaatataaacctagatgattttggtcacaaattgttaacatttgtcgatcctttgtatatactttggatatatattaaaggcaaaactatctcttgactaactgatggattcatttactaaagcacagctgtatgtatttttgaatacatattatgatcttgagactttataaatcaatttttatgactttatgcagttgtatagggattatgccctttcagttctatagggattatgcccttttataatacataatataccacagagattacaaatgttgaggaatgaaagcacttctttgctttggcaatcattttcagaccactatgtgtttgaatcctctggtatcaatacgtattatagggttttagagatctgtgggtcaaatgatgtccctcaaaacttcctaaaaaggtgaagctcaaagtcacacattcttataaggcgcatgagtttctcattttcccatgtacgagcattgtaaaggaattcagctgtattaatttctatttcagatctagaattgacattttgccttcttgtttccaggtgtttctattttttgtattctttcagagaaatctcatatttcggtgtatttattgctgttactactatatttactgctgaaaactgtaacaacctgaagatttgtaaaatgttaaacatagttcattaaaaataataaaataaatctaaaatgt

SEQ ID NO: 5764 - DNA, 1959 bp, Homo sapiens
gtagatttgaggtgcagccttggagggagggattagaagccgctagactttttttcctcccctctcagtagcacggagtccgaattaattggatttcattcactggggaggaacaaaaactatctgggcagcttcattgagagagattcattgacactaagagccagcggctgcagctgggtgcagagagaacctccggctttacttctgtctcgtctgccccaaccgctagcctcggcttgggtaaggcgaggcggaattaaaccccgctccgagagcggcagcttcgcgcgcggtgcgctcggcctatgcctgccccgaggggcgtctggtaggcaccccgccctctcccgcagctcgacccccatgatagatacgctcagacccgtgcccttcgcgtcggaaatggcgatcagcaagacggtggcgtggctcaacgagcagctggagctgggcaacgagcggctgctgctgatggactgccggccgcaggagctatacgagtcgtcgcacatcgagtcggccatcaacgtggccatcccgggcatcatgctgcggcgcctgcagaagggtaacctgccggtgcgcgcgctcttcacgcgcggcgaggaccgggaccgcttcacccggcgctgtggcaccgacacagtggtgctctacgacgagagcagcagcgactggaacgagaatacgggcggcgagtcggtgctcgggctgctgctcaagaagctcaaggacgagggctgccgggcgttctacctggaagatgaagcccggggcaagaactgtggtgtcttggtacattgcttggctggcattagccgctcagtcactgtgactgtggcttaccttatgcagaagctcaatctgtcgatgaacgacgcctatgacattgtcaaaatgaaaaaatccaacatatcccctaacttcaacttcatgggtcagctgctggacttcgagaggacgctgggactcagcagcccatgtgacaacagggttccagcacagcagctgtattttaccaccccttccaaccagaatgtataccaggtggactctctgcaatctacgtgaaagaccccacacccctccttgctggaatgtgtctggcccttcagcagtttctcttggcagcatcagctgggctgctttctttgtgtgtggccccaggtgtcaaaatgacaccagctgtctgtactagacaaggttaccaagtgcggaattggttaatactaacagagagatttgctccattctctttggaataacaggacatgctgtatagatacaggcagtaggtttgctctgtacccatgtgtacagcctacccatgcagggactgggattcgaggacttccaggcgcatagggtagaaccaaatgatagggtaggagcatgtgttctttagggccttgtaaggctgtttccttttgcatctggaactgactatataattgtcttcaatgaagactaattcaattttgcatatagaggagccaaagagagatttcagctctgtatttgtggtatcagtttggaaaaaaaaatctgatactccatttgattattgtaaatatttgatcttgaatcacttgacagtgtttgtttgaattgtgtttgttttttcctttgatgggcttaaaagaaattatccaaagggagaaagagcagtatgccacttcttaaaacagaacaaaacaaaaaaagaaaattgtgctcttttctaatccaaagggtatatttgcagcatgcttgactttaccaattctgatgacatctttacggacactattatcactaagaccttgttatggcgaagtctttagtctttttcatgtattttcctcatgattttttctctttatgtagtttgactatgccttacctttgtaaatatttttgcttgtgttgtcgcaaaggggataatctgggaaagacaccaaatcatgggctcacttt

SEQ ID NO: 5765 - DNA, 6651 bp, Homo sapiens
atgtgggggcttttgatctggacactgctagctctgcatcagatccgcgcggccagagcccaagatgatgtgtccccgtatttcaagacagagcctgtgcggacacaggtgcacttggaaggaaaccgcctggtgcttacatgcatggccgagggcagctggccactggagttcaagtggctccacaacaacagggagctgaccaagttctccctggaatacagatacatgatcaccagcctggaccgcacccacgctggcttttaccgttgcatcgtgcggaaccgaatgggggccctgctgcagcggcaaaccgaggtccaggtggcctacatggggagctttgaggaaggtgagaagcaccagagcgtctcccacggagaagcagctgtcatccgtgccccgcgcatcgccagcttcccccagccacaggtgacctggttccgggacggccgcaagatcccgcccagcagccgcatagccatcacgctggagaacacccttgtcatcctgtcaacggtggcccctgacgcaggtcgctactatgtgcaggctgttaacgacaaaaacggggataacaagaccagccagcccatcacgctcaccgtggagaatgtaggggggcctgcagaccccatcgcacccaccatcatcatcccacctaaaaacaccagcgtggtggccggcacctcagaggttaccttggagtgtgtggccaatgccaggcccctgatcaagctacatatcatttggaagaaggacggggtattgctgtcgggcggcatcagtgaccacaaccgccggctcaccatccccaaccccaccggcagtgacgccggctactacgagtgtgaggctgtcctgcgcagcagcagcgtcccctctgttgtccggggcgcctacctctcagtgctggaaccgcctcagtttgtcaaggagccagaaagacacatcactgcggagatggagaaggtggtggacatcccctgtcaggccaaaggtgtgccgccgccctccatcacctggtacaaggacgcagccgtggtggaggtggagaagttgacccgcttccggcagcgcaacgacgggggcctgcagatcagcggcctggtgcccgatgataccggcatgttccagtgcttcgcccgcaatgcagccggcgaggtgcaaacttccacctacctggctgtcaccagcatcgcccctaacatcaccagaggccccctggacagcacggtgatcgatggcatgtcagtggtgctagcatgtgagacctcgggggcgccccgaccagctatcacttggcagaaaggggagcgcatcttggccagtggctctgtgcagctgcctcgcttcacacccctggagtcgggcagcctcctcatcagccccacacacatctccgatgcggggacctacacctgcctggccaccaactctcggggggtcgatgaggcctcagcagacctagtcgtttgggctcggacccgcatcaccaagcccccccaggatcagagtgtcatcaagggcacccaggcctccatggtgtgcggagtgacccacgacccccgagtaaccatcaggtacatctgggagaaggacggggccaccctgggcacggagagccatcctcgtatccgcctggacagaaacggctccctgcacatctcacagacgtggtcgggagacatcggcacgtacacctgccgggtgatctcagcaggaggcaacgactctcgcagtgcccacctgcgagtcaggcaactgccccacgcgcccgagcacccagtggccactctcagcaccgtggaaaggcgagccatcaacctgacgtggaccaagccctttgatggcaacagccccctgatccgctacattctggagatgtcggagaacaatgccccctggactgtactcctggccagtgtggaccccaaagctacctcagtgacagtcaagggcctggttcctgcacgctcctaccagttccgtctttgtgccgtcaacgacgtggggaaaggacagttcagcaaagacaccgagagggtctccctccccgaggagccccccacggcccctccacagaacgtcatcgccagcggtcgaaccaaccagtccatcatgatccagtggcagccgcctcctgagagccaccagaatggaattctcaagggttacatcatcaggtactgcctggccgggctgcccgtggggtaccagtttaagaacatcacggatgctgatgtgaacaacctgctgctggaggatctcatcatttggaccaactacgagatcgaggtggctgcttacaacagcgctgggctgggggtctacagcagtaaagtcaccgagtggacgctgcagggagttcccacggtccctccgggcaatgtgcacgcggaagccaccaattccacgaccatccgcttcacctggaacgcccccagcccccagttcatcaacggcatcaaccagggctacaagctgatcgcctgggagccggaacaggaagaggaggttaccatggtgaccgcccggcctaactttcaagacagcatccacgtgggcttcgtgtctggcctgaagaagttcaccgagtacttcacctcagtgctgtgtttcaccacccccggggacgggccacgcagcaccccgcagctggtgcgcacccatgaggatgtgcctgggcccgtgggacacctgagcttcagtgagatcctggacacatcgctgaaggtcagctggcaagagccgggagagaaaaatggcatcctcacagggtaccggatctcctgggaggagtacaatcgaaccaacacccgtgtgacccactacctgcccaacgtgaccctggagtaccgtgtcacgggcctcaccgcgctcaccacctacaccatcgaggtggccgccatgacctcaaagggccagggccaagtgtccgcctccaccatctcctctggggtgcccccagaactcccagggccccccaccaacctgggcatttccaacatcggcccccgctctgtgaccttgcagttcaggccaggctacgatgggaaaacctccatctcccgctggctggtggaagcccaggtaggcgtggttggggagggagaggagtggttgctgatccaccagctctccaatgagcccgatgcccgctccatggaggtgcccgacctcaaccccttcacctgctacagcttccgcatgcgccaggtgaacatcgtgggcaccagcccccccagtcagccttctagaaagatccagaccctgcaggcaccccctgacatggccccagccaatgtgtctctgcgcacagccagtgagaccagcctgtggctgcgctggatgcctctcccggagatggaatacaatgggaaccctgagtccgtgggctataagatcaagtacagccggtcagacgggcatggcaagacgctgagccacgtggtgcaggaccgtgtggagcgggactacaccatcgaggacctggaggagtggacagagtaccgcgtccaggtccaggccttcaacgccatcgggagcgggccctggagccagacggtggtgggcaggacccgggagtcagttccctcttccggccccaccaatgtgtctgcactggccaccacctccagcagcatgctggtgcgctggagcgaggtccccgaggctgatcgcaacgggctcgtgctgggctataaggtgatgtataaggagaaggactcggacacccagccccgattctggctggtggaaggcaactcgtctcgcagtgcccagctcaccggcttgggcaaatacgtgctctatgaagtccaggtgctggccttcacacgcatcggggacggcagccccagccaccctcccatcctggagcggacgctggatgatgtcccaggaccacccatgggcatcctgttcccagaggtgcggaccacgtctgtgcggctgatctggcagccccctgccgcccccaatggcatcattcttgcttaccagatcacacaccggctcaacaccaccacggccaacaccgccactgtggaggtgctggcacccagcgcccggcagtacacagccacgggcctcaagccagagtctgtctacctgttccgcatcacggcccagacccgcaagggctggggagaagctgccgaggccttggtggtgaccaccgagaagagagaccgtccgcagccccccagcaggccgatggtgcagcaggaggatgtgagagcacgcagcgtgctgctgtcctgggagccagggagcgacgggctctcccctgtgcgctactacaccatccagacccgcgagctgcccagcggcaggtgggcactgcactcggcctccgtgagccacaatgcctccagcttcattgtggacaggctgaagcccttcacgtcctacaagttccgagtgaaggcgaccaatgacattggcgacagcgagttcagcgaggagtcggagtcactgaccaccctgcaggctgcccccgatgaagcacccaccatcctctccgtgacgccccacaccaccacctccgtgctaatccgatggcagccgccagcagaggacaagatcaatggcatcctcctgggcttccggatccgataccgggagctgctctatgaaggactgaggggcttcacgcttcgaggcatcaacaacccaggggccacatgggctgagcttacctccatgtactccatgcggaacctgagccggcccagcctcacgcagtacgagctggacaacctgaacaagcacaggcggtacgagatacggatgagcgtgtacaacgctgtgggtgaggggccctccagccccccgcaggaggtctttgttggggaggcagtgcccacagcagcacctcgtaacgtggtcgtccacggcgccacggccacacagctggacgtgacttgggagccacctccgctggacagccagaatggagacatccaggggtacaagatttatttctgggaagcccagcgggggaacctcacagagcgagtgaagacgcttttcctggctgagaacagcgtgaagctcaagaacttgactggctacacggcctacatggtcagcgtggccgccttcaacgccgctggggatgggcctcggagcacccccacccaaggccagacccagcaagcagcccccagcgctcccagctcggtcaagttcagtgagctgaccacaacctcagtgaatgtgtcctgggaagccccgcagttccccaatggcatcctggagggctacaggctggtgtacgagccctgcagccccgtggatggagtcagcaagatcgtgaccgtggacgtgaaggggaacagccccctgtggctgaaggtgaaggacctggcggagggggtgacctacaggttccgcatcagagccaagaccttcacctacgggccggagatcgaagccaacgtcaccacgggccccggagaaggtgccccaggaccgcctggcgtgcccatcatcgtgcggtacagctctgccatcgccattcactggtccagcggagacccgggcaaagggcccatcacccgctacgtcatcgaggccagaccttcagacgagggactatgggacatcctcatcaaagacatccccaaggaggtgagctcctacacgttcagcatggacatcctgaagccgggcgtgagctatgacttccgggtcatcgcggtcaacgactatggtttcggcacccccagcagcccctcccagtctgtgccagcccagaaagccaaccccttctatgaggagtggtggttcttggtggtcattgccctggtcggcctcatcttcatcctgcttctggtcttcgtgctcatcatccggggccagagcaagaagtacgccaagaagacagactcggggaacagtgccaagtctggagccctaggccacagcgagatgatgagcttggatgaaagcagcttccctgccctggaactcaacaacaggcggctctccgtcaagaactctttctgccgaaagaacggcctgtacaccaggtctccccccaggcccagcccaggcagcctgcactactcggatgaggatgtcaccaaatacaacgacctcatccctgcagagagcagcagcctgacggagaagccctcagaaatctccgactctcagggaagtgacagcgagtacgaggtcgactcaaaccaccagaaggcccactcctttgtcaaccactacatcagtgaccccacatactacaactcgtggcggcgacagcagaagggcatctcgagggcacaggcctacagctacacggagagcgactcgggtgagccagaccacaccaccgtcaccaacagcaccagcacccagcagggcagcctctttcggcccaaggccagtcggactccaacgccccagaacccccctaaccccccaagtcagcagagcaccctctaccgtccccccagcaaagccggcgttcagaaggagggagaaaaccgtgagaggatgtgtgtggccagcagctcttcagctttgagatggtggggttcactgctcccttgggaattacacggagctggggaagtggctgtgtcactgctatggacacggagtggggcgggcatctggagagagagagggagcggaggctaa

SEQ ID NO: 5766 - DNA, 4985 bp, Homo sapiens
ctcgatcttttgaacttcatgagactgacatttctgagtctgtttgcgaacaggacactagagggctcccaggggttaaaaataagtggaaatttatttgaatgaaaactgattctctacggcatttcttttttccgaatttaaaattaaagtttattttgttaactattgtttttaaaagctttgtatctcttaaaaccatgcagcagtcagtttccaagttttgctttgcaatcagtagttttcaagggagcttttaaagctgaactgaaatgtttgaaatgtggaacactcttgaccatgaaatatgttctacttacatgcctcagcctttaaaagttctttgcattagagtcaaggattacattcttcctggagccaagcatggggccagctgtaaacaagccgcatttctccttggggagactgataatttaaaaggtttgttgtgtcagaaacattcccagcttcatcaccaaccctttccttccacctctgcccactggagaccacttatatcccgaagcggacgcggcagctgaagtcaggaaaccatgcatcacattagcaggagccaactgcagactttaaactccgttcaacatgtggatgcggcagagaaatgacctgtccagacaagccggggcagctcataaactggttcatctgctccctgtgcgtcccgcgggtgcgtaagctctggagcagccggcgtccaaggacccggagaaaccttctgctgggcactgcgtgtgccatctacttgggcttcctggtgagccaggtggggagggcctctctccagcatggacaggcggctgagaaggggccacatcgcagccgcgacaccgccgagccatccttccctgagatacccctggatggtaccctggcccctccagagtcccagggcaatgggtccactctgcagcccaatgtggtgtacattaccctacgctccaagcgcagcaagccggccaatatccgtggcaccgtgaagcccaagcgcaggaaaaagcatgcagtggcatcggctgccccagggcaggaggctttggtcggaccatcccttcagccgcaggaagcggcaagggaagctgatgctgtagcacctgggtacgctcagggagcaaacctggttaagattggagagcgaccctggaggttggtgcggggtccgggagtgcgagccgggggcccagacttcctgcagcccagctccagggagagcaacattaggatctacagcgagagcgccccctcctggctgagcaaagatgacatccgaagaatgcgactcttggcggacagcgcagtggcagggctccggcctgtgtcctctaggagcggagcccgtttgctggtgctggaggggggcgcacctggcgctgtgctccgctgtggccctagcccctgtgggcttctcaagcagcccttggacatgagtgaggtgtttgccttccacctagacaggatcctggggctcaacaggaccctgccgtctgtgagcaggaaagcagagttcatccaagatggccgcccatgccccatcattctttgggatgcatctttatcttcagcaagtaatgacacccattcttctgttaagctcacctggggaacttatcagcagttgctgaaacagaaatgctggcagaatggccgagtacccaagcctgaatcgggttgtactgaaatacatcatcatgagtggtccaagatggcactctttgattttttgttacagatttataatcgcttagatacaaattgctgtggattcagacctcgcaaggaagatgcctgtgtacagaatggattgaggccaaaatgtgatgaccaaggttctgcggctctagcacacattatccagcgaaagcatgacccaaggcatttggtttttatagacaacaagggtttctttgacaggagtgaagataacttaaacttcaaattgttagaaggcatcaaagagtttccagcttctgcagtttctgttttgaagagccagcacttacggcagaaacttcttcagtctctgtttcttgataaagtgtattgggaaagtcaaggaggtagacaaggaattgaaaagcttatcgatgtaatagaacacagagccaaaattcttatcacctatatcaatgcacacggggtcaaagtattacctatgaatgaatgacaaaagaatcttctggctagggtgttagatatatttatgcatttttggttttgtttttaaatcaagcacatcaacctcaagcccgtttagcaatgaggcagtgtagatgaatacgtaaaataaatgactttaaccaagtagctataatgggacttagcactgtatgcatacttaaaaaggttttgaaaaacaaactacttgagaaatatttgtttatatttttctctaacatcatgctatgtgtcagtctgaacatctgacaacagaaatttcagttattattctagctaagttttgaaaacatttgtcatgctgtttaatagaaaactgcaaaccagagacactgactccattaataaaccatattttgtgccgttttgactgttctgaccaaatactaatgggaacaattcttgacgtttttctgttgctgattgttaacatagagcagtctctacactaccctgaggcaactctacattggaacactgaggcttacagcctgcaagagcatcagagctgaccatacatttaaacagaaatgctggtttatttgcaaaatcaccagtatattttctattgtgtctataaaaaatcagtcatttaagtacaagaatcatattttccattcctttttagaaatttattttgttgtccctatggaaatcattcacatctgacaatttatatgttaaagagttttactctctctattttggtccaatttgtatctagtggctgagaaattaaataattctaaagtatgaagttacctatctgaaaatgtacttacagagtatcattttaaaatggatgtctctttaaaaattttgttacttttaccaacaatgtaatataatttatgtatattttattaataatagtgaattccttaaaatttgttctatgtacttatatttaatttgatttaatggttactgcccagatattgagaattggttcaaatattgagtgtgtttcaatatattatctggcttatttcaacatgagtaatatgagcaaaataagttaaaacctgcgtctgatcaattttcctcatgactagaactaaaacagtaaatttggacaatattaagcctcaaataatcatctccaaactccttctaacactttttaaatcagattggaagacatggacaaatcaggttcatgtgttgcatctttatgtcctttgccaatatccaagatcatcacatatggtagatattcacatggagtttcaaattcagaatagattaccattaccttcctgcccttacacatcctactccttatttaaaagttctatttgtgacttttcatttcctgaaagtttaaaaatacaatttgagaatgtttataatacattctctcctgtcttttcacggttacgtctgttattgctgaaatacaccacattttctttgttctggtcaaggttaactcaatatctgtgtgaaagagaactactaacaacgttacaatagaggctagatttgaaaaaaaaaatctatagatctaattgatacaattgtagaacaaaatgtcaaaataatgttttaagtataagagaagatggaccaaggagagagagatcatttgaaaatctaattgtagcttttctaggctcacattcatgtactacttttagcacccttatgggctgtgctcgccccctggacagttgagctttggattatcttcctcttcaattttccctctattgacccgagtgtctccctctgcttctacagatttatagtactccttggctcttttgagtctccacttttactcactgtctctgggatttttaagatccttttcttctcttataaatcatcctcttaatgaaaattagcctaacaaaagtttggagactggaatcctactttgagccactgacttgaaataactcttttggcaagttgcctgacatcctgtcttaccaaggtggcatatttgcatttttactgcttaaaacatttttttttttttaccatctttatccaaatttatcatattgatggtaggactaacaggctttttagaagctggctttaactttgagtctcaagctacaatgctgttgggcagcctggtcttcccacgtgagggtttaactttgtttatttgcctccagttattccaaaatgcttattaaatgaaagtcccaggaacatgtttattttagtcacctttgctttttaacaattttgttttgtaatcaatgagtaattcatgatgaattatttttgactaatggatagccgaaggccaggcttttaattctaataggtaatgttcttcttttgtcttattgaaacaatgagaatactctgtgcatttcaaatgcactccgattatgctgtggttttattcacataagcacaatatgtgttttatttataacttcataacaaacttataatataataatttaccttagcagacatgcaaaagcttattcttgtgtgacttactttctttaagctaataatataaaaataaatatgtatcttaaaaatctataataaaacattagaaattaaagatatgtgctttttattttgcagatgagttcatttgcttttgtagatgtgttttcagagctaggtacagaggaatgtttgctacctttagcggtgaaaaaagaaagagagtcaagaattttgttggattgtgtttgtgtgtgcatatatttgatatcatcattatatttgtaatctttggacttgtaatcatagcctgtttattctactgtgccattaaatatactttaccttatacataacgaataaaa

SEQ ID NO: 5767 - DNA, 2874 bp, Homo sapiens
ggagttccagtgatcaagtggaagaaagatggcattcatctggccttgggaatggatgaaaggaagcagcaactttcaaatgggtctctgctgatacaaaacatacttcattccagacaccacaagccagatgagggactttaccaatgtgaggcatctttaggagattctggctcaattattagtcggacagcaaaagttgcagtagcaggaccactgaggttcctttcacagacagaatctgtcacagccttcatgggagacacagtgctactcaagtgtgaagtcattggggagcccatgccaacaatccactggcagaagaaccaacaagacctgactccaatcccaggtgactcccgagtggtggtcttgccctctggagcattgcagatcagccgactccaaccgggggacattggaatttaccgatgctcagctcgaaatccagccagctcaagaacaggaaatgaagcagaagtcagaattttatcagatccaggactgcatagacagctgtattttctgcaaagaccatccaatgtagtagccattgaaggaaaagatgctgtcctggaatgttgtgtttctggctatcctccaccaagttttacctggttacgaggcgaggaagtcatccaactcaggtctaaaaagtattctttattgggtggaagcaacttgcttatctccaatgtgacagatgatgacagtggaatgtatacctgtgttgtcacatataaaaatgagaatattagtgcctctgcagagctcacagtcttggttccgccatggtttttaaatcatccttccaacctgtatgcctatgaaagcatggatattgagtttgaatgtacagtctctggaaagcctgtgcccactgtgaattggatgaagaatggagatgtggtcattcctagtgattattttcagatagtgggaggaagcaacttacggatacttggggtggtgaagtcagatgaaggcttttatcaatgtgtggctgaaaatgaggctggaaatgcccagaccagtgcacagctcattgtccctaagcctgctatcccaagctccagtgtcctcccttcggctcccagagatgtggtccctgtcttggtttccagccgatttgtccgtctcagctggcgcccacctgcagaagcgaaagggaacattcaaactttcacggtctttttctccagagaaggtgacaacagggaacgagcattgaatacaacacagcctgggtcccttcagctcactgtgggaaacctgaagccagaagccatgtacacctttcgagttgtggcttacaatgaatggggaccgggagagagttctcaacccatcaaggtggccacacagcctgagttgcaagttccagggccagtagaaaacctgcaagctgtatctacctcacctacctcaattcttattacctgggaaccccctgcctatgcaaacggtccagtccaaggttacagattgttctgcactgaggtgtccacaggaaaagaacagaatatagaggttgatggactatcttataaactggaaggcctgaaaaaattcaccgaatatagtcttcgattcttagcttataatcgctatggtccgggcgtctctactgatgatataacagtggttacactttctgacgtgccaagtgccccgcctcagaacgtctccctggaagtggtcaattcaagaagtatcaaagttagctggctgcctcctccatcaggaacacaaaatggatttattaccggctataaaattcgacacagaaagacgacccgcaggggtgagatggaaacactggagccaaacaacctctggtacctattcacaggactggagaaaggaagtcagtacagtttccaggtgtcagccatgacagtcaatggtactggaccaccttccaactggtatactgcagagactccagagaatgatctagatgaatctcaagttcctgatcaaccaagctctcttcatgtgaggccccagactaactgcatcatcatgagttggactcctcccttgaacccaaacatcgtggtgcgaggttatattatcggttatggcgttgggagcccttacgctgagacagtgcgtgtggacagcaagcagcgatattattccattgagaggttagagtcaagttcccattatgtaatctccctaaaagcttttaacaatgccggagaaggagttcctctttatgaaagtgccaccaccaggtctataaccgtcagaagacacaacatctctaagttacacagcaacaggcctcaaaccaaacacaatgtatgaattctcggtcatggtaacaaaaaacagaaggtccagtacttggagcatgactgcacatgccaccacgtatgaagcagcccccacctctgctcccaaggacttgacagtcattactagggaagggaagcctcgtgccgtcattgtgagttggcagcctcccttggaagccaatgggaaaattactgcttacatcttattttataccttggacaagaacatcccaattgatgactggattatggaaacaatcagtggtgataggcttactcatcaaatcatggatctcaaccttgatactatgtattactttcgaattcaagcacgaaattcaaaaggagtggggccactctctgatcctatcctcttcaggactctgaaagtggaacaccctgacaaaatggctaatgaccaagacactggcgtgacgattaatcttgttaatgaagttctgcttggctgaggctgcggctctgataaggaagatgtaaattttcttgagaggaaattgttttgtctccattctgaaggaccaattaaaatgtcaagcttctttgtatg

SEQ ID NO: 5768 - DNA, 3603 bp, Homo sapiens
atgctgaggatgcggaccgcgggatgggcgcgcggctggtgcttgggctgctgcctcctcctgccgctctcgctcagcctggcggccgccaagcagctcctccggtaccggctggccgaggagggccccgccgacgtccgcatcggcaacgtggcttcagacctgggcatcgtgaccggatcgggtgaggtgactttcagcctggagtccggttccgagtacctgaagatcgacaacctcactggcgagctgagcacgagcgagcggcgcatcgaccgcgagaagctgccccagtgtcagatgatcttcgacgagaacgagtgcttcctggacttcgaggtgtcggtgatcgggccctcgcagagctgggtggacctgtttgagggtcaggtcatcgtgcttgacatcaacgacaacacgcccaccttcccgtcgcccgtgctcacgctcacggtggaggagaatcggccggtgggcacactttacctgctgcccacagccaccgaccgcgacttcggccgcaacggcatcgagcgctacgagctgctccaggagcccggaggcggcggcagcggcggcgagagccggcgcgccggggcggccgacagcgccccctaccccgggggcggcgggaacggcgcgagcggcggcggctcgggaggctccaagcggcggctggacgcatcagagggcggcggcggcaccaaccccggcggccgcagcagcgtgttcgagctgcaggtggcggacaccccggacggcgagaagcagccgcagctgatcgtgaagggcgtgtacgaggccgacttggctgagaacagcgccccggggacccccatcctgcaactgcgcgcagccgacttggacgtgggggtcaacgggcagatcgaatacgtgttcggggcggccaccgagtcggtgaggcggctgctgcgccttgacgagacgtccggctggctcagcgtcctgcaccggatcgaccgcgaggaggtgaaccagctgcgcttcacggtcatggcccgcgaccgcgggcagccccccaagaccgacaaggccaccgtggtccttaacatcaaagacgagaacgacaacgtgccgtccattgaaatccgcaagattgggcgcatccccctcaaggacggggtggccaacgtggccgaggacgttctggtcgacacccccatcgctctggtgcaggtgtccgaccgagaccaaggcgagaacggggtggtcacctgcaccgtggtgggcgacgtgcccttccagctcaagccagccagcgacaccgagggcgaccagaacaagaaaaagtacttcttgcacacctcgacccctctggactatgaggccacccgggagttcaacgtggtcatcgtggcggtggactcaggcagccccagcctctcgagcaacaactccctgattgtcaaggtgggagacaccaacgacaacccgcccatgttcggccagtcggtggtggaggtttacttccctgagaacaacatcccgggcgagagggtggccacggtgctggcgacagacgcagacagcggtaagaacgccgagatcgcctactcgctggactcctctgtgatggggatctttgccatcgatcccgattctggggacatcctggtcaataccgtgctggaccgcgagcagactgacaggtatgagtttaaagttaacgccaaagacaaaggcatccccgtgctgcagggcagcactacggtgattgtgcaggtggctgataaaaatgacaatgaccctaagtttatgcaggacgtcttcaccttttatgtgaaagaaaacttgcagcccaacagccctgtggggatggtcaccgtgatggatgctgacaaggggcggaatgcagagatgagcctgtacatagaggagaacaataacattttttctattgaaaatgacacggggaccatttactccacaatgtcttttgaccgggaacatcagaccacatacactttcagagtcaaggctgtggatgggggagatcctcccagatctgccacagctacagtctcgctttttgtgatggatgaaaatgacaatgctcccacagttacccttcccaaaaacatttcctacactttactgccaccttcgagtaatgtcaggacagtagtagctacagtgttggcaacagacagtgatgatggcatcaatgcagacctgaactacagcattgtgggaggaaatcccttcaagctgtttgaaattgatcccactagtggtgtggtttccttagtgggaaaactcacccaaaagcattatggcttgcacaggttggtggtgcaagtgaatgacagtgggcagccttcccagtccaccacgactctggtgcacgtgtttgtcaatgaaagtgtttctaatgcaactgcgattgactcccagatagctagaagtttgcacatcccactcacccaggatatagctggtgacccaagctatgaaattagcaaacagagactcagtattgtcattggcgtggttgctggcattatgacggtgattctaatcatcttaattgtagtgatggcaaggtactgcaggtccaaaaataaaaatggctatgaagccggcaaaaaagatcacgaagacttttttacaccccaacagcatgacaaatctaaaaagcctaaaaaggacaagaaaaacaaaaaatctaagcagcctctctacagcagcattgtcactgtggaggcttctaagccaaatggacagaggtatgatagtgtcaatgagaagctgtcagacagcccaagcatggggcgatacaggtccgttaatggtgggcccggcagtcctgacctggcaaggcattacaaatctagttccccattgcctactgttcagcttcatccccagtcaccaactgcaggaaaaaaacaccaggccgtacaagatctaccaccagccaacacatttgtgggagcaggagacaacatttcaattggatcagatcactgctctgagtacagctgtcaaaccaataacaagtacagcaaacagccatttcgtagagtgacgttttctgttgtgagtcagcctcaggacccacatcaggggtcactgcagagttgctatgacagcgggctggaggagtcagaaacaccaagcagtaagagttcatcagggccaagactgggtgcgcttccactcccagaggacaactatgaaaggaccacgccggatggcagtgttgattcaaggcctcttccagatgtagccctgactgggaagtgcactcgtgagtgtgatgagtatggccactcagactcctgctggatgccggtccgcacttctccggagaggaagaagagccagcctaaactgtccactttcatgcctgttgatgaacgaggaagccaggaaaagctggccaatggggaggccgccatcatgggtgaccgcaacagaaacctcctgaacaaaaagttgacctcatcctatgagaccttcagtgcagctagtttcagcaaaaatgaggaagccaaccctgaggatattccccttacaaaaacaggggaatataagccatctcctgtcaatactctcactagaagagaagtttacctgtag

SEQ ID NO: 5769 - DNA, 3177 bp, Homo sapiens
tgatgtgatatggctgcaagtgcctttgacccttttgtctcccttccataaactgaaatacctaagctgctccaacctcctttttgtcttttgtttcataaatcctttcccattgcacatcaactcctgtctctctttgtactgtcactctcatctgttgctttccattcacactgcctttagccactcatcattttgtgcctacaccacagaaacctctgaatgtaatggatgttcctaccagaggacaagtcgtacaatggtggaggaataggttcttcaaataggatcatggacttcttggaggagccaatccctggtgtagggacctatgatgatttcaatacaattgattgggtgagagagaagtctcgagaccgggataggcaccgagagattaccaataaaagcaaagagtcaacatgggccttaattcacagtgtgagtgatgctttttccggctggttgttgatgctccttattgggcttttatcaggttcgttagctggtttgatagacatctctgctcattggatgacagacttaaaagaaggtatatgcacagggggattctggtttaaccatgaacattgttgctggaactctgagcatgtcacctttgaagagagagacaaatgtccagagtggaatagttggtcccagcttatcatcagcacagatgagggagcctttgcctacatagtcaattatttcatgtacgtcctctgggctctcctatttgccttccttgccgtatctcttgtcaaggtgtttgcgccttatgcctgtggctctggaatccctgagataaaaactatcttgagtggtttcattattaggggctatttgggtaagtggactctggttatcaaaaccatcaccttggtgctggcagtgtcgtctggcttgagcctgggcaaagagggccctctagtgcacgtggcttgctgctgtgggaacatcctgtgccactgcttcaacaaatacaggaagaatgaagccaagcgcagagaggtcttgtcggctgcagcagcagctggtgtatctgtagcctttggagcacctataggtggagtattattcagccttgaagaggtcagctactattttcccctcaaaacattgtggcgttcattctttgctgccttggtggcagcattcactctacgctccatcaatccatttgggaacagccgcctggtactattttatgtggagtttcacaccccatggcatctctttgagctcgtgccattcattctgctgggcatatttggtggtctgtggggagcactgtttatccgcacaaacattgcctggtgtcggaagcgaaagaccacccagttgggcaagtatcctgttatagaggtactcgtcgtgacagccatcactgccatcctggctttccccaatgaatacactcggatgagcacaagtgagctcatttctgagctgtttaatgactgtggccttctggactcctccaagctctgtgattatgagaaccgtttcaacacaagcaaagggggtgaactgcctgacagaccggctggcgtgggagtctacagtgcaatgtggcagctggctttaacactcatactgaaaattgtcattactatattcacctttggcatgaagatcccttctggcctctttatccctagcatggctgttggtgctatagcaggtcgacttctaggagtaggaatggaacagctggcttattaccaccaggaatggaccgtcttcaatagctggtgtagtcagggagctgattgcatcacccccggcctttatgcaatggttggggctgcagcctgcttaggtggggtgactcggatgactgtttctcttgttgtcataatgtttgaactgactggtggcttagaatacatcgtgcctctgatggctgcagccatgacaagcaagtgggtggcagatgctcttgggcgggagggcatctatgatgcccacatccgtctcaatggatacccctttcttgaagccaaagaagagtttgctcataagaccctggcaatggatgtgatgaaaccccggagaaatgatcctttgttgactgtccttactcaggacagtatgactgtggaagatgtagagaccataatcagtgaaaccacttacagtggcttcccagtggtggtatcccgggagtcccaaagacttgtgggctttgtcctccgaagagatctcattatttcaattgaaaatgctcgaaagaaacaggatggggttgttagcacttccatcatttatttcacggagcattctcctccattgccaccatacactccacccactctaaagcttcggaacatcctcgatctcagccccttcactgtgactgaccttacacccatggagatcgtagtggatattttccgaaagctgggactgcggcagtgcctggttacacacaacgggcgattgcttggaatcattaccaaaaaggatgtgttaaagcatatagcacagatggcgaaccaagatcctgattccattctcttcaactagaatcatagagttctggatgtaaagcgggaaggacattacagaccatggatatgttgtattaactgggtacccaaaacacattttccatatttggatggtgaagtcacattagtgtgttgtctctttcctacaagttaaccagttgcactacataatctctggaaattaattttctctttaggagaaattatagttaggcttccatgatgttacattaggaagatatcatgaaagaataaataagattgctatggtttaattatatttgctttttaaaagatttttttaacttaaaaagtagttagccaatatgcaatcactgaaaactatgcaagagaaattccaaccgtcctgacctataacctgtaggaaaccgacgaaaaagtcactcttttgggatctaactgttgttactggaagacgaagtgtaaactaaggggctttgcttttcaaaccagagaaaggaaagccagaaggaaaagagtaatggtattttctagactgtgaagattcagttcaaatgttatccttgttcctgttacaatatttagcattattagtttgttatgtgtgtatgtttatgttaattttaatttctgattataagacaatgctgctttggttaatctcttctaaatgaattta

SEQ ID NO: 5770 - DNA, 4022 bp, Homo sapiens
aattagtgcctccaaacgccgtgtgtgagctcatcgaagtcatgctctgcacacatattatttatagcagatctgaggcatgcatggtgtttgacatttctgtcttttaagtagggggacttcaaaaagtcgtgggcatccccctaggcaaagtgcagtgggcagggaccaggcagggtgcgggcgcaaggcgaacgcgcagaccacgagtgtcctggcgcaggtgccgggggcggcggctgcaactccgcagcgtccgctcgggaggagagttcgcggctgatctccggatgccttgcagatgcaaaatgtgtctctggccagcaggaggaaggaagaggaagtgagagcagcggcagccggcggtgcagcagccggccgacccagagtgtaagtgcgtgtgctggggcgagcgggagcgggcgaggatgggcacaggatagaggcagagccacccacgccgccgcggccccacgctgggcgacagagcctccagttccccttcaatggtggcgggtcgccggagctctgatcgccgggaacccttgccgctgctgtcctgcgaccccaagcaggtatagacacgtgtggccgtttacgctgtaggatcctcattcccactggctttgaacattttggggacttacaatgccgccacccgcggacatcgtcaaggtggccatagaatggccgggcgcctaccccaaactcatggaaattgatcagaaaaaaccactgtctgcaataataaaggaagtctgtgatgggtggtctcttgccaaccatgaatattttgcactccagcatgccgatagttcaaacttctatatcacagaaaagaaccgcaatgagataaaaaatggcactatccttcgattaaccacatctccagctcagaacgcccagcagctccatgaacgaatccagtcctcgagtatggatgccaagctggaagccctgaaggacttggccagcctctcccgggatgtcacgtttgcccaggagtttataaacctggacggtatctctctcctcacgcagatggtggagagcggcactgagcgataccagaaattgcagaagatcatgaagccttgctttggagacatgctgtccttcaccctgacggccttcgttgagctgatggaccatggcatagtgtcctgggatacattttcggtggcgttcattaagaagatagcaagttttgtgaacaagtcagccatagacatctcgatcctgcagcggtccttggccattttggagtcgatggtgctcaatagccatgacctctaccagaaagtggcgcaggagatcaccatcggccagctcattccacacctgcaagggtcagatcaagaaatccaaacctatactattgcagtgattaatgcgcttttcctgaaggctcctgatgagaggaggcaggagatggcgaatattttggctcagaagcaactgcgttccatcattttaacacatgtcatccgagcccagcgggccatcaacaatgagatggcgcaccagctgtatgttctacaagtgctcacctttaacctcctggaagacaggatgatgaccaaaatggacccccaggaccaggctcagagggacatcatatttgaacttcgaagaattgcttttgatgctgagtctgaacctaacaacagcagtggcagcatggagaaacgcaagtccatgtacacgcgagattataagaagcttgggttcattaatcatgtcaaccctgccatggacttcacgcagactccacctgggatgttggctctggacaacatgctgtactttgccaagcaccaccaagatgcctacatccggattgtgcttgagaacagtagtcgagaagacaagcatgaatgtccctttggccgcagtagtatagagctgaccaagatgctatgtgagatcttgaaagtgggcgagttgcctagtgagacctgcaacgacttccacccgatgttcttcacccacgacagatcctttgaggagtttttctgcatctgtatccagctcctgaacaagacatggaaggaaatgagggcaacttctgaagacttcaacaaggtaatgcaggtggtgaaggagcaggttatgagagcacttacaaccaagcctagctccctggaccagttcaagagcaaactgcagaacctgagctacactgagatcctgaaaatccgccagtccgagaggatgaaccaggaagatttccagtcccgcccgattttggaactaaaggagaagattcagccagaaatcttagagctgatcaaacagcaacgcctgaaccgccttgtggaagggacctgctttaggaaactcaatgcccggcggaggcaagacaagttttggtattgtcggctttcgccaaatcacaaagtcctgcattacggagacttagaagagagtcctcagggagaagtgccccacgattccttgcaggacaaactgccggtggcagatatcaaagccgtggtgacgggaaaggactgccctcatatgaaagagaaaggtgcccttaaacaaaacaaggaggtgcttgaactcgctttctccatcttgtatgactcaaactgccaactgaacttcatcgctcctgacaagcatgagtactgtatctggacggatggactgaatgcgctactcgggaaggacatgatgagcgacctgacgcggaatgacctggacaccctgctcagcatggaaatcaagctccgcctcctggacctggaaaacatccagatccctgacgcacctccgccgattcccaaggagcccagcaactatgacttcgtctatgactgtaactgaagtggccgggcccagacatgccccttccaaaactggaacacctagctaacaggagagaggaatgaaaacacacccacgccttggaaccgtcctttggtaaagggaagctgtgggtccacattcccttcagcatcacctctagccctggcaactttcagcccctagctggcatcttgctcaccgccctgattctgttcctcggctccactgcttcaggtcacttcccatggctgcagtccactggtgggacaagagcaaagcccactgccagtaagaaggccaaagggcccttccatcctagccctctgcaggcatgcccttccttcccttgggcaggaaagccagcagccccagactgcccaaaaacttgcccaccagaccaagggcagtgccccaaggcccctgtctggaggaaatggcctagctatttgatgagaagaccaaaccccacatcctcctttcccctctctctagaatcatctcgcaccaccagttacacttgaattaagatctgcgctcaaatctcctcccacctctctccctgcttttgccttgctctgttcctctttggtcccaagagcagcagccgcagcctcctcgtgatcctccctagcataaatttcccaaacagtccacaggtcccatgcccactttgcgtctgcactgtgatcgtgacaaatcttccctcctcaccagctagtctggggtttcctctccctgccccaggccagaactgccttcttcatttccacccacgctcccagcctcttagctgaaagcacaaatggtgaaatcagtagtctcgctccatctctaatagactaaacctaaatgcctctaggacggactgttgctatccaagcgtttggtgttaccttctcctgggaggtcctgctgcaactcaagttccacaggatggtcaagctgtcagacatccaagtttacatcattgtaattattactggtatttacaatttgcaagagttttgggttagtttttttttttttttttgctttgtttttgtacaaaagagtctaacattttttgccaaacagatatatatttaatgaaaagaagagatacataaatgtgtgaatttccagtttttttttaattattttaatcccaaacatcttcctgaaaataacattcccttaaacatgctgtggaataaaatggattgtgatga

SEQ ID NO: 5771 - DNA, 3883 bp, Homo sapiens; identical to SEQ ID NO: 257

SEQ ID NO: 5772 - DNA, 7538 bp, Homo sapiens
gtaaactctagcggggctagagcaaacattggattagcggcagcagcctgccagcctgcccgaggagtgctgggaccagcgcgctgcacgccgactggcacgatggcctcgtctcaggggaaaaacgagctgaaattagccgactggatggcaactctgccggagagcatgcacagcatccccctcaccaatttagccattccagggtctcatgattccttcagcttctacattgatgaagcctctccagtaggtcctgagcagccagaaactgtccagaattttgtctctgtgtttggaactgtggccaaaaagctcatgcggaaatggttagccactcagacaatgaattttactggccagctaggagctggaattcgttattttgatcttcgaatttccaccaagcccagagaccccgacaatgaactctattttgctcatggtttgttcagtgccaaagtcaatgaaggccttgaggagatcaatgcattcctcacagatcaccataaggaggtagtgttcttggacttcaaccacttttatgggatgcagaaatatcaccatgaaaaactggtccaaatgctgaaagacatctatggaaataaaatgtgcccagcgatttttgcccaggaagttagtttaaagtacctgtgggagaaggactatcaagtgctggtcttctaccatagtccagtggctctggaagtgccctttctctggcctgggcagatgatgccagcaccctgggccaacaccacagaccccgagaaactgatccagtttcttcaagcatccatcactgagagaagaaagaagggatcgttttttatatctcaggtggtgctgacccccaaagctagcactgtggtcaaaggggtggcaagtggcctcagagaaacaatcacagaaagagctcttcctgccatgatgcagtgggtccgcacgcagaagccaggagagagtggcatcaatattgtcactgccgattttgtagaacttggtgactttatcagcactgtcataaagctcaactatgtctttgatgaaggagaagccaacacttgatagcactacttggagtttccatgaataagatggagaaagctcattgtattagggcatactatctgtaaacactctgatcttcctattccactgagtctctgaagggaatagggctggtagtgggtgggaaaaggggaaaaactgtttcttcagtgattacaatcatactcttcattactataaatatttcatttcccatttgatgagcaaaatctacttctagtgttaggaataaaaaaaaaagaccagtaactttgtttttcaaaattagtctttgtaacatagaattcatgagtgtttacttgattaggttctctatttccagcctatgactcctacgctgtctataccctgcaacctttctgctccctctcttgctcgctctttttaatcagatgctgtatgggaatcaaaacaattgaatgcccaacattttgtgtattacattgttgtcttaaaacttactagttttgtgggacttgttataatgctctatagtcatccacagttgggcaatcatagctaatttttggtcatagaaaatctgcatcaaatcagtttccatgcatcagtaatattgaaggtcataatcagtgatttttgttatatgaaaataatagtgtttcacagtatttctatttaaggcagctataaatataggagaaaaatgtttttggagagctgtgaatgccaatttcagagggaaaaatggttgaggggtgaaagagatgtatggcattttaatttggcaatctcttaaataatattgccctgcaagtacccagtaaatggtaaggtacaagtgtgttaaaattgaaaactctgaaaataactctttaaaaagccctcttaatgatgctcttgatgaaagaaaaagacagaaggaaggaagaagaaaaagactgcaagctttcctgccaatttgggattttcaaatatttaattctaaattccagattttaaggaagatttttcaagaaactgcaagtttttgacttgaaggaaagaaagaggaaggctggtagaagcagttagagcaatgtgtttgaaattatgtccatgaaatcacagggatctctgaaatatctttaggaaacttgaaatttatgaggtctgaatggacttgtttaaaattggctctgactcctcacttctgagtttcatcctatccgagggatgagattaaggcagaggcaaaagtttcacacaaagtttctgcaacctaacgtttaatagtccgggtctacagggaagaacaatgacacagcttgagcgttacttcctccttcgtgtcattgtgatatttgacaactctaaaaaataaaaaaaaaaaacttagagcacaataatccttgcctatgtacttcacaggaatattgtgaggtgtttataaaattataaaatttgatgaaattcttacaattattaattattttattttcatgtttagaaataatcacaccccaatagtttcctaggataatacagtccatgcaaagtagggtcatagagaaataaaagcatgccctcagcttttaatgaacttaaatgtagcacatatggcttaatctcttagacttagataagggagttcaattcaaaaccatatatgtcaagaccacaaataatcaagagttgatttcaagattataaatactcatgatcagaaaatagtacttattagcaattaaagggaggaaaagaaattgtttatactgaagagaatgtttatgaggagtgtgtatgtacctgtggtataccaaatagcatacatgtacacacaaaaatgtgtgtatacatttgggttgtgtgtatacatcttgccatatacaatatacaaacatatgcccattcctgtgatagcatacaaattcaaacatacagaaacacacacagatatggacacagtacaattcttcttttcaaatgaagacattgataatattaaataatttaattttaagactgaaacccttaatattgtgtgaaaaagagtaataaaacctttgaaagtagagtagatgatcacatcaaagtatttttgtaaaagaattctagtgtaggacttaattatttttaaaatatatttcttctcttctttccattttcccttcccttgtagttttattatctttctgtcttttacacctgctctttatgtgaaaatgtatatgaatccttttaaaatgattaggattattgaaatgtatgtcccgtaaatttggtttttgggcagactttctctctaactggctattcattcatccttcaggaggatcttagccaagaatatttgcaatgacacatgaatttaattttataaatataatggaaaacagatttttcatcatatcatgaataaaatatagaggtaactatgttgtattttcttgaacctagatactttctcatagtgtttgcttagaattaactttgtcctatttgtcaactgggttctggaaaaaaacaaacatgatgaagcttttgaataattgtgcagttttttaactagggaaagctttgtactgctgctaatgatatgcacccagaaaccttgttagacaaaaggcagtttcaagccaatgctatggtttccatgtggacatacagtgcctatgtagcaggcacttagagtaaatggacttgccttaatttataaaggagggaagaggtagaagggaaccatgggtcctccagctagagggggagtttactaaaagggagtccttggaaaggggaatggagagaaggtgcctttgactgtcttctatccattagttctgccctggagcacactggggaagcaggctgcgggccttccaaaagtaaaaaatggtgatatgcaatcgaagcttatccttagcctatgcacatttgtctcagctgggcattgtcttttcagagagcttgtagcacaagggctacacatgggcgccaagatggtggtagatacaccttggtgcactttttgttttacttgtttcttaagactatttcacaagtcctgtgaggcaaaaaaacaaaacaaaacaaaacaaccaaacaaatacaatctaacttttacccaatctacagcaggaaatcaaaggagtgggtggaatgagagaaaatatgcaaagagatcatttttaagtttgatttcctgtctgtaattttcaaggactaatatagcaaatttttcttctgccattatcatttatgtctccctatttaccacacaataatgtaaatgcagagaatgaggaggcatcttttaaaagccttaggatattctatatgatgacctcaatattgactttcagccatactgggaaaacttacttttcatggagtgccacctaacagtgaatgtattagagtataaaatgtttgccatgtatacacctgtatgtgcacatacacacattacacacacacacagaatgcacatttcacacacatatacttattattcaagttgaaactgcactctaatcaatctgagtctattgctgtttcaactcttaaaatcaatatctcctacattagtagatataaacataattcaaatatttaaatatttaagaggagaaaagtaactagaaaaccaatgaaaagtgaggccatcagaaatagaaaatgcctggcacgaacagtctatctaaattctcaatttcacttcaaattagagaatccataatggactagaatataaattacaaacacatacacacatcttcacttaaagttgttttaagttctttgaagttctgacatgtttttagccagggttatttgttcaggttcttccttgttaggattccagactggaaagttggaagtctcaggaaatgcatgtttccatgagttttttagtttcacagttttacagatccaacgacacaatcttttaatctttggtcactcaaccaaacaggagttccgtaggcagagtgctcactttgaattgctaatagaaaataatgcacagtgtcctcaggatatgctaaacaaggtttttaagagcattttattttacagcactttagtcttttcagctagatttcagtgacactatggtgtaaatgctatatctgccataacttattggtggctcctgtgttacatacagttttaaataatgctctaaattgtttgttttcccaatgataatgataaagtgttctgtagaatttgtaaaacatgtcaattgaatctgttgaaaattgtgtaattgttatttcaattgtgatactattttgtaggtaatagttttaaacgtatatttgtatgagtcaaaagtatgtgcttgtatgtggtatgtgtgtgtaagtatataatatcttatcaaaaatcaaacttatcctaaagaaaaagggcacattgtgaccagccttaatttattaacacttttttgttgtttttgcaatttggatttaaaattgaaacagaaattaagtttttgttaaaaatggtgtcttttaattttgtgaggaatgggctttagaacctatctgagttcccacaagcaaactgtccaccttgtgaggtaccccattgcttttcgtaataatcaaacatcaattcatatattaacttcattttcatacagactaatttgttttcatcaacaatagaaccagtacacctttaaagttgaccttcccaacatggcacccatttttctttaatgataaattttccatgaaaaattgtttctccaaaccattactttttaaaattcaatcttcccaagtaagatgaactgccttggtgttaggagagcttttaaaggcccatccatactaggtggttccaacatggttctcttctcgagaaaacaagcatgcaacccacacacttttctggtctgccccacgtgtagaattagtctagcaatagaaaactcatgactgacaaggatctacacatgtggtcatgcttgaagcaaaaattctgtgaccttctttgggcttggatctgattacagaatattaattaactttcttatttcctttctttctccatccttagttattccttttcaatatttagagttgccaggtaaaatacaggatatccagtgaaatttaaatttcagataaacagtatttctttagcatatttctcatatatttaatcagacatactttcactttaaaaaaagtttatctgaaattcaaatgtaactgggtatgtcctatatattttttcctaaatctcacaattctatccacactgcctttctatctttttcagctgggctatctataaggggcgagatctacctccctccatacccttgtgttcagacaccttatgaatatctgcagtcataatgtccttcaagaaagaaaacattggtcagctctaggtcctgcaaatgctttttgaaggacgaactcaaatacagatgggataatcaagtaaatatcttcataggatcaatgccaccatgttcaacacttccctttgccagcctgttgtgaggtccaagtttccccattaatcccttatatagcatttcccagtaactgggacaaccaaaaacacaccgacatattagaaatgctcctgaaaagtggcaacaccgcctaactcagtaccaggacctcttttaaattcaatttcttttttctttcagagagataacaaacgaattcattatttcccccattcacatcttaccacaaattatttttatcaggttaaaactggtcatctacggaattgtagaaaggtgacataggaactgtcttcactgctggaagaataaaagagtctgaggtatagacactgccctggtgacaccttctcagaacattgttgggggacaggggaggcaggcgcaagtaggggatagaatctgaccctgacatgcagctatcacctggcagagagactcgtcaaagcaaattataacgaccagtactatttttttttggaattgaaaacccaagaagccctaaaataagaacagtgagatcaaaggctggtttctaaaacaatgcagaaaatagaaccatgttggaattcctaaattctagctttcaaatactactgtttccaacagtgaatccttgacagagactgaatgcagatggaattttgaaacattttcagtagctacctcctctcctgaaattcctataagtggcagaggaaaatccaaatcctttaatataacatgtccatctcatgactcctgcttacacacatttgtgttgatttgcttcatttctggaggatgggaatttgcagagctggtgacatttccttcattagacaccagaaattcaccagagagagacagatctgtgccttctctttttaggatctggttattgatactttaataaatgtggtgtaaagaaaatccatggctacagtctgtatagaaaatgtgaattttttaaataagattgtgttcttaatgtaaaaaataaaagtttatttgtattcagtgaaatgcctaataaagtcctggtacc

SEQ ID NO: 5773 - DNA, 1691 bp, Homo sapiens
tccgagaaagagacggagagagagggaagaaaaagacagatagatagatattggggggaaggagaaaaaaggagaagagagggaagagaggacagcggagagagagcaccagagagagagggagagagagagagagcgctagagagagggagcgagcatgtgcgatgagcaatagctgtggaccttacagttgctgctaactgccctggtgtgtgtgagggagagagagggagggagggagagagagcgcgctagcgcgagagagcgagtgagcaagcgagcagaaaagaggtggagagggggggaataagaaagagagagaaggaaaggagagaaggcaggaagaaggcaagggacgagacaaccatgctgtgctgtatgagaagaaccaaacaggttgaaaaaaatgatgacgaccaaaagattgaacaagatggtatcaaaccagaagataaagctcataaggccgcaaccaaaattcaggctagcttccgtggacacataacaaggaaaaagctcaaaggagagaagaaggatgatgtccaagctgctgaggctgaagctaataagaaggatgaagcccctgttgccgatggggtggagaagaagggagaaggcaccactactgccgaagcagccccagccactggctccaagcctgatgagcccggcaaagcaggagaaactccttccgaggagaagaagggggagggtgatgctgccacagagcaggcagccccccaggctcctgcatcctcagaggagaaggccggctcagctgagacagaaagtgccactaaagcttccactgataactcgccgtcctccaaggctgaagatgccccagccaaggaggagcctaaacaagccgatgtgcctgctgctgtcactgctgctgctgccaccacccctgccgcagaggatgctgctgccaaggcaacagcccagcctccaacggagactggggagagcagccaagctgaagagaacatagaagctgtagatgaaaccaaacctaaggaaagtgcccggcaggacgagggtaaagaagaggaacctgaggctgaccaagaacatgcctgaactctaagaaatggctttccacatccccaccctcccctctcctgagcctgtctctccctaccctcttctcagctccactctgaagtcccttcctgtcctgctcacgtctgtgagtctgtcctttcccacccactagccctctttctctctgtgtggcaaacatttaaaaaaaaaaaaaaaaagcaggaaagatcccaagtcaaacagtgtggcttaaacattttttgtttcttggtgttgttatggcaagtttttggtaatgatgattcaatcattttgggaaattcttgcactgtatccaagttatttgatctggtgcgtgtggccctgtgggagtccactttcctctctctctctctctctgttccaagtgtgtgtgcaatgttccgttcatctgaggagtccaaaatatcgagtgaattcaaaatcatttttgttttcctccttttcaatgtgatggaatgaacaaaaaggaaaaaattcaaaaaacccagtttgttttaaaaataaataaataaagcaaatgtgccaattagcgtaaacttgcggctctaaggctcctttttcaacccgaatattaataaatcatgagagtaatcaaggtccaa

SEQ ID NO: 5774 - DNA, 3235 bp, Homo sapiens
gggaggaggcagtgggagggcggagggcgggggccttcggggtgggcgcccagggtagggcaggtggccgcggcgtggaggcagggagaatgcgactctccaaaaccctcgtcgacatggacatggccgactacagtgctgcactggacccagcctacaccaccctggaatttgagaatgtgcaggtgttgacgatgggcaatgacacgtccccatcagaaggcaccaacctcaacgcgcccaacagcctgggtgtcagcgccctgtgtgccatctgcggggaccgggccacgggcaaacactacggtgcctcgagctgtgacggctgcaagggcttcttccggaggagcgtgcggaagaaccacatgtactcctgcagatttagccggcagtgcgtggtggacaaagacaagaggaaccagtgccgctactgcaggctcaagaaatgcttccgggctggcatgaagaaggaagccgtccagaatgagcgggaccggatcagcactcgaaggtcaagctatgaggacagcagcctgccctccatcaatgcgctcctgcaggcggaggtcctgtcccgacagatcacctcccccgtctccgggatcaacggcgacattcgggcgaagaagattgccagcatcgcagatgtgtgtgagtccatgaaggagcagctgctggttctcgttgagtgggccaagtacatcccagctttctgcgagctccccctggacgaccaggtggccctgctcagagcccatgctggcgagcacctgctgctcggagccaccaagagatccatggtgttcaaggacgtgctgctcctaggcaatgactacattgtccctcggcactgcccggagctggcggagatgagccgggtgtccatacgcatccttgacgagctggtgctgcccttccaggagctgcagatcgatgacaatgagtatgcctacctcaaagccatcatcttctttgacccagatgccaaggggctgagcgatccagggaagatcaagcggctgcgttcccaggtgcaggtgagcttggaggactacatcaacgaccgccagtatgactcgcgtggccgctttggagagctgctgctgctgctgcccaccttgcagagcatcacctggcagatgatcgagcagatccagttcatcaagctcttcggcatggccaagattgacaacctgttgcaggagatgctgctgggagggtcccccagcgatgcaccccatgcccaccaccccctgcaccctcacctgatgcaggaacatatgggaaccaacgtcatcgttgccaacacaatgcccactcacctcagcaacggacagatgtgtgagtggccccgacccaggggacaggcagccacccctgagaccccacagccctcaccgccaggtggctcagggtctgagccctataagctcctgccgggagccgtcgccacaatcgtcaagcccctctctgccatcccccagccgaccatcaccaagcaggaagttatctagcaagccgctggggcttgggggctccactggctccccccagccccctaagagagcacctggtgatcacgtggtcacggcaaaggaagacgtgatgccaggaccagtcccagagcaggaatgggaaggatgaagggcccgagaacatggcctaagggccacatcccactgccacccttgacgccctgctctggataacaagactttgacttggggagacctctactgccttggacaacttttctcatgttgaagccactgccttcaccttcaccttcatccatgtccaacccccgacttcatcccaaaggacagccgcctggagatgacttgaggccttacttaaacccagctcccttcttccctagcctggtgcttctcctctcctagcccctgtcatggtgtccagacagagccctgtgaggctgggtccaattgtggcacttggggcaccttgctcctccttctgctgctgcccccacctctgctgcctccctctgctgtcaccttgctcagccatcccgtcttctccaacaccacctctccagaggccaaggaggccttggaaacgattcccccagtcattctgggaacatgttgtaagcactgactgggaccaggcaccaggcagggtctagaaggctgtggtgagggaagacgcctttctcctccaacccaacctcatcctccttcttcagggacttgggtgggtacttgggtgaggatccctgaaggccttcaacccgagaaaacaaacccaggttggcgactgcaacaggaacttggagtggagaggaaaagcatcagaaagaggcagaccatccaccaggcctttgagaaagggtagaattctggctggtagagcaggtgagatgggacattccaaagaacagcctgagccaaggcctagtggtagtaagaatctagcaagaattgaggaagaatggtgtgggagagggatgatgaagagagagagggcctgctggagagcatagggtctggaacaccaggctgaggtcctgatcagcttcaaggagtatgcagggagctgggcttccagaaaatgaacacagcagttctgcagaggacgggaggctggaagctgggaggtcaggtggggtggatgatataatgcgggtgagagtaatgaggcttggggctggagaggacaagatgggtaaaccctcacatcagagtgacatccaggaggaataagctcccagggcctgtctcaagctcttccttactcccaggcactgtcttaaggcatctgacatgcatcatctcatttaatcctcccttcctccctattaacctagagattgtttttgttttttattctcctcctccctccccgccctcacccgccccactccctcctaacctagagattgttacagaagctgaaattgcgttctaagaggtgaagtgattttttttctgaaactcacacaactaggaagtggctgagtcaggacttgaacccaggtctccctggatcagaacaggagctcttaactacagtggctgaatagcttctccaaaggctccctgtgttctcaccgtgatcaagttgaggggcttccggctcccttctacagcctcagaaaccagactcgttcttctgggaaccctgcccactcccaggaccaagattggcctgaggctgcactaaaattcacttagggtcgagcatcctgtttgctgataaatattaaggagaa

SEQ ID NO: 5775 - DNA, 2607 bp, Homo sapiens; identical to SEQ ID NO: 3950

SEQ ID NO: 5776 - DNA, 2644 bp, Homo sapiens
aaccagggcccgcagccccgcccctcccccagacatcgaggagccggggaggtgtgaacggcctcctttgtgcctctgaatcgaaggcaattaggcgctgcttatctgggcattagccgtgtatgcaaaccgggctcccgccccctcctcctgggcttataaacgccgccgcctggcgaggcccgaggtggatcctgcgcctggccagccccgcctggccttccctccggcccacctggccgccatgcgcctctcctcctccccacctcgtggcccgcagcagctctccagctttggctccgtggactggctctcccagagcagctgctcagggccgacccacacccccaggcctgccgacttctccctggggagcctccctggcccaggccagacatccggcgcccgggagccccctcaggccgtcagcatcaaggaggccgccgggtcctcaaatctgcctgcgccggagaggaccatggccgggttgagtaaggagccaaataccttgcgggccccccgtgtccgcacagccttcaccatggagcaggtccgcaccttggagggcgtcttccagcaccaccagtacctgagccctctggagcggaagaggctggccagggagatgcagctctcagaggtccagataaaaacctggtttcagaatcgccgcatgaaacacaaacggcaaatgcaggacccccagctgcacagccccttctcggggtctctccatgcgcccccagctttctactcaacgtcttctggccttgccaatggcctgcagctgctgtgcccttgggcacccctgtccgggccccaggctctgatgctgccccctggctccttctggggtctctgccaagtggcacaagaggccctggcatctgcgggagcttcctgctgcgggcagcctctggcgtcccacccccctaccccaggccggccttcgctgggaccagccctgtccacggggccccggggcctgtgtgctatgccacagacgggggatgcattttgaggaggcacctctgactcccacactcgcggtcttgctgatcgcacctggctcctacctggaggactcagttgttctgtttacatcctggtggcacctctcaccctgacccacacaaaggttctggagattactggagaatatatataaatatatatatgtacgtatatatgtaaatacacatatacgtatatataaatatatatatacatatgtgtgtgtatatatatatatatttttttttttttttttttttttgagacggagtgttgctctgtcacccaggctggagtgcaatgacgcaatctcggctcactgcaacctccgcctcctgggttcaagcgattctccagcctcagcctcccgagtagctgggattacagacacccgccaccacgcccggctaattttttctatttttagtagaaatggggtttcaccatgttagccaggctggtctcaaactcctgaccctgtgatccgcccgcctcggcctcccaaagtgctgggattacaggcatgagccactgcacccggccctgagaatatatttattaaagccacctcttcactgaaagttaccgaaagagtcggtttaggaaggaaacgaagggtcagtgaacagagtcaaatgcagaagtgggcttgtcatgggtagggctttcggcgtacgataaaaggatcatttgttttttaaaaggggttggaaaaactggttttccagttggaaacagtaaaggttgtaagctttgtgtgtacaaaagaaaacagggaatgcaggtgtgtttatagcgttgtggttcaagtccctcttaacaagaactccaaagctggaaagcaggagggaacaaaggtgaacatgaaggcgaggatgctggggccctgcagtgcgctctaggctgtgcgtgagccgggactgtacccacagcttgctgagggctgctcttcttgggccagggaaagcagggcagccgggacctgcggctgtgcctggactgaagctgtcccgcaggtccccaccctccaacacgtgctcacctgtccccctgctcgcagcagcctcgggacaaaacaatgactcaaggacagcacttcttgcagaaggtctggaagtgcccagaatgggaggcacggaagcccctcccggggaggactcccgcgttgatggaccgttcttggtgcagactcctgactgcgtgcatgaaacctgagacaagtgcaattccttccatgtcgccccagagtgcccaggaggcaggcagtgcggggtgcccaggcagacgggttcagcctgcagaactggaggcgacctgtgaaacccacccgggcaccccaacaggaacagaagcgtggtcctgcggctgcgtccccagcgagtttcactttccccttgctcgtttctcccttgttgtaagtgtttacaactggcatgtgcttttaaacgtcaggtaagaggggaacagctgctgtacatcgtcctggcgagtgacaatgtgacagaagcctgggcgaggccctcggagggcagcagctggacagggactactgggtttggcctggacagcactgatttgtggatgtggatgggggcacgttgtccgtgataaaagtacaagtgcccctcac

SEQ ID NO: 5777 - DNA, 6422 bp, Homo sapiens
ttacatcttatagcacccagtgaattatgatatggggctgcggtttatttgctctggcgacaatatggcttacttgccgtggaatatcccggtatttcagaagtaacatattatttttaaagagggagctttgctttctctaaatcacatggtgcaaagttgggaatacagtggcctgtaaattacaaatattatttacaaactagaaggaaagctgacatgtgtttgtgcctgtgtgacagtttcactaaggaattccaaaactgtggatagcctgttacttgagaaaaatacacggtggcagtcttgcagatgtttttcccgcctgttagccctccaggttcaaaaactgtttggtgcattttaaggcggcagtctcaccagatcgcaggattctagtctaattggcttctaaccttcaatctaaccttgccggcttccttgcaaagcccggtgcaagggcctctttcaaaatgaacccactggtgtgcctagcagtcggtagaagaagcgggagggcgtccggtctgcacgcccgccgcgaggttacaatgctgaacgcatgagatggaagataccaacgggaggccgaggggatccacggcgcccgcgcgggctccggcttcctcctgctctcggcgccgctgggcgaccgcccatgacccgctcttgcgggctctgtccggttgacaggcgaccctgtggcccggggaagcgcgggagggcgccggcggaaagttgaagagcgtttttctcgccgccgcgtgcattaggagctcgacgagtccgccctgggcttcctggtggggctgggcgggcgggggaggggccgcgcagcagcagcggaagccagacctcggcgataagaggctgcacagcgacatgcaacagtcttttcactgcagctgaatgagttgtggcgcccacaatgctcccatgacaaggagctgacaagttccattttccgtcgcgggcatcttggaatcatgactcccacaatgccttgggcacttggtcgacagtggggccgcctctgaaaaaaaaatgtgagaggttggtactaagaagtgcctttcctgacgtctctgctgcttggaaccgcttctagagcagtctctgcttttgccttgcttgctgccagctagactgtgacgacagcacatccaccctccacctctagcccagacacccccatttctacttataatcaagagaaaagctctaagtatctggcattgccctaggctgctttagtgttaaaagaaaagtttgctgaaaaagtaagatatcttctgccaggaaatcaaggaggaaaaaaaaaatcattttctcgattttgctctaaactgctgcatctgtctatgccaaactaatcaataccgattgcaccaccaaactccattgcaaattcagctgtgaggagattccctttcagacaactttgctgaaagcagcttggaaattcggtgtcgaagggtctgccacgttttcatgcttgcattttgggctccaaattggcactgggaaggggttactgagagcacaaggctgataccaggccctacttttaaacgttcatctacttacaatcctagtatttctctaaaaaccaaaacctctttgaattaacagtttcatgctgtgaatttctagtgggagatcttttccttgatattgacgacacaattttccatgtacttttaaagcagggagtggggaaaagtattttgaggggacattttcatcatcagttcagctttttttttttggttgttgctcttttttgggggggttgggtttgttggtttcactgaaacatttaactacctgtaaaatctaaacatggctgttagtgtcacaccaattcgggacacaaaatggctaacactggaagtatgtagagagttccagagggggacttgctcacggccagacacggaatgtaaatttgcacatccttcgaaaagctgccaagttgaaaatggacgagtaatcgcctgctttgattcattgaaaggccgttgctccagggagaactgcaaatatcttcatccacccccacatttaaaaacgcagttggagataaatggacgcaataacttgattcagcagaagaacatggccatgttggcccagcaaatgcaactagccaatgccatgatgcctggtgccccattacaacccgtgccaatgttttcagttgcaccaagcttagccaccaatgcatcagcagccgcctttaatccctatctgggacctgtttctccaagcctggtcccggcagagatcttgccgactgcaccaatgttggttacagggaatccgggtgtccctgtacctgcagctgctgcagctgctgcacagaaattaatgcgaacagacagacttgaggtatgtcgagagtaccaacgtggcaattgcaaccgaggagaaaatgattgtcggtttgctcatcctgctgacagcacaatgattgacaccaatgacaacacagtcactgtgtgtatggattacatcaaagggagatgctctcgggaaaagtgcaaatactttcatccccctgcacatttgcaagccaagatcaaggctgcccaataccaggtcaaccaggctgcagctgcacaggctgcagccaccgcagctgccatgactcagtcggctgtcaaatcactgaagcgacccctcgaggcaacctttgacctgggaattcctcaagctgtacttcccccattaccaaagaggcctgctcttgaaaaaaccaacggtgccaccgcagtctttaacactggtattttccaataccaacaggctctagccaacatgcagttacaacagcatacagcatttctcccaccagttcccatggtgcacggtgctacgccagccactgtgtccgcagcaacaacatctgccacaagtgttcccttcgctgcaacagccacagccaaccagatacccataatatctgccgaacatctgactagccacaagtatgttacccagatgtagaattttcatcactaaacaatcatgctaaagaggaaaggacagtgtgcttggttagagtaaaggacgaggtcattagccatattgtatatatcgtcaagcaacacacacaaaagttcctcagccacaagacatccacatattgcatgttaaccagaagaaaagacaacattttccggaaatccactgcacactgttgcctatacactttgtacatttaattgatatttgtgctgaggtgatattcctgtctaaaagaacaacattgtctttcttttctagcacagagttatgcattcaaagatgcatacctagttagtttcctatatattcatgccatcttgaaaagacagactatggtgtaaccatgattctattatgtattggtacgtctgtagaccaagatataattttttaaaaataagtttatttctttcaaggtttacaaataacaaaggtgcaccttgtatttaaaattgccattatagatgagagcgtgcatgcacagtcatttttgtttaagagtaatatttttaatgtaatagattgtaagacgtggtgagggagggatctgacagagatgaatgtgccaagcaaaaccacaactgtgtatattttaaagcacatcatggctttaagtaccatgttgttaaggattctcatgaagtgccatagactgtacatcaaattagagtattatttcttcagtgttattgttttcagagccacattttgttgcatatttgctagtactaatcagtcaaagggcaccattctttttttttttttttgaaaccaaagctgtctcagaaatggccaatttaactttacagtaacaatagacagcacaacacaaactctctcaatacagataaactcacacatactggagatatatatataatagatatatataaaattattttaatgcattgtagtgtaatatttatgcatactatactgtataacatgttattcaaaagggattgccatttctgagacacagtaacaaaaaaatgaggaaattattttgcttctatttatagcctctgtcaaaagtcaaaagactataaatgctttgcaaaaatggtttcacgtttgcttaaatgcttcatcacagtcacattcaaaatagtgactctaaacaaagaagaaagcagcactgtcatcagatgcatgataaaccaaaatatgaaaatgggaaatgtttaattaacctagtaattgggtgggttaagtacatgggtgaattttatatgtgatttttgttttgttttgttttgttcagattaactgcttatagccttagaaagccttttacaaaattaaaaaaaaaatagatgtgcattcagtttttaagaatggaatcatccaaaggaattcctttttttgaggtttggatgttgcagctagtaaaggatatttttgctctgttcagcagttctaaaaattgctgaagtaggggccaggtcactggtagttatagtatggaatgggagaagtgaaagttcagttatagaactttccatacttccaagtttactgcaagtttttatgcttgagagagatgctttctaatataagactgatgtgttgattttactgattgtactgtacatctattaaagccttagattattacattacgggttggaacccataccaatgtaatttcaatcgtgttaagaaagtaatggtgacttcacatgttattgtagttagttacattatagaatattacttatttttcttgttaaaatgtagtttttcatttcctacatttattagattttcattttctattaacaattgaataccatttcagtttatagacttgttttattagattttaccaatgaatttttcaaaatacaaaaaaaagtagtttttccttcataacatactcagttttgaattacatgtagtgtcacatgaatattcgtattgttaactaaatgatttatattttactgatttaatattacagtgtaagaatgtcagtcattgttagttcttgtctagttttcattaaaagaacaaagatcttttatatggatatcttataaatatataatcattgctaagtaagaagttaagttgttgctatcgcaacaatcctggcagacaattgagtaatattttgatgatttattttgtttgtaattagttattataagaagatctagatcctagatattagaataaaatttattttctactgtatccatttcaaatgttaaaatattgtttaatatttttgaaatccctgagtatcaggccttgttataaataagctgcataatcaataaatagaacaagggactttttgttgataatccaaatactcaaagtttacgtaatgaaaattatagcgtgtgtgcaaactcttgagggttgattatgctgcaatttagcatgttggaacgtctagggagaaggttgactttttgcacttctgtatatagtcaaaagagagaaacctgtataatagtaagatcttattttgaataaaaacgtctataattacaaggagttttgttaaggctaatacaatgacagactgagcaaaattgcttgcaaaagtggcacagagttagcactccataccccttcaaacatgttgctttgctttcttgtggacagcttgtagtttgccaggattttttcagctggaaagatacgccatcctttcaaaccctcatgactgacaaaaactccatggggccaaatctgcctgaagatcattaccaaaaatagcaggtacttctaccattaaggtgaaatcatggatcagatattccttacatttttcaaaactactgcatgtttaaaacttcaacaaaaaaagagagaaagaactatactaagaacatatattattcagatcagtttctgccaatttcagtggtttattgttcacaaaaaaatcttcaaaacaagtattgactttcacaaaatttaaatcataaacaggcaaaccaaacagcacactgtagctatagttgttatgtgattgttttttaattgctgtaggatcctgttctttcagcaggtgaaaaataaaacgcagttcaaatttcatggttttaattttcaactcagaagcactcaaaaatgcaaaatgtgataatgggcacttgtttaaaagaattagtgtatccagccttcactccagctggttaaaaatgttgcacttatcagcaaccctaccactttcatctgctgaaaggacaaatgtgcttggttttactattatgtaatcacaacttactttctgcttgtagttgcttaaaattatgtattttgtcttgggctgcaatttgttttatgcttattttattattactgcagtagttgactttgctgtatggaaaaataaagtgaaattgccctaataaaacttctctttcttaagt

SEQ ID NO: 5778 - DNA, 2342 bp, Homo sapiens
gcagtgtcactaggccggctgggggccctgggtacgctgtagaccagaccgcgacaggccagaacacgggcggcggcttcgggccgggagacccgcgcagccctcggggcatctcagtgcctcactccccaccccctcccccgggtcgggggaggcggcgcgtccggcggagggttgaggggagcggggcaggcctggagcgccatgagcagcccggatgcgggatacgccagtgacgaccagagccagacccagagcgcgctgcccgcggtgatggccgggctgggcccctgcccctgggccgagtcgctgagccccatcggggacatgaaggtgaagggcgaggcgccggcgaacagcggagcaccggccggggccgcgggccgagccaagggcgagtcccgtatccggcggccgatgaacgctttcatggtgtgggctaaggacgagcgcaagcggctggcgcagcagaatccagacctgcacaacgccgagttgagcaagatgctgggcaagtcgtggaaggcgctgacgctggcggagaagcggcccttcgtggaggaggcagagcggctgcgcgtgcagcacatgcaggaccaccccaactacaagtaccggccgcggcggcgcaagcaggtgaagcggctgaagcgggtggagggcggcttcctgcacggcctggctgagccgcaggcggccgcgctgggccccgagggcggccgcgtggccatggacggcctgggcctccagttccccgagcagggcttccccgccggcccgccgctgctgcctccgcacatgggcggccactaccgcgactgccagagtctgggcgcgcctccgctcgacggctacccgttgcccacgcccgacacgtccccgctggacggcgtggaccccgacccggctttcttcgccgccccgatgcccggggactgcccggcggccggcacctacagctacgcgcaggtctcggactacgctggccccccggagcctcccgccggtcccatgcacccccgactcggcccagagcccgcgggtccctcgattccgggcctcctggcgccacccagcgcccttcacgtgtactacggcgcgatgggctcgcccggggcgggcggcgggcgcggcttccagatgcagccgcaacaccagcaccagcaccagcaccagcaccaccccccgggccccggacagccgtcgccccctccggaggcactgccctgccgggacggcacggaccccagtcagcccgccgagctcctcggggaggtggaccgcacggaatttgaacagtatctgcacttcgtgtgcaagcctgagatgggcctcccctaccaggggcatgactccggtgtgaatctccccgacagccacggggccatttcctcggtggtgtccgacgccagctccgcggtatattactgcaactatcctgacgtgtgacaggtccctgatccgccccagcctgcaggccagaagcagtgttacacacttcctggaggagctaaggaaatcctcagactcctgggtttttgttgttgctgttgttgttttttaaaaggtgtgttggcatataatttatggtaatttattttgtctgccacttgaacagtttgggggggtgaggtttcatttaaaatttgttcagagatttgtttcccatagttggattgtcaaaaccctatttccaagttcaagttaactagctttgaatgtgtcccaaaacagcttcctccatttcctgaaagtttattgatcaaagaaatgttgtcctgggtgtgttttttcaatcttctaaaaaataaaatctggaatcctgcttttttgctctactagtacctctgtcacactagtcttatcaaaaaccagttcttaagatcaatgttaagtttattagttaatgtaaatttctcatcctcgaaaagggtgaacataaatgcctttaaggagtatatctaaaaataaacattaggatatctaagtttgatgtaattgtttcaggaaggaaaaaagaaaagcattctggaatgagcctacttcaagtaatcttagtttctaaaactaacagttaatattttcaattccagtatatcactttaagtagaaggggatgtccaagtaattttggttttctaactgttgaatcataagcttgacctgcccccagaggctttttggatgtttttatctgtgttttgccatctctttacactcctcgacattcagtttaccttaatcttcacatttttacaccttgggaagtggcaagcatcgctgggtttaagataaaggagtcacaaaaactaatcaaaataaaatttgcattatgacaactt

SEQ ID NO: 5779 - DNA, 3052 bp, Homo sapiens; identical to SEQ ID NO: 793

SEQ ID NO: 5780 - DNA, 2743 bp, Homo sapiens
ggggtttctgggtgacggtgatctcggggtgggcaggactccaaaggcccgtcgacccggtggtggactccttgcactgggattggacatatgcaagcgggagatttggggccggcgctcaaaatcggggggcgggggtggactcgggtttggaccccaggatccgatcagcggacccttgattcaacgtgggctccagcgtgacatggctgaagcgcaccaggccgtgggcttccgaccctcgctgacctcggacggggctgaagtggaactcagtgcccctgtgctgcaggagatctacctctctggcctgcgctcctggaaaaggcatctctcacgtttctggaatgactttctcaccggtgtgtttcctgccagccccctcagttggcttttcctcttcagtgccatccagcttgcctggttcctccagctggatccttccttaggactgatggagaagatcaaagagttgctgcctgactggggtggacaacaccacgggctccggggggtcctggcagccgcgctgtttgcctcgtgtttgtggggagccctgatcttcacactgcacgtggccctgaggctgcttctgtcctaccacggctggcttcttgagccccacggagccatgtcctcccccaccaagacctggctggccctggtccgcatcttctctggccgccacccgatgctgttcagttaccagcgctccctgccacgccagcccgtgccctctgtgcaggacaccgtgcgcaagtacctggagtcggtccggcccatcctctccgacgaggacttcgactggaccgcggtcctggcgcaggaattcctgaggctgcaggcgtcgctgctgcagtggtacctgcggctcaagtcctggtgggcgtccaattatgtcagtgactggtgggaggaatttgtgtacctgcgctcccgaaatccgctgatggtgaacagcaactattacatgatggacttcctgtatgtcacacccacgcctctgcaggcagctcgcgctgggaatgccgtccatgccctcctcctgtaccgccaccgcctgaaccgccaggagatacccccgactttgctgatgggaatgcgccccttatgctctgcccagtacgagaagatcttcaacaccacgcggattccaggggtccaaaaagactacatccgccacctccatgacagccaacacgtggctgtcttccaccggggccgattcttccgcatggggacccactcccgaaacagcctgctttccccgagagccctggagcagcagtttcagagaatcctggatgatccctcaccggcctgcccccacgaggaacatctggcagctctgacagctgctcccaggggcacgtgggcccaggtgcggacatccctgaagacccaggcagcggaggccctggaggcggtggaaggggccgctttctttgtgtcactggatgctgagcccgcggggctcaccagggaggacccggcagcgtcgttggatgcctacgcccatgctctgctggccggccggggccatgatcgctggtttgacaaatccttcaccctaatcgtcttctctaacgggaagctgggcctcagcgtggagcactcctgggccgactgccccatctcaggacacatgtgggagttcactctggctacagaatgctttcagctgggctactcaacagacggccactgcaaggggcacccggaccccacactaccccagccccagcggctgcaatgggaccttccagaccagatccactcctccatctctctagccctgaggggagccaagatcttgtctgaaaatgtcgactgccatgtcgttccattctccctatttggcaagagcttcatccgacgctgccacctctcttcagacagcttcatccagatcgccttgcaactggcccacttccgggacaggggtcaattctgcctgacttatgagtcggccatgactcgcttattcctggaaggccggacggagacggtgcggtcttgcacgagggaggcctgcaactttgtcagggccatggaggacaaagagaagacggacccacagtgcctcgccctgttccgcgtggcagtggacaagcaccaggctctgctgaaggcagccatgagcgggcagggagttgaccgccacctgtttgcgctgtacatcgtgtcccgattcctccacctgcagtcgcccttcctgacccaggtccattcggagcagtggcagctgtccaccagccagatccctgttcagcaaatgcatctgtttgacgtccacaattacccggactatgtttcctcaggcggtggattcgggcctgctgatgaccatggttatggtgtttcttatatcttcatgggggatggcatgatcaccttccacatctccagcaaaaaatcaagcacaaaaacggattcccacaggctggggcagcacattgaggacgcactgctggatgtggcctccctgttccaggcgggacagcattttaagcgccggttcagagggtcagggaaggagaactccaggcacaggtgtggatttctctcccgccagactggggcctccaaggcctcaatgacatccaccgacttctgactccttccagcaggcagctggcctctccaaggaataagggtgaaattgccacagctggctgacacaggacaggggcaactggtttggcaaccccacatccaggccaataaagatgtgtgagctggg

SEQ ID NO: 5781 - DNA, 4855 bp, Homo sapiens
gcatgtgggcttcatttaaacagagcagagggggcggcgcgcggtcgccgcggtgctgctgctcagtgggagcgggtcttcgcaactgtctccgcgtggcgcgcgcctctagccgcccttcccctggcggctacggccggagggagcggaggcgagcgggagtcgggctccatggagagcggcggacaactgggcagaggcggagctttcatctcggcaccctggttccagtgacccgcgctagcgtcccgtcccgcccgcgtcggagcggccgccggccccgggactgaccggcctcgccgcacctcccgcaccgactagcgctcccgggcgctcctgcgcccgactcgccctcgcccccactccccggcggggtggcggcggccgggcccccacggcggcggccggagcagcagcagcagcagcaggagcccgcctctatgatgaagttcaagcccaaccagacgcggacctacgaccgcgagggcttcaagaagcgggcggcgtgcctgtgcttccggagcgagcaggaggacgaggtgctgctggtgagtagcagccggtacccagaccagtggattgtcccaggaggaggaatggaacccgaggaggaacctggcggtgctgccgtgagggaagtttatgaggaggctggagtcaaaggaaaactaggcagacttctgggcatatttgagcagaaccaagaccgaaagcacagaacatatgtttatgttctaacagtcactgaaatattagaagattgggaagattctgttaatattggaaggaagagagagtggttcaaagtagaagatgctatcaaagttctccagtgtcataaacctgtacatgcagagtatctggaaaagctaaagctgggttgttccccagccaatggaaattctacagtcccttcccttccggataataatgccttgtttgtaaccgctgcacagacctctgggttgccatctagtgtaagatagagagaactgggtaggcctctcccaccatgtgcagtctcatggggagaggcttctttcgtttcctcgtcaaacatctgattgacgcttgcaaactgtctgaatttgccatgcaaggttttcaaacaatttgcatgtttttcagatgctttcaaatctttttttaaaaaaatagtgtaaaatattttaataagccaaagccatgtggaatttttgtttagatgccttaactgtgccacaccccacaaccccctatattattttggttgtctatttctcacagcatattttcagttttttgtccatttgacatcagtctgtggtttattttgtcatcagattacttgtgggtatacctaccccaaaattgttttctcattcacagcattagcatattcagcaaatccatctgtggtgggaattaaaaatattattggtattaaagaaatccattcaccccaaaacttgttttacaggattacaattttaattcaaaatttccagatttgggctatttctgtatgatccaataacttattttgtcacagggcttaatttgccatttttggggatttgtcgactcattttgtctgaattttcacaactggtattatgtcactagctacctgatacggctatttcccttataactcaatagtaccttaacacaaagtataactctgtagagttggtgaatattttagggaaatattagcaaaatgcatgtagtaaagacatcttatgaaaactgtattcatggaatttgatttagcatgctcagttgccagttcccattatcgatactctttctttgcagaataccttagaaccgttatttccctcagtgtagattgctcttaaaatgtattcagttatttagtggcccccacaggagtggagtcttgaaatctaattctaaatgccagtcagtgatgatcgcatcacagttgagtgaaatggccttcctgttcagctgttagagactgaagattgttagggcaccttagaatgtctcatcttttctaggttgtcaacaggtactatttgtcacataactaactttcgaggcactggaacatacctgaactaagaattaaatcttttactttatactcacttaaaatcaagaatcccatctaaaacacataggtaccttatctgaaactcttgcacttccccaaccagggcagaaatgaggtgggagaagtttgactaaaatgagggatgggggaaagtaaaagatgtttttttttttttgagactcgctttgtcacccaggctggagtgcaatggcacaatctcaactcaccgcaacctccgcctcccgggttcaagcgattctcctgcctcagcctcccgagtagttgggattacaggcgcctgcctccatgcctggctaattttgtatttttagtagagacagggtttcttcatgttggtcaggctggtctcaaactcctaacctcgtgatccgcctgcctcgacctcccaaagtgctgggattacaggcatgagccaccatgcccagccaaagatcatttttttatatagacttcagccctttgtaaatattgtaactggggagtatagagtagaaaaaaagtatagttaaaacatttgttctacaaattaacctttaaaaatataattactgctaaaaatagagtgctgttacacttaaggaaaattagtgccattttggaaatgagatcttgtgccataaatacagctgaactgaatataaatgttcacaaattaatgctgtcaaaggaatgagtaaagcagaaaaacttttaaccagcaacatttcaagtacgtagtgtgatcaaacatgatcatccagaatttttatatttttttctttgtacagaggttacatattctgggtgttcttttataaaggaaacattttaaatcccacaaattgacactttctatcttcaatggactaagatttttttggtcagtaatctctgaaatttccttaaattatatacttaacatagcagagaaactggattgtttttgtatataagactgcttccacctgaaatgctgtcataagtactgggggggtgggggagtgcccatcttgtacatgatattcttagaggtaataaggtaatgatgcatgaatttattttataaactcttggactatgtatttgacatgtaaaatatgtacagtattaacgtcaaccatctctttaaagttagcctataaatattgttgtataattttctttggtcagaaacacttggactgaatagtgacactcggtaaggattttcagtgccatttagcaaaacgtctttagtctatgcaactagcaaaaatctgcataatgcaacaacacagttttcacacttcaaattttacatgaggggttcttcacgattctcctggaacccagtctagcaaaatgagaggaaaggccctagggagatttatttctgttaaatagttaactctgctgagtatgacaaatagtgtctactatctcaaccctccaaaatttgcagagtgttgggactgtcatttgtgattttttttttttttttttggtggggtagttgaataaaattgggcagctaaatttttcagttccatgtgcctcccaaataaaaaacagaaaataagtagtttttgtgaattgacttgcagacaaagtagaaactgtgctgcatgatgttattttgtaaacagatgacattttctgaccaggcacatgccatccaattttctgtcaatcacactgttgtataaagcagcagaactgaaggggaaaaatgattgttgtatacactgaattgctttgcatggtctcatttgagataattgatgtaagaatcctgacttttttatatttggaaacatcaaataaaaatggaaaaaatgatcatggctttaaaaaaaaaacaaaaacacacacacatgaactcagatttgcaaaccaggtttctgaaactttgggtaaggtgtatgcttttaactttgaaatgtataaacacccagcggaaacgtatacctttcagtgcatagtgcattgtgtgcttaccctgggttgtttaaacttgtgttcaaatattccccctccaagtgaaagcctgtcgggaattccacagtaacacctttactgttctcccattgatgatcatatacgttacctcttcctagcggtacatttgtatgatccttactactggaattaccgggttaaaaggaaatgcttaccactaagatgtcagtattctcctcatggatattttcagtctcaatgttgccagtctaatagtatagtatgtggttgctttactgctgttctccccacccccgtggagttgtgtcattattttaatgaatgtgagctcttgacttactctagaattctaatacagatactttctgcactagtatcacttttattattgcagttccatttaaaagcataactggctaagtcaccgccccacccgccgcattacatttcctaaaacatactgctgccaaagaccaactgtagaatccttaagtcctgttcaagtgtcacttcattttttattaggggtttcttagttggagggcatgagaaacttggccctttccaatgttgtcttcacattggagtataagaattctctataggactctttaatttttttttttttttggtagagatggggtcttgctgtgttgcccaggctggtctcaaactcctaggcttaagcagtcctccagcctcagccttctcaaagtgctaggatgattggcatgagccacctcgtctggcctgcaggtctttttaagcatttgctgttcaataataagcatcttctttatgcctagtatttgtgataagagcacaaaacaa

SEQ ID NO: 5782 - DNA, 748 bp, Homo sapiens
gggatccccgcctcaggctctcaacctcctctcctgcagctccagctctgtgctctgcctccgaggagaccatggcctggcccctgtgcaccctgctgctcctgctggccacccaggctgtggccctggcctggagcccccaggaggaggacaggataatcgagggtggcatctatgatgcagacctcaatgatgagcgggtacagcgtgcccttcactttgtcatcagcgagtataacaaggccactgaagatgagtactacagacgcctgctgcgggtgctacgagccagggagcagatcgtgggcggggtgaattacttcttcgacatagaggtgggccgaaccatatgtaccaagtcccagcccaacttggacacctgtgccttccatgaacagccagaactgcagaagaaacagttgtgctctttccagatctacgaagttccctgggaggacagaatgtccctggtgaattccaggtgtcaagaagcctagggatctgtgccagggagtcacactgaccacctcctactcccaccccttgtagtgctcccacccctggactggtggcccccaccctgtgggaggtctccccatgcacctgcagcaggagaagacagagaaggctgcaggaggcctttgttgctcagcaggggactctgccctccctccttccttttgcttctcatagccctggtacatggtacacacacccccacctcctgcaattaaacagtagcatcacc

SEQ ID NO: 5783 - DNA, 3824 bp, Homo sapiens; identical to SEQ ID NO: 196

SEQ ID NO: 5784 - DNA, 3507 bp, Homo sapiens
ccacaagagcccgcggtggcgctgccaggggatgctagcccgagagcgagcagaggagcagcgcacccgcacgagccttggaccctttggaaccgaaagcacgcccgtcctcagagtcccgtcctcaaagtcccatcctcgccatggcacccggagagaagatcaaagccaaaatcaagaagaatctgcccgtgacgggccctcaggcgccgaccattaaagagctgatgcggtggtactgcctcaacaccaacacccatggctgtcgccgcatcgtggtgtcccgcggccgtctgcgccgcctcctctggatcgggttcacactgactgccgtggccctcatcctctggcagtgcgccctcctcgtcttctccttctatactgtctcagtttccatcaaagtccacttccggaagctggattttcctgcagtcaccatctgcaacatcaacccctacaagtacagcaccgttcgccaccttctagctgacttggaacaggagaccagagaggccctgaagtccctgtatggctttccagagtcccggaagcgccgagaggcggagtcctggaactccgtctcagagggaaagcagcctagattctcccaccggattccgctgctgatctttgatcaggatgagaagggcaaggccagggacttcttcacagggaggaagcggaaagtcggcggtagcatcattcacaaggcttcaaatgtcatgcacatcgagtccaagcaagtggtgggattccaactgtgctcaaatgacacctccgactgtgccacctacaccttcagctcgggaatcaatgccattcaggagtggtataagctacactacatgaacatcatggcacaggtgcctctggagaagaaaatcaacatgagctattctgctgaggagctgctggtgacctgcttctttgatggagtgtcctgtgatgccaggaatttcacgcttttccaccacccgatgcatgggaattgctatactttcaacaacagagaaaatgagaccattctcagcacctccatggggggcagcgaatatgggctgcaagtcattttgtacataaacgaagaggaatacaacccattcctcgtgtcctccactggagctaaggtgatcatccatcggcaggatgagtatcccttcgtcgaagatgtgggaacagagattgagacagcaatggtcacctctataggaatgcacctgacagagtccttcaagctgagtgagccctacagtcagtgcacggaggacgggagtgacgtgccaatcaggaacatctacaacgctgcctactcgctccagatctgccttcattcatgcttccagacaaagatggtggagaaatgtgggtgtgcccagtacagccagcctctacctcctgcagccaactactgcaactaccagcagcaccccaactggatgtattgttactaccaactgcatcgagcctttgtccaggaagagctgggctgccagtctgtgtgcaaggaagcctgcagctttaaagagtggacactaaccacaagcctggcacaatggccatctgtggtttcggagaagtggttgctgcctgttctcacttgggaccaaggccggcaagtaaacaaaaagctcaacaagacagacttggccaaactcttgatattctacaaagacctgaaccagagatccatcatggagagcccagccaacagtattgagatgcttctgtccaacttcggtggccagctgggcctgtggatgagctgctctgttgtctgcgtcatcgagatcatcgaggtcttcttcattgacttcttctctatcattgcccgccgccagtggcagaaagccaaggagtggtgggcctggaaacaggctcccccatgtccagaagctccccgtagcccacagggccaggacaatccagccctggatatagacgatgacctacccactttcaactctgctttgcacctgcctccagccctaggaacccaagtgcccggcacaccgccccccaaatacaataccttgcgcttggagagggccttttccaaccagctcacagatacccagatgctggatgagctctgaggcagggttgagaagacagatctagtcaggaccaccagccatggtctaaggacatggatcgggtgcccccagacgtgtgcacaggggaccctctgccccactctgggcttttcagatactctgaccaaaaagcctgctttaaaccgcaagatggggcctgggcatgcgcaggaggagccatcgggtactacgcagcaacactcacaactgtccaggctgagataaatcccgggacctgaactattagcacgtcactagagactgggagccgaggcagtggtgctggcccaagtgaaggccagagtgaggactgatgcagctctttacgggtcttgagagggaaggactcttccaaagccccaaagccgagggtttcacccacactgccagcctgggttggggcccaaggatgtgaccttgagtgtcaaggctggacagctactgccagatgccaaagataggagaaagtgccagccctgaagctggagccgtttgtgaataaactgttcttcatcattgacactggagaaaggtgtcctccatgccctcaggcagcagagaactggcccagagcccttggagtgttggtggagatcagagtgccgtggtggaggtctgggactatgtcagagtgtcctcactttggggcatgggtgggtccaggagatggatttagttattcaattttgtggatgaataaattgaggcacagaaagattaagttaccggcccaaggtgacacagtgaggaggtggcagagctaggatttgaacccagacaatctgacttcatgattttgcatccaattcgtgtctgtgccttttaaagggtgaggtctgtgtcactttgggtggggagggggagcatggtgggccatgctctgggcagctgttccaagacagagctgacccttccattaccaatggcctgtccctcaccaacaagccaactgccacagatgacccacttcataccacattcacatctttccacctgaaatggctaacaggtattaaatccttggttggtgtttaaagccaacccaagaacagggtgttaggtactgttttaagcacctagataggttagcataggggactgcaaatggtgttccgcaaagcaaatcctgtttttgaccatgaactaagaattttattttattttattttttattttttgtagaaataggatctcactatgttgcccaggctgttcttgaactcctggcctcaaatgatcttcccacttcagcctcccaaagtgcagggattacaggcacaagccaccgtgcccagccaagaatttttatttttgcttttaaatagcaaaagaagaagattctgtgactcatgaaaatgatatgagattcgaattccagtgtctataaataaagttttattggtacacagccaca

SEQ ID NO: 5785 - DNA, 2679 bp, Homo sapiens
aagaagtgggatggggcctctccagaaagctgaacgaggcatctggagcccgaacaaacctccaccttttttggcctcgacggcggcaacccagcctccctcctaacgccctccgcctttgggaccaaccaggggagctcaagttagtagcagccaaggagaggcgctgccttgccaagactaaaaagggaggggagaagagaggaaaaaagcaagaatcccccacccctctcccgggcggagggggcgggaagagcgcgtcctggccaagccgagtagtgtcttccactcggtgcgtctctctaggagccgcgcgggaaggatgctggtccgcaggggcgcgcgcgcagggcccaggatgccgcggggctggaccgcgctttgcttgctgagtttgctgccttctgggttcatgagtcttgacaacaacggtactgctaccccagagttacctacccagggaacattttcaaatgtttctacaaatgtatcctaccaagaaactacaacacctagtacccttggaagtaccagcctgcaccctgtgtctcaacatggcaatgaggccacaacaaacatcacagaaacgacagtcaaattcacatctacctctgtgataacctcagtttatggaaacacaaactcttctgtccagtcacagacctctgtaatcagcacagtgttcaccaccccagccaacgtttcaactccagagacaaccttgaagcctagcctgtcacctggaaatgtttcagacctttcaaccactagcactagccttgcaacatctcccactaaaccctatacatcatcttctcctatcctaagtgacatcaaggcagaaatcaaatgttcaggcatcagagaagtgaaattgactcagggcatctgcctggagcaaaataagacctccagctgtgcggagtttaagaaggacaggggagagggcctggcccgagtgctgtgtggggaggagcaggctgatgctgatgctggggcccaggtatgctccctgctccttgcccagtctgaggtgaggcctcagtgtctactgctggtcttggccaacagaacagaaatttccagcaaactccaacttatgaaaaagcaccaatctgacctgaaaaagctggggatcctagatttcactgagcaagatgttgcaagccaccagagctattcccaaaagaccctgattgcactggtcacctcgggagccctgctggctgtcttgggcatcactggctatttcctgatgaatcgccgcagctggagccccacaggagaaaggctgggcgaagacccttattacacggaaaacggtggaggccagggctatagctcaggacctgggacctcccctgaggctcagggaaaggccagtgtgaaccgaggggctcaggaaaacgggaccggccaggccacctccagaaacggccattcagcaagacaacacgtggtggctgataccgaattgtgactcggctaggtggggcaaggctgggcagtgtccgagagagcacccctctctgcatctgaccacgtgctacccccatgctggaggtgacatctcttacgcccaacccttccccactgcacacacctcagaggctgttcttggggccctacaccttgaggaggggcaggtaaactcctgtcctttacacattcggctccctggagccagactctggtcttctttgggtaaacgtgtgacgggggaaagccaaggtctggagaagctcccaggaacaatcgatggccttgcagcactcacacaggacccccttcccctaccccctcctctctgccgcaatacaggaacccccaggggaaagatgagcttttctaggctacaattttctcccaggaagctttgatttttaccgtttcttccctgtattttctttctctactttgaggaaaccaaagtaaccttttgcacctgctctcttgtaatgatatagccagaaaaacgtgttgccttgaaccacttccctcatctctcctccaagacactgtggacttggtcaccagctcctcccttgttctctaagttccactgagctccatgtgccccctctaccatttgcagagtcctgcacagttttctggctggagcctagaacaggcctcccaagttttaggacaaacagctcagttctagtctctctggggccacacagaaactctttttgggctcctttttctccctctggatcaaagtaggcaggaccatgggaccaggtcttggagctgagcctctcacctgtactcttccgaaaaatcctcttcctctgaggctggatcctagccttatcctctgatctccatggcttcctcctccctcctgccgactcctgggttgagctgttgcctcagtcccccaacagatgcttttctgtctctgcctccctcaccctgagccccttccttgctctgcacccccatatggtcatagcccagatcagctcctaacccttatcaccagctgcctcttctgtgggtgacccaggtccttgtttgctgttgatttctttccagaggggttgagcagggatcctggtttcaatgacggttggaaatagaaatttccagagaagagagtattgggtagatattttttctgaatacaaagtgatgtgtttaaatactgcaattaaagtgatactgaaacac

SEQ ID NO: 5786 - DNA, 2981 bp, Homo sapiens
gaggccaggggagggtgcgaaggaggcgcctgcctccaacctgcgggcgggaggtgggtggctgcggggcaattgaaaaagagccggcgaggagttccccgaaacttgttggaactccgggctcgcgcggaggccaggagctgagcggcggcggctgccggacgatgggagcgtgagcaggacggtgataacctctccccgatcgggttgcgagggcgccgggcagaggccaggacgcgagccgccagcggtgggacccatcgacgacttcccggggcgacaggagcagccccgagagccagggcgagcgcccgttccaggtggccggaccgcccgccgcgtccgcgccgcgctccctgcaggcaacgggagacgcccccgcgcagcgcgagcgcctcagcgcggccgctcgctctccccctcgagggacaaacttttcccaaacccgatccgagcccttggaccaaactcgcctgcgccgagagccgtccgcgtagagcgctccgtctccggcgagatgtccgagcgcaaagaaggcagaggcaaagggaagggcaagaagaaggagcgaggctccggcaagaagccggagtccgcggcgggcagccagagcccagccttgcctccccgattgaaagagatgaaaagccaggaatcggctgcaggttccaaactagtccttcggtgtgaaaccagttctgaatactcctctctcagattcaagtggttcaagaatgggaatgaattgaatcgaaaaaacaaaccacaaaatatcaagatacaaaaaaagccagggaagtcagaacttcgcattaacaaagcatcactggctgattctggagagtatatgtgcaaagtgatcagcaaattaggaaatgacagtgcctctgccaatatcaccatcgtggaatcaaacgctacatctacatccaccactgggacaagccatcttgtaaaatgtgcggagaaggagaaaactttctgtgtgaatggaggggagtgcttcatggtgaaagacctttcaaacccctcgagatacttgtgcaagtgcccaaatgagtttactggtgatcgctgccaaaactacgtaatggccagcttctacaagcatcttgggattgaatttatggaggcggaggagctgtaccagaagagagtgctgaccataaccggcatctgcatcgccctccttgtggtcggcatcatgtgtgtggtggcctactgcaaaaccaagaaacagcggaaaaagctgcatgaccgtcttcggcagagccttcggtctgaacgaaacaatatgatgaacattgccaatgggcctcaccatcctaacccaccccccgagaatgtccagctggtgaatcaatacgtatctaaaaacgtcatctccagtgagcatattgttgagagagaagcagagacatccttttccaccagtcactatacttccacagcccatcactccactactgtcacccagactcctagccacagctggagcaacggacacactgaaagcatcctttccgaaagccactctgtaatcgtgatgtcatccgtagaaaacagtaggcacagcagcccaactgggggcccaagaggacgtcttaatggcacaggaggccctcgtgaatgtaacagcttcctcaggcatgccagagaaacccctgattcctaccgagactctcctcatagtgaaaggtatgtgtcagccatgaccaccccggctcgtatgtcacctgtagatttccacacgccaagctcccccaaatcgcccccttcggaaatgtctccacccgtgtccagcatgacggtgtccatgccttccatggcggtcagccccttcatggaagaagagagacctctacttctcgtgacaccaccaaggctgcgggagaagaagtttgaccatcaccctcagcagttcagctccttccaccacaaccccgcgcatgacagtaacagcctccctgctagccccttgaggatagtggaggatgaggagtatgaaacgacccaagagtacgagccagcccaagagcctgttaagaaactcgccaatagccggcgggccaaaagaaccaagcccaatggccacattgctaacagattggaagtggacagcaacacaagctcccagagcagtaactcagagagtgaaacagaagatgaaagagtaggtgaagatacgcctttcctgggcatacagaaccccctggcagccagtcttgaggcaacacctgccttccgcctggctgacagcaggactaacccagcaggccgcttctcgacacaggaagaaatccaggccaggctgtctagtgtaattgctaaccaagaccctattgctgtataaaacctaaataaacacatagattcacctgtaaaactttattttatataataaagtattccaccttaaattaaacaatttattttattttagcagttctgcaaatagaaaacaggaaaaaaacttttataaattaaatatatgtatgtaaaaatgtgttatgtgccatatgtagcaattttttacagtatttcaaaacgagaaagatatcaatggtgcctttatgttatgttatgtcgagagcaagttttgtacagttacagtgattgcttttccacagtatttctgcaaaacctctcatagattcagtttttgctggcttcttgtgcattgcattatgatgttgactggatgtatgatttgcaagacttgcaactgtccctctgtttgcttgtagtagcacccgatcagtatgtcttgtaatggcacatccatccagatatgcctctcttgtgtatgaagttttctttgctttcagaatatgaaatgagttgtgtctactctgccagccaaaggtttgcctcattgggctctgagataatagtagatccaacagcatgctactattaaatacagcaagaaactgcattaagtaatgttaaatattaggaagaaagtaatactgtgattt

SEQ ID NO: 5787 - DNA, 2158 bp, Homo sapiens
actcattcataaaacgcttgttataaaagcagtggctgcggcgcctcgtactccaaccgcatctgcagcgagcatctgagaagccaagactgagccggcggccgcggcgcagcgaacgagcagtgaccgtgctcctacccagctctgctccacagcgcccacctgtctccgcccctcggcccctcgcccggctttgcctaaccgccacgatgatgttctcgggcttcaacgcagactacgaggcgtcatcctcccgctgcagcagcgcgtccccggccggggatagcctctcttactaccactcacccgcagactccttctccagcatgggctcgcctgtcaacgcgcaggacttctgcacggacctggccgtctccagtgccaacttcattcccacggtcactgccatctcgaccagtccggacctgcagtggctggtgcagcccgccctcgtctcctccgtggccccatcgcagaccagagcccctcaccctttcggagtccccgccccctccgctggggcttactccagggctggcgttgtgaagaccatgacaggaggccgagcgcagagcattggcaggaggggcaaggtggaacagttatctccagaagaagaagagaaaaggagaatccgaagggaaaggaataagatggctgcagccaaatgccgcaaccggaggagggagctgactgatacactccaagcggagacagaccaactagaagatgagaagtctgctttgcagaccgagattgccaacctgctgaaggagaaggaaaaactagagttcatcctggcagctcaccgacctgcctgcaagatccctgatgacctgggcttcccagaagagatgtctgtggcttcccttgatctgactgggggcctgccagaggttgccaccccggagtctgaggaggccttcaccctgcctctcctcaatgaccctgagcccaagccctcagtggaacctgtcaagagcatcagcagcatggagctgaagaccgagccctttgatgacttcctgttcccagcatcatccaggcccagtggctctgagacagcccgctccgtgccagacatggacctatctgggtccttctatgcagcagactgggagcctctgcacagtggctccctggggatggggcccatggccacagagctggagcccctgtgcactccggtggtcacctgtactcccagctgcactgcttacacgtcttccttcgtcttcacctaccccgaggctgactccttccccagctgtgcagctgcccaccgcaagggcagcagcagcaatgagccttcctctgactcgctcagctcacccacgctgctggccctgtgagggggcagggaaggggaggcagccggcacccacaagtgccactgcccgagctggtgcattacagagaggagaaacacatcttccctagagggttcctgtagacctagggaggaccttatctgtgcgtgaaacacaccaggctgtgggcctcaaggacttgaaagcatccatgtgtggactcaagtccttacctcttccggagatgtagcaaaacgcatggagtgtgtattgttcccagtgacacttcagagagctggtagttagtagcatgttgagccaggcctgggtctgtgtctcttttctctttctccttagtcttctcatagcattaactaatctattgggttcattattggaattaacctggtgctggatattttcaaattgtatctagtgcagctgattttaacaataactactgtgttcctggcaatagtgtgttctgattagaaatgaccaatattatactaagaaaagatacgactttattttctggtagatagaaataaatagctatatccatgtactgtagtttttcttcaacatcaatgttcattgtaatgttactgatcatgcattgttgaggtggtctgaatgttctgacattaacagttttccatgaaaacgttttattgtgtttttaatttatttattaagatggattctcagatatttatatttttattttatttttttctaccttgaggtcttttgacatgtggaaagtgaatttgaatgaaaaatttaagcattgtttgcttattgttccaagacattgtcaataaaagcatttaagttgaatgcga

SEQ ID NO: 5788 - DNA, 1687 bp, Homo sapiens
cgagggaccgttggcccttggccgcggaccgcgtgggccgagaactttgccagacgagacttgttttctctgggcagttggagggtctcgcggctcctacccttttttggaacggatcattttaaaagttctcgttagaaaccaattcggcgccggcaccctttgggtgaaacctaatcagcccgcgacgctgcctttctcactggtcacgggcaacagctaggctgctgttatttcgcaaggcagaagagaaaaggcatcctcgcgagcagatgaggaacctcggggataaatccttttgtggcttcaagtgtctaagtacattagagtcaggaacggcgctttccagcgtccgccatttttgtggcgtcaccgcgtcgctgctacgccatccccagcgcagtggctgccgcgctcctgtcccagtgtcccccgggaggtcggcccgtgcggtgacgcccctgagcgcggggtacgccgggagttgtagtcctgacggcacagccttgcagcgtctccggaagtggaggcgggagcggcacggcagccactgcttggggtagcgggagggcagactctgggcgccactcccgggccggtcatgaacgggccggcggacggcgaagtggactacaaaaaaaaataccggaatctgaagcggaagctcaagttcctcatctacgagcacgagtgcttccaggaggagctgaggaaagcgcaaaggaaattactgaaggtgtcccgggacaagagtttcctcctagaccgacttctgcagtacgagaacgtggatgaagactcttcggactcagatgccactgcatcatcagataacagcgagacggaggggacacccaagttgtctgacacaccggcccctaagaggaagagaagccctccgctggggggcgccccctctccctccagcctctccctgcctccttcaacagggtttccccttcaggcctccggggtcccctccccatacctgagctcgctggcctcctcccgctaccccccattcccttctgactacctggccctgcagctgcccgagcccagtcccctgaggcccaagcgggagaaacggccccgcctgccccggaaactcaagatggcggtgggaccccccgactgccctgtgggagggccgctgaccttccctggccggggttctggggctggggtcgggacaaccctgacccccctcccaccccctaagatgcccccccccacgatcctgagcacggtccctcggcagatgttcagcgatgcaggtagcggggacgatgccttggatggagacgatgacctggtgatcgacatcccggagtgaccgtgacatcacgccatgcccaccacggccccgcccggcgccctccccgtgccagcacacacgagtccagcttcctcggaggtgtttattgatgcccagctgccatgctccggccactgacacaaccagaaaaggcgtaaacatgcacgggtgtcccccaggagggtggcaggggccctgccttcaaaccccggccccctccaggggacagttatttaaacgagtggccgggagcatctgccacctgctggggaggcagagaccctgcaatggccacctctttaaaagggcagctgtacagggctaggttttttcaatgaagtttctgtattaaaggagtggctctgggtt

SEQ ID NO: 5789 - DNA, 704 bp, Homo sapiens
cggaacacgctgggaggagggtggaaggcaacctcggggaaactgggaaaggcggcctggacttcgggaacaccgcgtacctgcgggggcacagccccacccgagcgaacgggctccaaaggggaggtcccgcggtgcccaccgcgcagagctcagggggtggtgcgcccggcccttctgcggcgcacagcccagcccaggaacgcgggcggtgcggactcagcgggccgggtgcaggcgcggagctgggcctctgcgcccggcccgacctccgtctataaatagagcagccagttgcagggctccattctgctttccaactgcctgactgcttgttcgtctcactggtgtgagctccagcatcccctttgctcgaaatggaccccaactgctcttgcgccactggtggctcctgcacgtgcgccggctcctgcaagtgcaaagagtgcaaatgcacctcctgcaagaagagctgctgttcctgctgccccgtgggctgtgccaagtgtgcccagggctgcgtctgcaaaggggcatcggagaagtgcagctgctgtgcctgatgtgggaacagctcttctcccagatgtaaatagaacaacctgcacaacctggatttttttaaaaatacaacactgagccatttgctgcatttctttttatactaaatatgtgactgacaataaaaacaattttgactttaa

SEQ ID NO: 5790 - DNA, 1718 bp, Homo sapiens; identical to SEQ ID NO: 589

SEQ ID NO: 5791 - DNA, 5334 bp, Homo sapiens; identical to SEQ ID NO: 527

SEQ ID NO: 5792 - DNA, 8257 bp, Homo sapiens
agaaaccacttacaactccagacgattcgaaggggaaacttcggcgtgaagtgcagctccgctccggctccctctagctttctttccttctctggaatccgaggcgcggatcttcctcgccccaccgccctagttttttcgggagctcgccggtgccctctagggtgtcggctcgtgctgggaagtgccctccatcctggtaatggggggcggcgaggcaccgtaggagtggcgaggcggcgcccagggtggcactgccccggaacggggcgctgggtgcgcgcgggagggtccccgcgcgggctccgccgctgccgcagctgcgagcgcgccgcgccaccgagcctcctgcagcaatggctcgtccgtgaaacgcgagccacggctgctctttttaagagtgcctgcatcctccgtttgcgcttcgcaactgtcctgggtgaaaatggctgtctagactaaaatgtggcagaagggaccaagcagtggatattgagcctgtgaagtccaactcttaagctccgagacctgggggactgagagcccagctctgaaaagtgcatcatgaattccggagttgccatgaaatatggaaacgactcctcggccgagctgagtgagctccattcagcagccctggcatcactaaagggagatatagtggaacttaataaacgtctccagcaaacagagagggaacgggaccttctggaaaagaaattggccaaggcacagtgcgagcagtcccacctcatgagagagcatgaggatgtccaggagcgaacgacacttcgctatgaggaacgcatcacagagctccacagcgtcattgcggagctcaacaagaagatagaccgtctgcaaggcaccaccatcagggaggaagatgagtactcagaactgcgatcagaactcagccagagccaacacgaggtcaacgaggactctcgaagcatggaccaagaccagacctctgtctctatccccgaaaaccagtctaccatggttactgctgacatggacaactgcagtgacctgaactcagaactgcagagggtgctgacagggctggagaatgttgtctgcggcaggaagaagagcagctgcagcctctccgtggccgaggtggacaagcacattgagcagctcaccacagccagcgagcactgtgacctggctattaagacagtcgaggagattgagggggtgcttggccgggacctgtatcccaacctggctgaagagaggtctcggtgggagaaggagctggctgggctgagggaagagaatgagagcctgactgccatgctgtgcagcaaagaggaagaactgaaccggactaaggccaccatgaatgccatccgggaagagcgggaccggctccggaggagggtcagagagcttcaaactcgactacagagcgtgcaggccacaggtccctccagccctggccgcctcacttccaccaaccgcccgattaaccccagcactggggagctgagcacaagcagcagcagcaatgacattcccatcgccaagattgctgagagggtgaagctatcaaagacaaggtccgaatcgtcatcatctgatcggccagtcctgggctcagaaatcagtagcataggggtatccagcagtgtggctgaacacctggcccactcacttcaggactgctccaatatccaagagattttccaaacactctactcacacggatctgccatctcagaaagcaagattagagagtttgaggtggaaacagaacggctgaatagccggattgagcacctcaaatcccaaaatgacctcctgaccataaccttggaggaatgtaaaagcaatgccgagaggatgagcatgctggtgggaaaatacgaatccaatgccacagcgctgaggctggccttgcagtacagcgagcagtgcatcgaagcctacgaactcctcctggcgctggcagagagtgagcagagcctcatcctggggcagttccgagcggcgggcgtggggtcctcccctggagaccagtcgggggatgaaaacatcactcagatgctcaagcgagctcatgactgccggaagacagctgagaacgctgccaaggccctgctcatgaagctggacggcagctgtgggggagcctttgccgtggccggctgcagcgtgcagccctgggagagcctttcctccaacagccacaccagcacaaccagctccacagccagtagttgcgacaccgagttcactaaagaagacgagcagaggctgaaggattatatccagcagctcaagaatgacagggctgcggtcaagctgaccatgctggagctggaaagcatccacatcgatcctctcagctatgacgtcaagcctcggggagacagccagaggctggatctggaaaacgcagtgcttatgcaggagctcatggccatgaaggaggagatggccgagttgaaggcccagctctacctactggagaaagagaagaaggccctggagctgaagctgagcacgcgggaggcccaggagcaggcctacctggtgcacattgagcacctgaagtccgaggtggaggagcagaaggagcagcggatgcgatccctcagctccaccagcagcggcagcaaagacaaacctggcaaggagtgtgctgatgctgcctccccagctctgtccctagccgaactcaggacaacgtgcagcgagaatgagctggctgcggagttcaccaacgccattcgtcgagaaaagaagttgaaggccagagttcaagagctggtgagtgccttggagagactcaccaagagcagtgaaatccgacatcagcaatctgcagagttcgtgaatgatctaaagcgggccaacagcaacctggtggctgcctatgagaaagcaaagaaaaagcatcaaaacaaactgaagaagttagagtcgcagatgatggccatggtggagagacatgagacccaagtgaggatgctcaagcaaagaatagctctgctagaggaggagaactccaggccacacaccaatgaaacttcgctttaatcagcactcacgcaccggagttctgcccatgggaagtaaactgcagcaggccactggggacagaagggcccatgtacttgttgggaggaggaggaaagggaaggctggcaggtaggtcggcacttggacaatggagtgccccaactcaacccttggggcgactggccatggtgacattgtggactgtatccagaggtgcccgctcttccctcctgggcccacaacagcgtgtaaacacatgttctgtgcctgctcagcagagcctcgtttctgctttcagcactcactctccccctcctcttctggtctggcggctgtgcatcagtgggatcccagacatttgtttctgtaagattttccattgtatcctctttttggtagatgctgggctcatcttctagaatctcgtttctcctctttcctcctgcttcatgggaaaacagacctgtgtgtgcctccagcatttaaaaggactgctgatttgtttactacagcaaggctttggtttccaagtcccgggtctcaactttaagatagaggcggccataagaggtgatctctgggagttataggtcatgggaagagcgtagacaggtgttacttacagtcccagatacactaaagttacaaacagaccaccaccaggactgtgcctgaacaattttgtattgagagaataaaaacttccttcaatcttcattttggaggcagggctgggaagggagcgctctcttgattctgggatttctccctctcagtggagccttattaatatccaagacttagagctgggaatctttttgatacctgtagtggaactaaaattctgtcaggggtttcttcaagagctgagaaacattattagcacttcccgccccagggcactacataattgctgttctgctgaatcaaatctcttccacatgggtgcatttgtagctctggacctgtctctacctaaggacaagacactgaggagatactgaacattttgcaaaacttatcacgcctacttaagagtgctgtgtaacccccagttcaagacttagctcctgttgtcatgacggggacagagtgagggaatggtagttaaggcttcttttttgcccccagatacatggtgatggttagcatatggtgcttaaaaggttaaatttcaagcaaaatgcttacagggctaggcagtaccaaagtaactgaattatttcaggaaggtcttcaatcttaaaacaaattcattattctttttcagttttacctcttctctctcagttctacactgatacacttgaaggaccatttactgtttttttctgtagcaccagagaatccatccaaagttccctatgaaaaatgtgttccattgccatagctgactacaaattaaagttgaggaggtttctgcatagagtctttatgtccataagctacgggtaggtctattttcagagcatgatacaaattccacagccttctgttcgctggaggatactccagccaccagttcggagggcagacagctgtatcctaaaagcaaccactgagaggccagcagtgaggctgcccatctccaaaacgaaacaacagatcaactggtatcagtctagaaggaccagctttggggtgctttgatcactatgaaaatgttcactggtttctgtcaatcatttggtcaaagttagttcctgtgattttttttttttttttttgagatggagttttgctcgtcaccaggctgaagtgcagtggcgtgatcttggctcactgcaacctctgcctcctgagtagctggaattacaggtgcccgccaccatacccagctagtttttttgtatttttagtagagacagggtttcaccatgttggccaggctggtctcgaactcctgaccactgatccacccacctcggcctcccaaagtgctgggattacaggcatgagccaatgtgcctggccattcctgtgattttttagaatttttcacttttcatataaagttgcattttatcatgaggaaaatgttttggctgaaaaacatatgccccaaaaaaaaaaaaatcagttttcactatttttccagcttgcctagggaaacgtcctcccctgagcaaagtgggatgtgcatggctcttttttgtgattaagcaggcatcaaatgggcagttttcattttcactgacacagaaacatgtggctgaagcaggaataaaatcctgcctactgacttctgtctccattcttgctccaggtaaaatcagagaacctccccttctctgagaattcccccaggcagaggcggctccagctcctgttaagggccccagttttactcatgctacctgaccttagttttagtactttcaaatgtgatttgggtaaaaactattttgcaggcaaaagtgttaattttttataaatatgtataataaaaaagctataaaagtttttccttttcttgtatttttcaaatactccccaagacacaatccttgaaggtgaactaggtggcacttgattatgctaattgtgggagctactgaactaaactatactgattaaattaaatgcttgcaggttcctgggtaattttcctttgtgaataacctggcgctacctgaatttttctctaacaaacatctccaatgagggtaaacaatgatcttgattctaatttatatgaggttaaaaaccttcagatttcgtattttgaattgttctccctagtttcctcagtggttacccccttttagtcagtaaccatctctgttcagaattcagtctttggcttttgaagaaatgggcacagagccaaaggacccatttcacagttcccttggaatatatttcccattgttggactgaggcaaacaaaaccaactgtgcaaatcacaagcaaaagagacttctgtccgtagttgcgagtgccatcagtgtgagcttaccagctacaaaaatctgtcatggactggggaacagtatgattccttattgaaactttcatcctcatcggctggcttgtcagcgttctgaagttaatatccatgctgcctgaaacaaatgttatgtttaactagcacttaacttttaaaattgcttaattctcctttcagatgcatgcactaagtcttctctgagcctgcagcaatattttagagggacctcttctaagtcagagccttgacattctactccaaaaggaagtccaaattagagcccataggctttttcttaaaagctgttaaggagtagtaaagaaagttaccactctaaggaaaacatgaaactatctgaaagtcttctggttcctaactggatacagattagattattttaaatgagaaaaaagtgcaccgtagttacccgatcaagattggactgcctgtgtccctggcatgaattaaagaacctccatagttgcttgttcccttctgaaggtgtttcctatggcccacgagaattataaagcaatcactttttaagtctatcagtcaaccttaatagctctcaagagtttcgattatcaagctttaaagtgataacatatcaagatgactattaaaaaataaacatctctgaaagtgtcctttcctccataaggctttaaacaatttgcaaattcttaattgggagtatgtcccaatcattctattaaactatttacagctctacctacttctagattcagcaaacagagctactagttagagtattttgagagccaaaatagtaagagacttctgtaatggttgagatttctgcactgaccttaattagggtaccgccatagggctaccaaagtttttagtgagggctggggaggtggagcataagtaacattttttttctgcagaaggtgatggctttgtagaacactataaaatttttcaggaaaacatacagcaaattttcttatccagtgggaacagcctatttgacaaggaatgatatacaagtttgattcacctttgagcactcttatagagtttacagaagaggcgtaactggttacaaaacaaaagttacgccttcactatccagttcttaaagtttatccacatcctacaaatcttatgttcatgtaggtcaggttaaagtaagctccaaacttgtggccttcagaagcatctcctgtttaacacacctgaaattactctaacttaatacatttgtattctctaagaaataatgctgactgctgtcaccacagcatcactgatctctcagtggctgttaaaatataaacaagtggaaaaaaagtatacaagttgatagcagctgttcatgtattcttgttttgctaatacctgtgtagagaaagacagtttcacatgcagatcaccatacatttttgcttaaaggttacactgggtaaactgtttgtttatcacattacatctgggtgagattttgcatgtgaccaagaggaagaaatcattcagtcccggaaatagcaactgctatgtaaaaccacatccttgactagtacttcatctttccacagtcatccatctgctaatcaggtgaaatatcagctcagcagaacaaagcaagttatacacaaatttcccccacattcacactgatgccgtacttagtaattctggttctaccattcccttttgcactttttgcaagtcaaattcatgtggaaaaatgttctgtttgtagaactcatagtattcacttatagtgctcatgtcaggaatggcaagtgagtaagagcccctgataatctgcttttgttagaacgtaatgcaaagataataaaacatgtccacttcttttctagttctaatcagtttttagacatcaagatttatttactttgcatgagatttgtttcctattatttgaatatgtgctatacacttgaattagaaaaacctgcttgaatgtattgtcagttattaaagcacatgtgactaagtttgcatttgtcagtattgttctactgtttgtactgaaagtctcattttaaaattgctacttaacactgtactataccttgtaattttttagattctccacttgtattctttaaatgtttccagatgcctttagttttagctgctgtaaaatagctactttgcgttatttgatatagaattgttttttaaaaactccatttatttatacagagacatttataatattttacaaacattcttatattctgaataaatatttctaattccacagtgta

SEQ ID NO: 5793 - DNA, 2651 bp, Homo sapiens
agtttctcctttgttttacgtttgggaggaggtggcattggaaatagcagagtgcttcgcggtaacaggggttggagtgcaatggtgtgatctcagctcactgcaacccctgcctcccaggctccagcgatcctcccacctcagcctcctgaatagctgaccaccagcacactaggcaaacccaccccactcacggcctcccttgggaattcagacctaaccatcgctgagctgaaacaaatgtactgaggctggagcctgtgtgaacagaacagaagaggccttcactctagtagtgctcacagtccagcaggtgtttgctgaagacagcttactcagatcactactgcctggaggtggttgatatatcctggtgtaaaccttcaagaagggcacaggcaggaaaacatgagccagcaactgaagaaacgggcaaagacaagacaccagaaaggcctgggtggaagagcccccagtggggctaagcccaggcaaggcaagtcaagccaagacctgcaggcggaaatagaacctgtcagcgcggtgtgggccttatgtgatggctatgtgtgctatgagcctggccctcaggctctcggaggggatgatttctcagactgttacatagaatgcgtcataaggggtgagttttctcaacccatcctggaagaggactcactttttgagtccttggaatacctaaagaaaggatcagaacaacagctttctcaaaaggttttcgaagcaagctcccttgaatgttctttggaatacatgaaaaaaggggtaaagaaagagcttccacaaaagatagttggagagaattcgcttgagtattctgagtacatgacaggcaagaagcttccgcctggaggaatacctggcattgacctatcagatcctaaacagctcgcagaatttgctagaaagaagccccccataaataaagaatatgacagtctgagcgcaatcgcttgtcctcagagtggatgcactaggaagttgaggaatagagctgccctgagaaagcatctcctcattcatggtccccgagaccacgtctgtgcggaatgtgggaaagcgttcgttgagagctcaaaactaaagagacatttcctggttcatactggagagaagccgtttcggtgcacttttgaagggtgcggaaagcgcttctctctggactttaatttgcgtacgcacgtgcgcatccacacgggggagaaacgtttcgtgtgtccctttcaaggctgcaacaggaggtttattcagtcaaataacctgaaagcccacatcctaacgcatgcaaatacgaacaagaatgaacaagagggaaagtagtcctccaacaggatgaagcagattaacagaagagtgatcagtgacaaacatgcctcattgattattgtttctaggaaggaatttctaaatcaatattgcaaccccaaaagcggttataatttggtgttactaagatgctcctacactttgtgataccgttttaaggacatggtgcatttttttttcttttatttgttttatttagaactttttttatttgttttatttagaactttgtgtgttcttaaagtgtgcttccaacaggaaggtcagtgataaattttcaaaagcataaccttcaatatattatctgttggattattggatataagacttattttcatgtactataaatatgaaaataactttgatttttaattgtgtagtttccatttcttagcttttgccttttaaatttatacttcagccaggcatagtgactgatgcctgtaatcccaacactttgttgggaggccaaagcaggaggatagcttgaggccaggagttccagaccagcctgggcaacatagtgagatcctgtctctacaaaaaaatttgtttttatttgtatttatatatttttatttttgtttttgttggtaggcgtctcgctctgtcacccaggctggagtctagtgtcgtgatcttggctcactgcaacctccacctcccgggttcaagtgattctctggcctcagcctcccaagtagctgggactacaggtgtgtgtcaccacgcccggctaatttttgtatttttagtagagatggggtttcaccatgttggccaggctagtctcaaactcctgacctccagtgatctgcccacctcggcctcccaaagtgctgggattacaggtgtgagccactgtgcctggccccccacaacatgtttaaacttagctaggcctggttgcatacgcctgtgttcccagctactcaggaggctgaagcaggaggatagcttgagcccaggagtttgaggctacagtgagctgtgattgcaccactgtactccagactggataacagcaagagcccatcttttaaaaaaagtaaaaattaaaaatatacttcatggttcatgtcatagccctagagaatgaaaaatttgcagtagatagtcaataaatgaatcagtagttaaatattccttaaagtcaactgtatttcattgtgatttttgttttctttttatcattgtatcaaactatatggaaatcatatggttagatgtgattatttgataatgttagtccatttgaatccattttagatatttcacaattaaagaatatgaaacttcagaaa

SEQ ID NO: 5794 - DNA, 4123 bp, Homo sapiens
atcccgcccgcatacagcccgcatcccgccggggaagcgagcccagtccagcgctgcccgtccagtcctcgcccaagatttaaagcccgcaagttttgttcttgagaccagcgactttagctccgatgcgggaaggaaagccgacctccgatttggacatttaaagagctgggcttgaacttcgtgagtttcgctctaaactgcccttgaaatgaagctggacttggaggtggcatggaatattcacatgggagagccgcatgaggccgcccaccacgcttcctgaaggatgcccgtgtggaagaattttgacgtgccagtgtcctcgttctacagggtgttccattcttccgcaatctcagaaaaatgggactaaaagaaactattttgtaaaataagaagacttccatttttaatgaccaacatgtattaagatggacacctactctacgaaacacgaagttctatggtctcgaagaagcccgtgcctgtttaaaactgatcctaactaaaaacagacttgagtggatatgagaatgttggttagtggcagaagagtcaaaaaatggcagttaattattcagttatttgctacttgttttttagcgagcctcatgtttttttgggaaccaatcgataatcacattgtgagccatatgaagtcatattcttacagatacctcataaatagctatgactttgtgaatgataccctgtctcttaagcacacctcagcggggcctcgctaccaatacttgattaaccacaaggaaaagtgtcaagctcaagacgtcctccttttactgtttgtaaaaactgctcctgaaaactatgatcgacgttccggaattagaaggacgtggggcaatgaaaattatgttcggtctcagctgaatgccaacatcaaaactctgtttgccttaggaactcctaatccactggagggagaagaactacaaagaaaactggcttgggaagatcaaaggtacaatgatataattcagcaagactttgttgattctttctacaatcttactctgaaattacttatgcagttcagttgggcaaatacctattgtccacatgccaaatttcttatgactgctgatgatgacatatttattcacatgccaaatctgattgagtaccttcaaagtttagaacaaattggtgttcaagacttttggattggtcgtgttcatcgtggtgcccctcccattagagataaaagcagcaaatactacgtgtcctatgaaatgtaccagtggccagcttaccctgactacacagccggagctgcctatgtaatctccggtgatgtagctgccaaagtctatgaggcatcacagacactaaattcaagtctttacatagacgatgtgttcatgggcctctgtgccaataaaatagggatagtaccgcaggaccatgtgtttttttctggagagggtaaaactccttatcatccctgcatctatgaaaaaatgatgacatctcatggacacttagaagatctccaggacctttggaagaatgctacagatcctaaagtaaaaaccatttccaaaggtttttttggtcaaatatactgcagattaatgaagataattctcctttgtaaaattagctatgtggacacatacccttgtagggctgcgtttatctaatagtacttgaatgttgtatgttttcactgtcactgagtcaaacctggatgaaaaaaacctttaaatgttcgtctataccctaagtaaaatgaggacgaaagacaaatattttgaaagcctagtccatcagaatgtttctttgattctagaagctgtttaatatcacttatctacttcattgcctaagttcatttcaaagaatttgtatttagaaaaggtttatattattagtgaaaacaaaactaaagggaagttcaagttctcatgtaatgccacatatatacttgaggtgtagagatgttattaagaagttttgatgttagaataattgcttttggaaaataccaaatgaacgtacagtacaacatttcaaggaaatgaatatattgttagaccaggtaagcaagtttatttttgttaaagagcacttggtggaggtagtaggggcagggaaaggtcagcataggagagaaagttcatgaatctggtaaaacagtctcttgttcttaagaggagatgtagaaaaatgtgtacaatgttattataaacagacaaatcacgtcttaccacatccatgtagctactggtgttagagtcattaaaatacctttttttgcatcttttttcaaagtttaatgtgaacttttagaaaagtgattaatgttgccctaatactttatatgtttttaatggatttttttttaagtattagaaaatgacacataacacgggcagctggttgctcatagggtccttctctagggagaaaccattgttaattcaaataagctgattttaatgacgttttcaactggtttttaaatattcaatattggtctgtgtttaagtttgttatttgaatgtaatttacatagaggaatataataatggagagacttcaaatggaaagacagaacattacaagcctaatgtctccataattttataaaatgaaatcttagtgtctaaatccttgtactgattactaaaattaacccactcctccccaacaaggtcttataaaccacagcactttgttccaagttcagagttttaaattgagagcattaaacatcaaagttataatatctaaaacaatttatttttcatcaataactgtcagaggtgatctttattttctaaatatttcaaacttgaaaacagagtaaaaaagtgatagaaaagttgccagtttggggttaaagcatttttaaagctgcatgttccttgtaatcaaagagatgtgtctgagatctaatagagtaagttacatttattttacaaagcaggataaaaatgtggctataatacacactacctcccttcactacagaaagaactaggtggtgtctactgctagggagattatatgaaggccaaaataatgacttcagcaagagtgactgaactcactctaaggcctttgactgcagaggcacctgttagggaaaatcagatgtctcatataataaggtgatgtcggaaacacgcaaaacaaaacgaaaaaagatttctcagtatacacaactgaatgatgatacttacaatttttagcaggtagctttttaatgtttacagaaattttaatttttttctattttgaaatttgaggcttgtttacattgcttagataatttagaatttttaactaatgtcaaaactacagtgtcaaacattctaggttgtagttactttcagagtagatacagggttttagatcattacagtttaagttttctgaccaattaaaaaaacatagagaacaaaagcatatttgaccaagcaacaagcttataattaatttttattagttgattgattaatgatgtattgccttttgcccatatataccctgtgtatctatacttggaagtgtttaaggttgccattggttgaaaacataagtgtctctggccatcaaagtgatcttgtttacagcagtgcttttgtgaaacaattatttatttgctgaaagagctcttctgaactgtgtccttttaatttttgcttagaatagaatggaacaagtttaaatttcaaggaaatatgaaggcacttcctttttttctaagaaggaagttgctagatgattccttcatcacacttacttaaagtactgagaagagtatctgtaaataaaagggttccaaccttttaaaaaagaaggaaaaaactttttggtgctccagtgtagggctatctttttaaaaaatgtcaacaaagggaaaataaactatcagcttggatggtcacttgaatagaagatggttatacacagtgttattgttaaaatttttttaccttttggttggtttgcatcttttttccatattgttaattttataccaaaatgttaaatatttgtattacttgaattttgctcttgtatggcaaaataattagtgagtttaaaaaaaatctatagtttccaataaacaactgaaaaattatcatga

SEQ ID NO: 5795 - DNA, 2239 bp, Homo sapiens
acttcattaaatctagaggcagttgagcatgggagccgtctgtatgttgaattagggctcgcactcttgcgcaacacgtcaccagtcggaaactgggggtttgcttctgtgatttatttcattattgtgctggtaaaaggtttggaagggaattctttttgggggtagtactttagcattgtgtagcaagttttggggttttttttgtgtgtgaccccccagcccccagcgctgagtttgagtcagttgagccagtttagtaaataattttttaaaataaaagaacagtttaaaatctccatgaataattttacttacatgcaggagtaatcttactctactctttatgtgcgaaaagcattgggaagtgtttagtgaattgatttccattagaaaaagacccttagaaatcacagaacataaagcactgcatatggatgtgtttggggtctttggggaggagggaagatgttttgtagctctctgcattcctgcataaaaccttagtttgaggggaataatgctgatgaagagactagcagctcgctgctttgctggcttgttaattttatccccactaactgtgatttctgatagccggcctgctgatagtggtaaggccatcgaagacggcaatttggaggaaatggaagaggaagtacggcttaagaagcgaaaaagacgaagaaatgtggataaagatcctgcaaaagaagatgtggaaaaagctaagaagagaagaggccgccctcccgctgagaaactgtcaccaaatccccccaaactgacaaagcagatgaacgctatcatcgatactgtgataaactacaaagatagttcagggcgacagctcagtgaagtcttcattcagttaccttcaaggaaagaattaccagaatactatgaattaattaggaagccagtggatttcaaaaaaataaaggaaaggattcgtaatcataagtaccggagcctaggcgacctggagaaggatgtcatgcttctctgtcacaacgctcagacgttcaacctggagggatcccagatctatgaagactccatcgtcttacagtcagtgtttaagagtgcccggcagaaaattgccaaagaggaagagagtgaggatgaaagcaatgaagaggaggaagaggaagatgaagaagagtcagagtccgaggcaaaatcagtcaaggtgaaaattaagctcaataaaaaagatgacaaaggccgggacaaagggaaaggcaagaaaaggccaaatcgaggaaaagccaaacctgtagtgagcgattttgacagcgatgaggagcaggatgaacgtgaacagtcagaaggaagtgggacggatgatgagtgatcagtatggacctttttccttggtagaactgaattccttcctcccctgtctcatttctacccagtgagttcatttgtcatataggcactgggttgtttctatatcatcatcgtctataaactagctttaggatagtgccagacaaacatatgatatcatggtgtaaaaaacacacacatacacaaatatttgtaacatattgtgaccaaatgggcctcaaagattcagattgaaacaaacaaaaagcttttgatggaaaatatgtgggtggatagtatatttctatgggtgggtctaatttggtaacggtttgattgtgcctggttttatcacctgttcagatgagaagatttttgtcttttgtagcactgataaccaggagaagccattaaaagccactggttattttatttttcatcaggcaattttcgaggtttttatttgttcggtattgtttttttacactgtggtacatataagcaactttaataggtgataaatgtacagtagttagatttcacctgcatatacatttttccattttatgctctatgatctgaacaaaagctttttgaattgtataagatttatgtctactgtaaacattgcttaatttttttgctcttgatttaaaaaaaagttttgttgaaagcgctattgaatattgcaatctatatagtgtattggatggcttcttttgtcaccctgatctcctatgttaccaatgtgtatcgtctccttctccctaaagtgtacttaatctttgctttctttgcacaatgtctttggttgcaagtcataagcctgaggcaaataaaattccagtaatttcgaagaatgtggtgttggtgctttcctaataaagaaataatttagcttgac

SEQ ID NO: 5796 - DNA, 1324 bp, Homo sapiens
ggcggtggagagcgcagcgcgcagcccggtgcagccctggctttcccctcgctgcgcgcccgcgccccctttcgcgtccgcaaccagaagcccagtgcggcgccaggagccggacccgcgcccgcaccgctcccgggaccgcgaccccggccgcccagagatgaccgcgaccgaagccctcctgcgcgtcctcttgctcctgctggctttcggccacagcacctatggggctgaatgcttcccggcctgcaacccccaaaatggattctgcgaggatgacaatgtttgcaggtgccagcctggctggcagggtcccctttgtgaccagtgcgtgacctctcccggctgccttcacggactctgtggagaacccgggcagtgcatttgcaccgacggctgggacggggagctctgtgatagagatgttcgggcctgctcctcggccccctgtgccaacaacaggacctgcgtgagcctggacgatggcctctatgaatgctcctgtgcccccgggtactcgggaaaggactgccagaaaaaggacgggccctgtgtgatcaacggctccccctgccagcacggaggcacctgcgtggatgatgagggccgggcctcccatgcctcctgcctgtgcccccctggcttctcaggcaatttctgcgagatcgtggccaacagctgcacccccaacccatgcgagaacgacggcgtctgcactgacattgggggcgacttccgctgccggtgcccagccggcttcatcgacaagacctgcagccgcccggtgaccaactgcgccagcagcccgtgccagaacgggggcacctgcctgcagcacacccagggccaggccatctgcttcaccatcctgggcgtgctcaccagcctggtggtgctgggcactgtgggtatcgtcttcctcaacaagtgcgagacctgggtgtccaacctgcgctacaaccacatgctgcggaagaagaagaacctgctgcttcagtacaacagcggggaggacctggccgtcaacatcatcttccccgagaagatcgacatgaccaccttcagcaaggaggccggcgacgaggagatctaagcagcgttcccacagccccctctagattcttggagttccgcagagcttactatacgcggtctgtcctaatctttgtggtgttcgctatctcttgtgtcaaatctggtgaacgctacgcttacatatattgtctttgtgctgctgtgtgacaaacgcaatgcaaaaacaatcctctttctctctcttaatgcatgatacagaataataataagaatttcatctttaaatgag

SEQ ID NO: 5797 - DNA, 3490 bp, Homo sapiens
caatgttcgttatccttccagagatagtttatatcatggagtaatataaaaatttatgatttatatgtactgtataatagagcaattatattcttacctacccccaacatgctttaactcgaatgatagtgtagtacacttctgagtttgtctgggcttgtagctcttgtctgtcattagattctgaaagatacctattaacaataccctaaaaagatcaggagcctttaggccaagtctcaaacgtttcagatgagaaaaactcagggatggtgacttgacggaagttgcattaactaacaacgctcacatgctattctccggacttggaatgtccaagcaccctgggcttgctgacacccactcacttttcaaacatcaattcttgggaagcttttcccttccttaatgtcccccagataggtgatgtccccttgttacaggttttagaccattatgtacatctccttcctagcacatacatatattaaaatttgtttcctgtctccatgaggagagggactacatctgtccttttcactgctggcacacagtagttgctcaacaaaaatgtgcgaagtgaaactcgaacaggcggtcaggctcacagtccacgcctcttcctactgtggtcccgctgtgtttggacaaatagttccaaattataaactttaaaacctgagaagtctcaatagaaaaagcagggaagtctttccatttccatgattaatggaggaccttagcagaaacggctcaccgcgaggtgtgacgaccgcaggagggcgtcaatcaagaaaatgcccccttgccccggaggcgagtggagccgcacagagccgaggccatacgggccagcagtacggactgcttcaatagaaaacacgtgcaaaaccagagagccagactgcgcacagctgcgaccctcaagagccagcagaaaagacacggagcggcccccactggattgaagactgcacagcctctgcccggcgctgtaggacccgggcctccccttgattgctgctcgcagcggcttctgccagcatcctcgcggaagtggcttgagtccgaggcctccaaatgaaaccaggtggagcggccaagagtccgcagcacctgaactccagccatccgaatcccgccgggccgcagctaagggccgccgagcagccctaggaacccagggcactgtcccgctctgagctcgggaaacggccggtgtgacagccagcgccactgttaatccagggagcgcacccaccgaggaggcgtcttaggccagcggcctctgctcccgccgagtcccgctgctccccgcctggaaacagctgctgccaccccgggcccaggcctggacggcgcccccgaatttcggcagaggtgcctcggggccgcggacagggccgctggagcccgcactccagaaggcggtcttcctcgcgcctcccccgacggacgcggcccagggcttccctcgagggcgtcctcggccggggtgcctggagtccccaggggcgacagccgcggcggggcaccagggcgccagttccccggagcctggtagcaagcgcgtcccgggggcggggagcttggccggcggggcgggccggggtgggggcgggcggctgctcttggggccccgcgccattggccgcagggcccggcggcaggaaggggccagcgagcgcggccccaccccgcggccggcggagcctatcgccgggagcgcggagcgcggataaatgtagcgccgcggcgcgggccagcagctctgcgaggggccggagcgcggcggagccatgcagtacccgcaccccgggccggcggcgggcgccgtgggggtgccgctgtacgcgcccacgccgctgctgcaacccgcacacccgacgcccttttacatcgaggacatcctgggccgcgggcccgccgcgcccacgcccgcccccacgctgccgtcccccaactcctccttcaccagcctcgtgtccccctaccggaccccggtgtacgagcccacgccgatccatccagccttctcgcaccactccgccgccgcgctggccgctgcctacggacccggcggcttcgggggccctctgtaccccttcccgcggacggtgaacgactacacgcacgccctgctccgccacgaccccctgggcaaacctctactctggagccccttcttgcagaggcctctgcataaaaggaaaggcggccaggtgagattctccaacgaccagaccatcgagctggagaagaaattcgagacgcagaaatatctctctccgcccgagaggaagcgtctggccaagatgctgcagctcagcgagagacaggtcaaaacctggtttcagaatcgacgcgctaaatggaggagactaaaacaggagaaccctcaaagcaataaaaaagaagaactggaaagtttggacagttcctgtgatcagaggcaagatttgcccagtgaacagaataaaggtgcttctttggatagctctcaatgttcgccctcccctgcctcccaggaagaccttgaatcagagatttcagaggattctgatcaggaagtggacattgagggcgataaaagctattttaatgctggatgatgaccactggcattggcatgttcagaaaactggatttaggaataatgttttgctacagaaaatcttcatagaagaactggaaggctatataagaaagggaatcaattctctggtattctggaaacctaaaaatatttggtgcactgctcaattaacaaacctacatggagaccttaattttgacttaacaaatagtttatgtactgctcttaggttgttttgataaagtgacattatagtgattaaattcttccccctttaaaaaaacagttagtggttttcactatttataaaaaattaattttgaactttttgttaaatttttaagttatagctttaaaggttttaataggaccttcttgaacgacttttctgtaatctgtttatctcccacttaatggaaaggcaaaggggtaccccaaatccagaggtgcctacatttcaggcagccttggagtattttaaaaggaaaacattctttacttttatatgacattcttatactgctgtctcaaatccaaaaacatttcagagctcttgtctcagagatgtgtgttctttttgtcagagatatggttgatgagaatcttaaatgcttgttttgcactatcacttagtacctgtttgaccaaggtgttaaggggatagtacctcccaattcaagcagagaaactgacctgactaaagttaatcgcagatgaactagaagtcacaggttaattaaatgtaagtagattgtagatactgttttatatcaaacaatgtttataatgtgtatatagaattgttcactgtaaaaaaaatggccaaaatgtgttttttttttaataagtaacttgactataaaataaagccgtccgtgggacgactgacctcgt

SEQ ID NO: 5798 - DNA, 3099 bp, Homo sapiens
tttcagccaaccagactggagcagctgcgagtgctacatcttggctgtctgaagcgattggctcctctctggggagtggagggtgttcagttattaatgaccgctgagcaggcagcaccatgtcagtgtgacaactgatcgggtgaacgatgcaccactaaccaccatggaaacaaggaaaaataaagccagctcacaggatctctcttcactggattgagagcctcagcctgccgactgagaaaaagagttccaggaaaaagaaggaatcccggctgcagcctcctgccttcctttatattttaaaatagagagataagattgcgtgcatgtgtgcatatctatagtatatattttgtacactttgttacacagacacacaaatgcacctatttataccgggcaagaacacaaccatgtgattatctcaaccaaggaactgaggaatccagcacgcaaggacatcggaggtgggctagcactgaaactgcttttcaagacgaggaagaggaggagaaagagaaagaagaggaagatgttgggcaacatttatttaacatgctccacagcccggaccctggcatcatgctgctattcctgcaaatactgaagaagcatgggatttaaatattttacttctaaataaatgaattactcaatctcctatgaccatctatacatactccaccttcaaaaagtacatcaatattatatcattaaggaaatagtaaccttctcttctccaatatgcatgacatttttggacaatgcaattgtggcactggcacttatttcagtgaagaaaaactttgtggttctatggcattcatcatttgacaaatgcaagcatcttccttatcaatcagctcctattgaacttactagcactgactgtggaatccttaagggcccattacatttctgaagaagaaagctaagatgaaggacatgccactccgaattcatgtgctacttggcctagctatcactacactagtacaagctgtagataaaaaagtggattgtccacggttatgtacgtgtgaaatcaggccttggtttacacccagatccatttatatggaagcatctacagtggattgtaatgatttaggtcttttaactttcccagccagattgccagctaacacacagattcttctcctacagactaacaatattgcaaaaattgaatactccacagactttccagtaaaccttactggcctggatttatctcaaaacaatttatcttcagtcaccaatattaatgtaaaaaagatgcctcagctcctttctgtgtacctagaggaaaacaaacttactgaactgcctgaaaaatgtctgtccgaactgagcaacttacaagaactctatattaatcacaacttgctttctacaatttcacctggagcctttattggcctacataatcttcttcgacttcatctcaattcaaatagattgcagatgatcaacagtaagtggtttgatgctcttccaaatctagagattctgatgattggggaaaatccaattatcagaatcaaagacatgaactttaagcctcttatcaatcttcgcagcctggttatagctggtataaacctcacagaaataccagataacgccttggttggactggaaaacttagaaagcatctctttttacgataacaggcttattaaagtaccccatgttgctcttcaaaaagttgtaaatctcaaatttttggatctaaataaaaatcctattaatagaatacgaaggggtgattttagcaatatgctacacttaaaagagttggggataaataatatgcctgagctgatttccatcgatagtcttgctgtggataacctgccagatttaagaaaaatagaagctactaacaaccctagattgtcttacattcaccccaatgcatttttcagactccccaagctggaatcactcatgctgaacagcaatgctctcagtgccctgtaccatggtaccattgagtctctgccaaacctcaaggaaatcagcatacacagtaaccccatcaggtgtgactgtgtcatccgttggatgaacatgaacaaaaccaacattcgattcatggagccagattcactgttttgcgtggacccacctgaattccaaggtcagaatgttcggcaagtgcatttcagggacatgatggaaatttgtctccctcttatagctcctgagagctttccttctaatctaaatgtagaagctgggagctatgtttcctttcactgtagagctactgcagaaccacagcctgaaatctactggataacaccttctggtcaaaaactcttgcctaataccctgacagacaagttctatgtccattctgagggaacactagatataaatggcgtaactcccaaagaagggggtttatatacttgtatagcaactaacctagttggcgctgacttgaagtctgttatgatcaaagtggatggatcttttccacaagataacaatggctctttgaatattaaaataagagatattcaggccaattcagttttggtgtcctggaaagcaagttctaaaattctcaaatctagtgttaaatggacagcctttgtcaagactgaaaattctcatgctgcgcaaagtgctcgaataccatctgatgtcaaggtatataatcttactcatctgaatccatcaactgagtataaaatttgtattgatattcccaccatctatcagaaaaacagaaaaaaatgtgtaaatgtcaccaccaaaggtttgcaccctgatcaaaaagagtatgaaaagaataataccacaacacttatggcctgtcttggaggccttctggggattattggtgtgatatgtcttatcagctgcctctctccagaaatgaactgtgatggtggacacagctatgtgaggaattacttacagaaaccaacctttgcattaggtgagctttatcctcctctgataaatctctgggaagcaggaaaagaaaaaagtacatcactgaaagtaaaagcaactgttataggtttaccaacaaatatgtcctaaaaaccaccaaggaaacctactccaaaaatgaac

SEQ ID NO: 5799 - DNA, 995 bp, Homo sapiens
agcccagttggctggaccaatggatggagagaatcactcagtggtatctgagtttttgtttctgggactcactcattcatgggagatccagctcctcctcctagtgttttcctctgtgctctatgtggcaagcattactggaaacatcttcattgtgttttctgtgaccactgaccctcacttacactcccccatgtactttctactggccagtctctccttcattgacttaggagcctgctctgtcacttctcccaagatgatttatgacctgttcagaaagcgcaaagtcatctcctttggaggctgcatcgctcaaatcttcttcatccacgtcattggtggtgtggagatggtgctgctcatagccatggcctttgacagatatgtggccctatgtaagcccctccactatctgaccattatgagcccaagaatgtgcctttcatttctggctgttgcctggacccttggtgtcagtcactccctgttccaactggcatttcttgttaatttagccttctgtggccctaatgtgttggacagcttctactgtgaccttcctcggcttctcagactagcctgtaccgacacctacagattgcagttcatggtcactgttaacagtgggtttatctgtgtgggtactttcttcatacttctaatctcctacgtcttcatcctgtttactgtttggaaacattcctcaggtggttcatccaaggccctttccactctttcagctcacagcacagtggtccttttgttctttggtccacccatgtttgtgtatacacggccacaccctaattcacagatggacaagtttctggctatttttgatgcagttctcactccttttctgaatccagttgtctatacattcaggaataaggagatgaaggcagcaataaagagagtatgcaaacagctagtgatttacaagaagatctcataaatgatacaataagcccttctcgttaaacatgatatgg

SEQ ID NO: 5800 - DNA, 2483 bp, Homo sapiens
gtggctgcggggcaattgaaaaagagccggcgaggagttccccgaaacttgttggaactccgggctcgcgcggaggccaggagctgagcggcggcggctgccggacgatgggagcgtgagcaggacggtgataacctctccccgatcgggttgcgagggcgccgggcagaggccaggacgcgagccgccagcggtgggacccatcgacgacttcccggggcgacaggagcagccccgagagccagggcgagcgcccgttccaggtggccggaccgcccgccgcgtccgcgccgcgctccctgcaggcaacgggagacgcccccgcgcagcgcgagcgcctcagcgcggccgctcgctctccccctcgagggacaaacttttcccaaacccgatccgagcccttggaccaaactcgcctgcgccgagagccgtccgcgtagagcgctccgtctccggcgagatgtccgagcgcaaagaaggcagaggcaaagggaagggcaagaagaaggagcgaggctccggcaagaagccggagtccgcggcgggcagccagagcccagccttgcctccccgattgaaagagatgaaaagccaggaatcggctgcaggttccaaactagtccttcggtgtgaaaccagttctgaatactcctctctcagattcaagtggttcaagaatgggaatgaattgaatcgaaaaaacaaaccacaaaatatcaagatacaaaaaaagccagggaagtcagaacttcgcattaacaaagcatcactggctgattctggagagtatatgtgcaaagtgatcagcaaattaggaaatgacagtgcctctgccaatatcaccatcgtggaatcaaacgagatcatcactggtatgccagcctcaactgaaggagcatatgtgtcttcagagtctcccattagaatatcagtatccacagaaggagcaaatacttcttcatctacatctacatccaccactgggacaagccatcttgtaaaatgtgcggagaaggagaaaactttctgtgtgaatggaggggagtgcttcatggtgaaagacctttcaaacccctcgagatacttgtgcaagtgcccaaatgagtttactggtgatcgctgccaaaactacgtaatggccagcttctacaaggcggaggagctgtaccagaagagagtgctgaccataaccggcatctgcatcgccctccttgtggtcggcatcatgtgtgtggtggcctactgcaaaaccaagaaacagcggaaaaagctgcatgaccgtcttcggcagagccttcggtctgaacgaaacaatatgatgaacattgccaatgggcctcaccatcctaacccaccccccgagaatgtccagctggtgaatcaatacgtatctaaaaacgtcatctccagtgagcatattgttgagagagaagcagagacatccttttccaccagtcactatacttccacagcccatcactccactactgtcacccagactcctagccacagctggagcaacggacacactgaaagcatcctttccgaaagccactctgtaatcgtgatgtcatccgtagaaaacagtaggcacagcagcccaactgggggcccaagaggacgtcttaatggcacaggaggccctcgtgaatgtaacagcttcctcaggcatgccagagaaacccctgattcctaccgagactctcctcatagtgaaaggtatgtgtcagccatgaccaccccggctcgtatgtcacctgtagatttccacacgccaagctcccccaaatcgcccccttcggaaatgtctccacccgtgtccagcatgacggtgtccatgccttccatggcggtcagccccttcatggaagaagagagacctctacttctcgtgacaccaccaaggctgcgggagaagaagtttgaccatcaccctcagcagttcagctccttccaccacaaccccgcgcatgacagtaacagcctccctgctagccccttgaggatagtggaggatgaggagtatgaaacgacccaagagtacgagccagcccaagagcctgttaagaaactcgccaatagccggcgggccaaaagaaccaagcccaatggccacattgctaacagattggaagtggacagcaacacaagctcccagagcagtaactcagagagtgaaacagaagatgaaagagtaggtgaagatacgcctttcctgggcatacagaaccccctggcagccagtcttgaggcaacacctgccttccgcctggctgacagcaggactaacccagcaggccgcttctcgacacaggaagaaatccaggccaggctgtctagtgtaattgctaaccaagaccctattgctgtataaaacctaaataaacacatagattcacctgtaaaactttattttatataataaagtattccaccttaaattaaacaatttattttattttagcagttctgcaaatagaaaa

SEQ ID NO: 5801 - DNA, 440 bp, Homo sapiens
gccccctcccctgactatcaaagcagcggccggctgttggggtccaccacgccttccacctgccccactgcttcttcgcttctctcttggaaagtccagtctctcctcggcttgcaatggaccccaactgctcctgcgccgctggtgtctcctgcacctgcgctggttcctgcaagtgcaaagagtgcaaatgcacctcctgcaagaagagctgctgctcctgctgccccgtgggctgtagcaagtgtgcccagggctgtgtttgcaaaggggcgtcagagaagtgcagctgctgcgactgatgccaggacaacctttctcccagatgtaaacagagagacatgtacaaacctggattttttttttataccaccttgacccatttgctacattccttttcctgtgaaatatgtgagtgataattaaacactttagacctg

SEQ ID NO: 5802 - DNA, 4409 bp, Homo sapiens
ctcgctccctgacttccgggtcgcggtgcttgaagggagtgttccgtcgtttccgttgccggctgtttgcagtggggaaaccgaggcagctcctgctccccctagttcttccgctcctgtgaggaaaaaaaaatgtttatttctttgtgggagttcttctatgggcacttttttcgattttggatgaaatggctattacgacagatgactgggaagtgtgaattgcagcgaatatttgatacctatgtaggtgcacaaaggacacacaggatagaaaattccttgacatactccaagaataaggttttacagaaggcgacacatgttgttcagagtgaagtggacaaatatgtagatgatattatgaaggaaaagaatattaaccctgagaaggatgccagttttaaaatatgcatgaagatgtgcttactgcagataactggttataaacagctgtatttggatgtagaaagtgtgaggaaaaggccatatgattctgataacctacagcatgaagagctactcatgaagctttggaatcttctaatgcccacgaagaagttaaacgctagaatctccaagcagtgggctgaaattggttttcagggtgatgatcccaagacagacttcagaggcatgggcatacttgggttaatcaatcttgtgtatttcagtgaaaattacactagtgaagctcatcagattctttcccgttcaaatcatccaaaattagggtattcttatgcaatagttggaatcaatcttacagagatggcttatagcttactgaagagtgaagctttgaagtttcatctctataaccttgttcctggtataccaacaatggaacactttcatcagttttactgttatcttgtctatgaatttgacaagttttggtttgaagaagaaccagaaagcattatgtatttcaatttgtatagagagaagtttcatgaaaagattaaaggacttttactggattgtaatgtagcacttactttaaaagtataaatcatccactgtatcttctatttctaccacattttgcacattcaacagaatttatatgttgtaataggaattatctgatcaattacactcttatatataatttcctacaaaaatatttcagaaattctatttaagaaagctagtggacaatcagtgtatgtttacaattgtttatacactgttctccaaaggtaccttatccttccaaagatcccctctgtagagtcatgcgaactacagtttggaacttgggacttagcccgttggtgtaaaagtataaatcaggtatttgtattaaattgattaaaatgtgtaaaatcaattttcgtttttatgtgttatagggtcaagttggtatctttttcaaagctctttaagatttttttggtttttagtttggaaatggctgtttttaattttgtctgatttttatttctaggttaattaacagcaagtgtttctttatggttttctttgtttgcatcttaattacatgtcataacgttgcttcattagtagcaaatagagcagagatacagcagagagaataaagaattagggcctccttttgggtttctgtgattattgagcataactgatgagagaatgacagtattggtgactagcttttttgtttttaaataacacactttaaaatgccacagtgttatttgaaagcttaaaggcattttctcatcttcagtatttgctttttatcagttgtagaaaagaaccttagtgttttcttctctacctatgtatgcttatgaaaccgctctacctacatatgaaacttctctacctatgtatgtttacgaaaagagatgtatttgccaagaaaatcttgattatataaaagacaaaaagattataaaagacagtttctgtttaagtaaaactgtctttgaaacttaagaaagcttaagttttaaaaaaatctcagttaaacatcattggtttatttgacttactgttaactcttgcttctctttgactccatggtgtttttagataaccatgtatgaactttatgttaatggtttgtgggatactaaaatagcttgaagatgacttgatgactgtgcattttatatagttttattctcctaaaatctcaggagggcagcaagtgctgtcaacgattatatagtgatgagatttttatgggaatgatttcttcttggtgcgttttacacatttgtactgatagcaaaactaaagtttaaagcagcaaagtttaagttctccttaaatcctacagaaaccaaccttttaaggacataatttcatctaaaacatgacgatatttagcacaccttttaatgtgggtatatatcaagtgtttaaggactggctagtatgtgatagagcaagacctgagactttataagtatttgctcgtgtctgttgacagacctctttctttcaaacttgttagaagagtggtaagacatatccaattggaaaataagatgcagtgttgtatagcacatacatttaaagtgcttgcgttaaaattagtttctcaataagataaaattattttaaaaatttggttcactttattacaatagtggcaatttagcttttcagtattacaggaatttaaaaattggtttcttgtaggggacatctcaactttgggaatatcttcacttaatttttaaaaaatattttcatgctttattgtccagctatacaatatgtcgcaaaatcctgacaagttcattgtattaaggtattaactattacatggaaagcaattctgttcatcttttgatgtttgtgttgaaaatgcttatctttgtgttttgatcttccaacagctgagagcttgaactgatttaaacatttgtcaatatacttaagaatgctttaagtaaagaaggggaaaattttaagtaagttttttcccttctaggaagaaaaactatgatgatgttaagaaaatgtcattatagagcttgctcaataatatgttctttaaatccacctccatttgtacattataggtatcattctgtttttgcttaaaataatctgcaaccatttcagatagttttacagcaaattgatctaaaagccactaataaattctagggtttgagtctagaagccaagcaaactgtcaccaatgtcagttgtaaattagaatgcaacatgaggcttcagactcatgacaatgatatacatgaaaacaaaaatataattgtgtctaccttcctactttcccttttgacatatgtagttggaattttacatagtcttaaaatccatatttagaatcttacctgtttctataataattagtaaaatgccaaagtagtgatagaatattgtggcattgaagtagccgaaaaattgttagttttagcatcaaaaaagtaaatagatgttgaaatgaatttttgtatgtgccaggttgaagagagtgtgccagtgacaggaagtagtctaaaaaattaacagttatggttttaataggatctgaaagacaatctttaaagaaatgggagaaattgggggtatcagtgaacctataccaacctctctttgtacataaatatggtgatgtagctagatataaaaatcagtgtcttactggcaccatttacagtttagaaaacaatctttttcttaaaaatgcccatctgatttctatttttaggagctacttggatttgtatgtattttttctacgtgaaaatatatgtactcttcacttttgttccagtactataattgctcatgcactctttctcccctttgagaacattcagtgaaatacaacttcatcaaagatttgctcaaaggagaagaatcgcatgagtgtgaaaagtagatgctcgtagccagaacagaaaaggttacacatgatcatggcacagaagataggaggtttgacttggtgggccataatgtttattatcctttttgaaataacagggaccagcagcagttttctcaggataaatgctctaccccacttctctatgaacaggtgtggggaggcttactttccattttcatatttatacacctctctacaaaagcaatttttaatgaaggttagtggaattgttaaaaatctgagaggaatgatgactggaggtgtttggggtttttttctgtattcattttttaatgagaaaagttttaaatgtagtacaggttagacccaactactaccttactattataggacgattctatgtttctgttaaagtattcaagtagctttctctgggggaaaaagtaccacttggacacttaaaggaattgggatttttgtctactttggataaggcagttgacttcttaagtaaaagcaatagtgtaaaatgtcattttgtttggaatgttaagtgagcaaataaaaaacatgttgaaattgt

SEQ ID NO: 5803 - DNA, 3097 bp, Homo sapiens
gcttccttagcttcctgtgaaggaaattcttcaaacaaacaagtatcttcggaaagtcaaatgggttttttttctctaagcagtgagagaaatgaatctgttatccattatcctgaatccacagaacctgaaatacagcaagaaatgtccacgtcacaaccagactgcaatgtggatagttgctcagtaagcagtggatatggcaccttttgtatctcagaattaaatctgtacaaatctaaagaccctaaggagttcatggagcacatagatgttcccaaaggacagtatgtagcacctgcggtgccggctgagtcacttgtagatggtgtgaaaaatgagaatttttatatacagactcctgaagagtgtcatgtgtctttaaaggaagatgtatccatttctcctggtgaatttgaacataattttcttggtgaaaataaggtttctgaagtatacagtgggaaaacaaatagtaatgctataacatcatgggcacaaaaactgaagcagaaccaaccaaagagagcacatgtagaagatggaggttcaagatctaaacaaggaaatgagcaaagtaagaagacaccaattgagaaatctgattttgctgctgctacacatcctcgtgctttttacctcagtaaaccagatgaaactccaaatgcttggatgtctgattcaggaacaggattgacttactggaaactagaggaaaaggatatgcaccactctttgcctgaaactttagagaagacgttcatatcattgtcttccacagatgtgtcaccaaaccaggtcctgactctagatcctacgttacacatgaagccaaagcagcagatttcagggattcaacctcacggccttccgaatgcccttgatgacagaatatccttttccccggactctgttctagagcctagtatgtctagtccctctgacatagactcattttcacaagcaagtaatgtcacttctcagttacctggatttccaaaatatccctcacacacaaaagcttctccggtggactcttggaaaaatcagacattccaaaacgaaagtaggaccagttccacgtttccgtcagtatataccattactagtaatgatatctcggtcaacactgtagatgaagaaaacactgtcatggttgcttcggcctcagtcagtcagtcccagcttccaggtacagccaacagtgtcccagaatgcatttcattgacttccttggaagatcctgtgatattgtctaagattaggcagaatctgaaggaaaagcatgctcgacacatagcagatcttcgagcttattatgaatcagaaataaatagtttgaaacagaagctggaggcaaaagaaatctctggagttgaagattggaagataaccaatcaaattcttgtagacagatgtggccaattagatagtgctttgcatgaagctactagtcgcgtgagaacacttgaaaataagaataacttactggaaattgaagtgaatgatttgagagaacgcttcagtgcagccagcagtgcttccaaaattttgcaggaacgaattgaagaaatgagaacaagcagtaaagaaaaagacaataccatcattcgactaaaatctagactgcaagatttagaagaagcatttgagaatgcttacaaactctcagatgataaagaagctcaactaaaacaagagaacaaaatgtttcaagatcttttaggagagtatgagtcccttggaaaagaacacaggagagtaaaggatgcattaaatacaactgagaacaaattgcttgatgcatatactcagatttctgatttgaaaagaatgatttcaaaacttgaagctcaggtcaagcaagtagaacatgaaaatatgttaagccttcgtcataattctagaattcacgtgagaccctcgcgtgccaacacactagcaacttcagacgtcagcaggcggaaatggctgattccaggtgcagagtattccatctttactggccagcctctggacacccaggacagtaacgtggataaccagctggaggaaacctgtagcctagggcaccgttcacctctggaaaaggattcttcacctggaagttcatcaacaagcttgttgataaaaaagcaaagagagacttcagacacgccgatcatgagagctttaaaagaacttgatgagggaaaaatatttaaaaattgggggacacagacagagaaagaggacacctcaaatataaatcctcggcaaactgaaacttcagttaatgcaagtcgttctccagaaaagtgtgcccaacagagacaaaagagacttaattcggcctcacagagatcatcatctttaccaccttcaaatcgtaaatcaagtactccaacaaaaagagagattatgctaacaccagtgactgtggcttatagtccaaagcgatcccctaaagaaaacttgtccccaggatttagtcatctgcttagcaaaaatgagagcagtccaattcgaaaaaacttattctgagaaagccaccgataaccatgttaatcatagctcttgccctgaaccggtgccaaatggagtgaagaaagtatctgtgagaacagcctgggagaagaataaatcagttagctacgaacagtgtaagccggtttcagtcactccacaggggaatgattttgaatatacagcaaaaattcggaccctagctgaaacagaacgattttttgatgaacttacaaaagaaaaggaccagattgaggcagcactaagcaggatgccttctcctggaggacgaatcactttacagacaagattaaatcaggaagccttggaagatcgtttggaaaggattaatcgagaactgggttcagttcgcatgacgctaaagaaattccatgttttgcgcacctctgcaaatctttgagatttgtagccattaaattttgagacatttttgtttgcactaatgtataattatgcagtcagaaaaggcaaactattttgtactgtttataagccttcaaacagtagttttacaatcatgctattcttacacttgctattttatacttcaaatggccacatattttcaaga

SEQ ID NO: 5804 - DNA, 2257 bp, Homo sapiens
gtgagtcaccaaggaaggcagcggcagctccactcagccagtacccagatacgctgggaaccttccccagccatggcttccctggggcagatcctcttctggagcataattagcatcatcattattctggctggagcaattgcactcatcattggctttggtatttcagccttcagcatgccggaagtgaatgtggactataatgccagctcagagaccttgcggtgtgaggctccccgatggttcccccagcccacagtggtctgggcatcccaagttgaccagggagccaacttctcggaagtctccaataccagctttgagctgaactctgagaatgtgaccatgaaggttgtgtctgtgctctacaatgttacgatcaacaacacatactcctgtatgattgaaaatgacattgccaaagcaacaggggatatcaaagtgacagaatcggagatcaaaaggcggagtcacctacagctgctaaactcaaaggcttctctgtgtgtctcttctttctttgccatcagctgggcacttctgcctctcagcccttacctgatgctaaaataatgtgcctcggccacaaaaaagcatgcaaagtcattgttacaacagggatctacagaactatttcaccaccagatatgacctagttttatatttctgggaggaaatgaattcatatctagaagtctggagtgagcaaacaagagcaagaaacaaaaagaagccaaaagcagaaggctccaatatgaacaagataaatctatcttcaaagacatattagaagttgggaaaataattcatgtgaactagacaagtgtgttaagagtgataagtaaaatgcacgtggagacaagtgcatccccagatctcagggacctccccctgcctgtcacctggggagtgagaggacaggatagtgcatgttctttgtctctgaatttttagttatatgtgctgtaatgttgctctgaggaagcccctggaaagtctatcccaacatatccacatcttatattccacaaattaagctgtagtatgtaccctaagacgctgctaattgactgccacttcgcaactcaggggcggctgcattttagtaatgggtcaaatgattcactttttatgatgcttccaaaggtgccttggcttctcttcccaactgacaaatgccaaagttgagaaaaatgatcataattttagcataaacagagcagtcggcgacaccgattttataaataaactgagcaccttctttttaaacaaacaaatgcgggtttatttctcagatgatgttcatccgtgaatggtccagggaaggacctttcaccttgtctatatggcattatgtcatcacaagctctgaggcttctcctttccatcctgcgtggacagctaagacctcagttttcaatagcatctagagcagtgggactcagctggggtgatttcgccccccatctccgggggaatgtctgaagacaattttggttacctcaatgagggagtggaggaggatacagtgctactaccaactagtggatagaggccagggatgctgctcaacctcctaccatgtacaggacgtctccccattacaactacccaatccgaagtgtcaactgtgtcagggctaagaaaccctggttttgagtagaaaagggcctggaaagaggggagccaacaaatctgtctgcttcctcacattagtcattggcaaataagcattctgtctctttggctgctgcctcagcacagagagccagaactctatcgggcaccaggataacatctctcagtgaacagagttgacaaggcctatgggaaatgcctgatgggattatcttcagcttgttgagcttctaagtttctttcccttcattctaccctgcaagccaagttctgtaagagaaatgcctgagttctagctcaggttttcttactctgaatttagatctccagaccctgcctggccacaattcaaattaaggcaacaaacatataccttccatgaagcacacacagacttttgaaagcaaggacaatgactgcttgaattgaggccttgaggaatgaagctttgaaggaaaagaatactttgtttccagcccccttcccacactcttcatgtgttaaccactgccttcctggaccttggagccacggtgactgtattacatgttgttatagaaaactgattttagagttctgatcgttcaagagaatgattaaatatacatttcctacacca

SEQ ID NO: 5805 - DNA, 1221 bp, Homo sapiens
accgcagcggacagcgccaagtgaagcctcgcttcccctccgcggcgaccagggcccgagccgagagtagcagttgtagctacccgcccagaaactagacacaatgtgcgacgaagacgagaccaccgccctcgtgtgcgacaatggctccggcctggtgaaagccggcttcgccggggatgacgcccctagggccgtgttcccgtccatcgtgggccgcccccgacaccagggcgtcatggtcggtatgggtcagaaagattcctacgtgggcgacgaggctcagagcaagagaggtatcctgaccctgaagtaccctatcgagcacggcatcatcaccaactgggatgacatggagaagatctggcaccacaccttctacaacgagcttcgcgtggctcccgaggagcaccccaccctgctcaccgaggcccccctcaatcccaaggccaaccgcgagatcgtgcgcgacatcaaggagaagctgtgctacgtggccctggacttcgagaacgagatggcgacggccgcctcctcctcctccctggaaaagagctacgagctgccagacgggcaggtcatcaccatcggcaacgagcgcttccgctgcccggagacgctcttccagccctccttcatcggtatggagtcggcgggcattcacgagaccacctacaacagcatcatgaagtgtgacatcgacatcaggaaggacctgtatgccaacaacgtcatgtcggggggcaccacgatgtaccctgggatcgctgaccgcatgcagaaagagatcaccgcgctggcacccagcaccatgaagatcaagatcatcgccccgccggagcgcaaatactcggtgtggatcggcggctccatcctggcctcgctgtccaccttccagcagatgtggatcaccaagcaggagtacgacgaggccggcccttccatcgtccaccgcaaatgcttctagacacactccacctccagcacgcgacttctcaggacgacgaatcttctcaatgggggggcggctgagctccagccaccccgcagtcactttctttgtaacaacttccgttgctgccatcgtaaactgacacagtgtttataacgtgtacatacattaacttattacctcattttgttatttttcgaaacaaagccctgtggaagaaaatggaaaacttgaagaagcattaaagtcattctgttaagctgcgtaaa

SEQ ID NO: 5806 - DNA, 2747 bp, Homo sapiens
ggcgaagaggcggggtcgcccaagctgccgcgctggcattttctcctggacaaggagagagtgcggctgctgagagccgagcccagcaatcccgatcctctgagtcgtgaagaagggaggcagcgagggggttggggttggggcctgaggcaagcccccaggctccgctcttgccagagggacaggagccatggctcagaaaatggactgtggtgcgggcctcctcggcttccaggctgaggcctccgtagaagacagcgccttgcttatgcagaccttgatggaggccatccagatctcagaggctccacctactaaccaggccaccgcagctgctagtccccagagttcacagcccccaactgccaatgagatggctgacattcaggtttcagcagctgccgctaggcctaagtcagcctttaaagtccagaatgccaccacaaaaggcccaaatggtgtctatgatttctctcaggctcataatgccaaggatgtgcccaacacgcagcccaaggcagcctttaagtcccaaaatgctaccccaaagggtccaaatgctgcctatgatttttcccaggcagcaaccactggtgagttagctgctaacaagtctgagatggccttcaaggcccagaatgccactactaaagtgggcccaaatgccacctacaatttctctcagtctctcaatgccaatgacctggccaacagcaggcctaagacccctttcaaggcttggaatgataccactaaggccccaacagctgatacccagacccagaatgtaaatcaggccaaaatggccacttcccaggctgacatagagaccgacccaggtatctctgaacctgacggtgcaactgcacagacatcagcagatggttcccaggctcagaatctggagtcccggacaataattcggggcaagaggacccgcaagattaataacttgaatgttgaagagaacagcagtggggatcagaggcgggccccactggctgcagggacctggaggtctgcaccagttccagtgaccactcagaacccacctggcgcaccccccaatgtgctctggcagacgccattggcttggcagaacccctcaggctggcaaaaccagacagccaggcagaccccaccagcacgtcagagccctccagctaggcagaccccaccagcctggcagaacccagtcgcttggcagaacccagtgatttggccaaacccagtaatctggcagaacccagtgatctggccaaaccccattgtctggcccggccctgttgtctggccgaatccactggcctggcagaatccacctggatggcagactccacctggatggcagaccccaccgggctggcagggtcctccagactggcaaggtcctcctgactggccgctaccacccgactggccactgccacctgattggccacttcccactgactggccactaccacctgactggatccccgctgattggccaattccacctgactggcagaacctgcgcccctcgcctaacctgcgcccttctcccaactcgcgtgcctcacagaacccaggtgctgcacagccccgagatgtggcccttcttcaggaaagagcaaataagttggtcaagtacttgatgcttaaggactacacaaaggtgcccatcaagcgctcagaaatgctgagagatatcatccgtgaatacactgatgtttatccagaaatcattgaacgtgcatgctttgtcctagagaagaaatttgggattcaactgaaagaaattgacaaagaagaacacctgtatattctcatcagtacccccgagtccctggctggcatactgggaacgaccaaagacacacccaagctcggtctcctcttggtgattctgggtgtcatcttcatgaatggcaaccgtgccagtgaggctgtcctctgggaggcactacgcaagatgggactgcgtcctggggtgagacatcccctccttggagatctaaggaaacttctcacctatgagtttgtaaagcagaaatacctggactacagacgagtgcccaacagcaaccccccggagtatgagttcctctggggcctccgttcctaccatgagactagcaagatgaaagtgctgagattcattgcagaggttcagaaaagagaccctcgtgactggactgcacagttcatggaggctgcagatgaggccttggatgctctggatgctgctgcagctgaggccgaagcccgggctgaagcaagaacccgcatgggaattggagatgaggctgtgtctgggccctggagctgggatgacattgagtttgagctgctgacctgggatgaggaaggagattttggagatccctggtccagaattccatttaccttctgggccagataccaccagaatgcccgctccagattccctcagacctttgccggtcccattattggtcctggtggtacagccagtgccaacttcgctgccaactttggtgccattggtttcttctgggttgagtgagatgttggatattgctatcaatcgcagtagtctttcccctgtgtgaggctgaagcctcagattccttctaaacacagctatctagagagccacatcctgttgactgaaagtggcatgcaagataaatttatttgctgttccttgtctactgctttttttccccttgtgtgctgtcaagttttggtatcagaaataaacattgaaattgcaaagtgaatta

SEQ ID NO: 5807 - DNA, 5405 bp, Homo sapiens
ggcgccgggcggccggcgagtctggagcccgcgccgtcgccggccgcgtcctccgggcatggaaggaggcggcaagcccaactcttcgtctaacagccgggacgatggcaacagcgtcttccccgccaaggcgtccgcgacgggcgcggggccggccgcggccgagaagcgcctgggcaccccgccggggggcggcggggccggcgcgaaggagcacggcaactccgtgtgcttcaaggtggacggcggtggcggcggtggcggcggcggcggcggcggcgaggagccggcggggggcttcgaagacgccgaggggccccggcggcagtacggcttcatgcagaggcagttcacctccatgctgcagcccggggtcaacaaattctccctccgcatgtttgggagccagaaggcggtggaaaaggagcaggaaagggttaaaactgcaggcttctggattatccacccttacagtgatttcaggttttactgggatttaataatgcttataatgatggttggaaatctagtcatcataccagttggaatcacattctttacagagcaaacaacaacaccatggattattttcaatgtggcatcagatacagttttcctattggacctgatcatgaattttaggactgggactgtcaatgaagacagttctgaaatcatcctggaccccaaagtgatcaagatgaattatttaaaaagctggtttgtggttgacttcatctcatccatcccagtggattatatctttcttattgtagaaaaaggaatggattctgaagtttacaagacagccagggcacttcgcattgtgaggtttacaaaaattctcagtctcttgcgtttattacgactttcaaggttaattagatacatacatcaatgggaagagatattccacatgacatatgatctcgccagtgcagtggtgagaatttttaatctcatcggcatgatgctgctcctgtgccactgggatggttgtcttcagttcttagtaccactactgcaggacttcccaccagattgctgggtgtctttaaatgaaatggttaatgattcttggggaaagcagtattcatacgcactcttcaaagctatgagtcacatgctgtgcattgggtatggagcccaagccccagtcagcatgtctgacctctggattaccatgctgagcatgatcgtcggggccacctgctatgccatgtttgtcggccatgccaccgctttaatccagtctctggattcttcgaggcggcagtatcaagagaagtataagcaagtggaacaatacatgtcattccataagttaccagctgatatgcgtcagaagatacatgattactatgaacacagataccaaggcaaaatctttgatgaggaaaatattctcaatgaactcaatgatcctctgagagaggagatagtcaacttcaactgtcggaaactggtggctacaatgcctttatttgctaatgcggatcctaattttgtgactgccatgctgagcaagttgagatttgaggtgtttcaacctggagattatatcatacgagaaggagccgtgggtaaaaaaatgtatttcattcaacacggtgttgctggtgtcattacaaaatccagtaaagaaatgaagctgacagatggctcttactttggagagatttgcctgctgaccaaaggacgtcgtactgccagtgttcgagctgatacatattgtcgtctttactcactttccgtggacaatttcaacgaggtcctggaggaatatccaatgatgaggagagcctttgagacagttgccattgaccgactagatcgaataggaaagaaaaattcaattcttctgcaaaagttccagaaggatctgaacactggtgttttcaacaatcaggagaacgaaatcctcaagcagattgtgaaacatgacagggagatggtgcaggcaatcgctcccatcaattatcctcaaatgacaaccctgaattccacatcgtctactacgaccccgacctcccgcatgaggacacaatctccaccggtgtacacagcgaccagcctgtctcacagcaacctgcactcccccagtcccagcacacagaccccccagccatcagccatcctgtcaccctgctcctacaccaccgcggtctgcagccctcctgtacagagccctctggccgctcgaactttccactatgcctcccccaccgcctcccagctgtcactcatgcaacagcagccgcagcagcaggtacagcagtcccagccgccgcagactcagccacagcagccgtccccgcagccacagacacctggcagctccacgccgaaaaatgaagtgcacaagagcacgcaggcgcttcacaacaccaacctgacccgggaagtcaggccactctccgcctcgcagccctcgctgccccatgaggtgtccactctgatttccagacctcatcccactgtgggcgagtccctggcctccatccctcaacccgtgacggcggtccccggaacgggccttcaggcagggggcaggagcactgtcccgcagcgcgtcaccctcttccgacagatgtcgtcgggagccatccccccgaaccgaggagtccctccagcaccccctccaccagcagctgctcttccaagagaatcttcctcagtcttaaacacagacccagacgcagaaaagccacgatttgcttcaaatttatgatccctgctgattgtcaaagcagaaagaaatactctcataaactgagactatactcagatcttattttattctatctcctgatagatccctctagcctactatgaagagatattttagacagctgtggcctacacgtgaaatgtaaaaatatatatacatatactataaaatatatatctaaattcccaagagagggtcaaaagacctgtttagcattcagtgttatatgtcttcctttctttaaatcattaaaggatttaaaatgtcgttgtaagattatttatttctaacctacttttacttaagtcctttgatatgtatatttctctattttatgaagagttcttggattcaatggaaacaaaactgattttaaaaaggcaactcaaatgaactagtaaatagcaccaatcaaaactttctttcattagctgtgtctctgcatctaaattgttaatcattaatggtggagaattaaataacaaatcccattttatagatctaaattgtatttcggtgctttcaatttcaaattaggttaaagaatgcactacttgcttggccaccgtaggagactagcattgccactgtttgttaagaatatcactaacctcaaacatgttcattgatctttcagaaagctgagggaaaattaatatttgtcttcatgtgttatcggacttttaccaagactcgatcaatgttagttgtaaataactttttcaacccaaataaaaatagctattctgtgttgtatgaaggtaaaagtcattgtttaagaatttagttttattgcttcacttcaaaacttagagttttaaattttacaaaacctgattgtgagaattattcaattgtaatgcaatggcttgaaacctacaatattattttaacctgcaatgttttatgcaaaattgtatgctcgaatctacaaattgcttgtattacaccaaaaatcgttacttttctttcttcttgccataatcaagcatctgaaaatagtccctgcatgcttctggggaaaaaaaaataggttcaaatcagtcattgtagagaaaggcttacagtatttctcgtttctagaaaagcataacaattcattaattgcctatcttataattcctataaggctgacttggatctctgacttaagtctagaagtgaggttttcacttttatttaatattattgctattattatttaaataattatttgtaaaccacagcttgatttggagttaagtgttgtctgtgtcttcactgtagctggtaatttactatggtattaatttaaagaaataaattcaatacagcatcacgtctgtttgggaacacacattttgctctatgtatattgtaactaaatggttagtaaactttaaggcatgtggtgactaacgtagcccttagataggaggtttgtcatttttaatgtgttgaaaatagtacagacatggtgacagaaagcaggggtaaagttgaacgtctatgagcattgtctgtctgttttcttaactctttacatgatctgtgagcacctgcttcttctcaaagaactcccttagtaatcatttgtgcctaatgcatcccacacatgtggagtatgactggaacacaattgaaagattcctaacaactggctgcggtaaataacccaagttaagagcatgacttaaagtggaggtcttcagtatctctggcactggcaatacatttaagaacatacagagatcacacattatgtgggacagggcctgcagatagacttgaggacagaaaacaaaaacaaaagcagaaactctaaagtggatccttgctgcctgttatgccttttgtggatataatacctataataccaaaatgagttgttatgtttaatttcaaacaaatcccaactggtgtggaagtaattaactgctagtcgatgtaatgtaatcatcaatatgctggtgacatatgatggcatgtcaggaatactgttgtaagaaagggattgttcagtctacctagaacctatgggaaagctgcaagaccatttacatatcagtacaaaactcctttattttattaaaatatgagaattaacttcaatttattaagattacgtattggtcctttaaattattaaaggtttacatttgataggattaatggatttggtagtgaaatatttttatatatataaatttttggttttttattttgagcactattgggaaacataagcaaaattgaaatgcatggtctttcagtgcaaccatacaatttttattcactttgtaatagaatggacaaaaaaactaaggtttatatattaaactaataaaaaggtacagggtaaattatatacatatatgtatgaatgtatatatacttagattaagaaaaaaaaatgactcacattcctgtaatataaaggtccattgctagttgaaaagtgacctcttttctctgtacatagtgaagcccgtatgtatggagttttaatctgtacagaaagaaatgtattattcattggtctttctgctgctggaaagataatagaatagctgattcttacaacaactgtatgatcagggatgagttagagtatttcttttgtctttgctcaaagccatacatatataaatatatataaagattattaataaattcaacaaaaaataaactacaa

SEQ ID NO: 5808 - DNA, 1116 bp, Homo sapiens
tcaccaaagagtgccgaacaagttaaaatgaatctgtttttaaacacttctcctaaaccatgagcattaacttgatttcctctgtcatagggatatgggagacaatataacatccatcagagagttcctcctactgggatttcccgttggcccaaggattcagatgctcctctttgggctcttctccctgttctacgtcttcaccctgctggggaacgggaccatactggggctcatctcactggactccagactgcacgcccccatgtacttcttcctctcacacctggcggtcgtcgacatcgcctacgcctgcaacacggtgccccggatgctggtgaacctcctgcatccagccaagcccatctcctttgcgggccgcatgatgcagacctttctgttttccacttttgctgtcacagaatgtctcctcctggtggtgatgtcctatgatctgtacgtggccatctgccaccccctccgatatttggccatcatgacctggagagtctgcatcaccctcgcggtgacttcctggaccactggagtccttttatccttgattcatcttgtgttacttctacctttacccttctgtaggccccagaaaatttatcactttttttgtgaaatcttggctgttctcaaacttgcctgtgcagatacccacatcaatgagaacatggtcttggccggagcaatttctgggctggtgggacccttgtccacaattgtagtttcatatatgtgcatcctctgtgctatccttcagatccaatcaagggaagttcagaggaaagccttccgcacctgcttctcccacctctgtgtgattggactcgtttatggcacagccattatcatgtatgttggacccagatatgggaaccccaaggagcagaagaaatatctcctgctgtttcacagcctctttaatcccatgctcaatccccttatctgtagtcttaggaactcagaagtgaagaatactttgaagagagtgctgggagtagaaagggctttatgaaaaggattatggcattgtgactgacagtgacctaggaagttacatcattgagcggttcttaacccatctctgcactggtgggacctctg

SEQ ID NO: 5809 - DNA, 3553 bp, Homo sapiens
agccaggcgagaaggtcttgagtcagacagagcaccagccttggggaccctggaccactatcatggagactgcgagcgagcagaactccaattccaccaatgggagttctagctcagggggcagctctcggccccagatagctcaaatgtcactatatgaacgagaagcagtgcaggctctgcaagcactgcagcggcagcccaatgcagctcagtatttccaccagttcatgctccagcagcagctcagtaatgcccagctgcatagcctggctgccgtccagcaggccacaattgctgccagtcggcaggccagctccccaaacaccagcactacacagcagcagactaccaccacccaggcctcgatcaatctggccaccacatcggccgcccagctcatcagccgatcccagagtgtgagctctcccagtgctaccaccttgacccaatctgtgctactggggaacaccacctccccacccctcaaccagtctcaggcccagatgtatctacggccacagctgggaaacctattgcaggtaaaccgaaccctgggtcggaatgtgcctctagcctcccaactcatcctgatgcctaatggggcagtggctgcagtccagcaggaggtgccatctgctcagtctcctggagttcatgcagatgcagatcaggttcagaacttggcagtaaggaatcaacaggcctcagctcaaggacctcagatgcaaggctccactcagaaggccattcctccaggagcctcccctgtctctagcctctcccaggcctctagccaggccctagcggtggcacaggcttcctctggggccacaaaccagtccctcaaccttagtcaagctggtggaggcagtgggaatagcatcccagggtccatgggtccaggtggaggtgggcaggcacatggtggtttgggtcagttgccttcctcaggaatgggtggtgggagctgtcccaggaagggtacaggagtggtgcagcccttgcctgcagcccaaacagtgactgtgagccagggcagccagacagaggcagaaagtgcagcagccaagaaggcagaagcagatgggagtggccagcagaatgtgggcatgaacctgacacggacagccacacctgcgcccagccagacacttattagctcagccacctacacacagatccagccccattcactgattcagcaacagcaacagatccacctccagcagaaacaggtggtgatccagcagcagattgccatccaccaccagcagcagttccagcactggcagtcccagctccttcacacagctacacacctccagttggcgcagcagcagcagcagcaacaacagcaacagcagcaacagcagcagccgcaagccaccaccctcactgcccctcagccaccacaggtcccacctactcagcaggtcccaccttcccagtcccagcagcaagcccaaaccctggtcgttcagcccatgcttcagtcttcacccttgtctcttccacctgatgcagcccctaagccaccaattcccatccaatccaaaccacctgtagcacctatcaagccgcctcagttaggggccgctaagatgtcagctgcccagcaaccaccaccccatatccctgtgcaagttgtaggcactcgacagccaggtacagcccaggcacaggctttggggttggcacagctggcagctgctgtacctacttcccgggggatgccaggtacagtgcagtctggtcaggcccatttggcctcctcgccaccttcatcccaggctcctggtgcactgcaggagtgccctcccacattggcccctgggatgacccttgctcctgtgcaggggacagcacatgtggtaaagggtggggctaccacctcctcacctgttgtagcccaggtccctgctgccttctatatgcagtctgtgcacttgccgggtaaaccccagacattggctgtcaaacgcaaggctgactctgaggaggagagagatgatgtctccacattgggttcaatgcttcctgccaaggcatctccagtagcagaaagcccaaaagtcatggacgagaagagcagtcttggagaaaaagctgaatcagtggctaatgtgaatgctaatactccaaacagtgaactagtagccttgacccccgccccttcagtaccgcctcctacactagccatggtgtctagacaaatgggtgactcaaaacccccacaggccatcgtgaagccccagattctcacccacatcattgaaggctttgttatccaggaaggagcagaacctttcccggtgggttgttctcagttactgaaggagtctgagaagccactacagactggccttccgacagggctgactgagaatcagtcaggtggccctttgggagtggacagcccatctgctgagttagataagaaggcgaatctcctgaagtgcgagtactgtgggaagtacgcccccgcagagcagtttcgtggctctaagaggttctgctccatgacttgcgctaagaggtacaatgtgagctgtagccatcagttccggctgaagaggaaaaaaatgaaagagtttcaagaagccaactatgctcgcgttcgcaggcgtggaccccgccgcagctcctctgacattgcccgtgccaagattcagggcaagtgccaccggggtcaagaagactctagccggggttcagataattccagttatgatgaagcactctctccaacatctcctgggcctttatcagtaagagctgggcatggagaacgtgacctggggaatcccaatacagctccacctacaccggaattacatggcatcaaccctgtgttcctgtccagtaatcccagccgttggagtgtagaggaggtgtacgagtttattgcttctctccaaggctgccaagagattgcagaggaatttcgctcacaggagattgatggacaggcccttttattacttaaagaagaacatcttatgagtgccatgaacatcaagctgggccctgccctcaagatctgcgccaagataaatgtcctcaaggagacctaaggtggccctcttgcacaaaccagcctaaggcagacactctccactgtccaggttataacctggtaccagcagactttgcagggaagaaagagttgttccaatcatgtaaccttctgtaggggattactgagacagggaagagaagtgcaagaattggttgctggtgctacatggcggcagctttgacattttctctgggttctactttattttttaaaatctttacagttctcaccatttcacgtaccttaatccaatctttataaaagaggcagtctagagaactaggactgctcagccttatcccggagtggagcatttagcccaggtcttaattctccaagaggaggaatacatagtatggtaaggcaaggaactgggtggaatgtcaggttgcctgcccaatgggagaggtagggtttttctagcttgtgtgacagaagtagcaaaatctggtccttccccctcccagtgta

SEQ ID NO: 5810 - DNA, 4084 bp, Homo sapiens
aagccaacctcgctcagcggacgactggccggatcccaacgcgctgccccttgcccagcctgcgagcgcgtggtacgaaggcgcgtctgcatccatgccccagcccggggagctggaggcgctcgcagtcagaggcgagtgatgctaggctgagcgcgtggcggcccgtgtcgtgccccgctgagccaagtgcggaagggcagcggcgcgctccgactctgctcgccgcacgcagggcggggcgcggctggggggcggggggcctggccgcccgctgggagctgcggacgagcaggcgcgctgaggacccgagggaggacacggttaaagcattgctatcaactgtgaacccagagagccctccttagccaacacgctaactccgaagcctcccttacgcccccgaaccaccgaaggcggcgacacctgattcagcgcacaaacacaggtcccttctgtcccggatacaattacgcggcagacacacactcaaactcgcgcggggcagccaagagacgagctatgaagtcttacactccatatttcattctcctgtggagtgctgttgggatagcgaaggctgccaaaatcatcatcgtgccgccaattatgtttgaaagccatatgtacattttcaagacgctagcctcagccttgcacgagagaggccaccatacagtgttcctcctctctgaaggcagagacatcgccccatctaatcattacagcctccagcgctacccagggatctttaacagtaccacctcagatgctttcctacagtccaagatgcggaatattttctctgggagattgacagcaatcgaactgtttgacatactggatcactatactaagaactgtgacctgatggttggcaaccatgccctgatccagggtctgaagaaagaaaaatttgacctgctgctggtggaccctaatgatatgtgtggatttgtgatagctcatcttttaggggttaaatatgctgtattttcaactggcctttggtatcctgctgaagtgggtgctcctgctccattagcatacgtcccagagtttaactcactcctcacagaccgcatgaacttgctgcaaaggatgaaaaataccggtgtttacctcatttccagattaggggtcagctttctggttcttcccaaatatgaaaggataatgcagaagtacaacctgctgccagagaagtccatgtatgatttggttcatgggtccagcctgtggatgctgtgtactgacgtagcactggaattcccaagacccactctgcctaatgttgtttatgtaggaggaatcctaaccaaaccagccagcccactaccagaagatctccaaagatgggtaaatggtgctaatgaacatggctttgtcttggtgtcttttggagctggtgtcaagtatctgtcagaagacattgctaacaaactggcaggagctctggggagattgcctcaaaaagtgatttggaggttttctggacccaaaccaaagaatctaggaaacaacactaaactcatagaatggttaccacaaaatgacctgcttgggcattcaaagattaaagccttcctgagccatggtggtttgaacagtatttttgaaactatatatcatggtgtgcctgtagtgggaattccactctttggagaccattatgatactatgaccagagtacaggcaaaaggcatggggatattgctagaatggaagacagttactgaaaaagagctctatgaagcactagtgaaggttatcaataatcccagctaccgtcagagggctcagaagctttcggaaattcacaaggatcaacctggtcaccctgtcaatcgaactatctattggatagattatattattcgtcacaatggagcccatcacctacgtgccgctgtccatcagatctccttttgtcagtattttttactggatattgcctttgtgcttttgcttggtgctgccttgttatactttctcttgtcttgggtgacaaaatttatctacagaaaaatcaaaagtctgtggtctagaaataagcatagcacagttaatggacattaccacaatggaatcctcaatggcaagtacaaaagaaatggccatattaaacatgaaaagaaagtgaaatgagccaacagcccaggtgatagaaataaattggttcactcattgaatttttattgctattatttagtctaacagctactaaaagtaaaacatcagtaaacaattctaacatgcccttatgagatctactaatgaaattctgtggaattaagatggctgtaaaaagcacaaacctaaaatgcagaaatgtattttattcaaatactgatgtagagagttttggcactgaaccttttagaagccttaattatttaaatcaattcagtgactgtgtcagaccttagttttaaatcttgatatgtgcgtgtcccggatcaggaatggtttcatttttcttaataatgtgtgtgtgtgtatgtgtgtgtgtgtgtgtgtgtgtttgtgtgtgtgtgtgtgtgtcctaattaagagaatttttactggctgcttgttacatttgttgagggtacaacacactcaagaataaagtaaaaggatagtcaggatccagatgtttcttttctagcatttaatgtgtgtgaactcagaacactaccatgaaagaacacttccccccaaaactggatgcagaggaagaaaaaaaaaaaagaaatggcacagttttttgtatttttttttttagttattttttgttgttgttgtttgtattgtttttcttttctgatagagtatggccacttctgggggaaaaacatgtaattaagtaaatgtatacattggttttcacgttttacttttgttttcccactaccaataattttcctctggaagaattttatagttttttctatttcattttaatgagtaacaatatgttaaatgcataattaagacaaagcaatgaaattctgactttattcaaagtactgaagattattgcttctagggcatttttaaacagcaccattgtattgttgaatgtttatgtaactgatggcttttctataatgtaatttttgaatgttcaggtgttacatttccaaagtttaacttttaaaaaaccatcttctgatcccttttattgtctgggccatacaatctatattacataggtgccaacatttaattcttttaaatggaacatttgcagttttccatattggtacctgctttttctggagaggtttgagatcttgttaacaaatcagactttacactatatacagatgtgacagataaattgaaccacttgtttgtgaaaatgagttcctgtcatcttcctcattcactcagccctcaccccagcagccttttccggtcattgtagctgacatggagcagtgacagtattcatttgagaacagggatgcaagtcacagacatcataaaatcagggtctccctgctgaagcattcactagttggcaactatgaatttattccatgtcattctgtttacttagcacttgcactacccttgttggttgagtgtatgctttatttgtttctagtttgaaatcccacatctgatagctgagagtaggcaaatacaacatttacctaatgtcattcactaacatggaagagttgtgaaaattctagagtgctgtaaatccttggcatacactatgacaaacaacttcattactctcccaccaggagctgctctcctgcacttagaaataatgtcacaagtagttttctaatgtacaatgcagacaaatgtactgctctctgaatacttgaagaaatggtattatacatacatagaaacttattagttataccttttcacaatcttattacgatgttgccgttaaaagggaaaaaagacacaggcaatgaatggtgggatagtaagaggacttagagtgtatgaatgagttgattttacttttttggaatttgattaagttgacagtaggcactgattggatgattaaacataagttaatctccactgtgataaaaacttaaataataaacatgatttaaaatag

SEQ ID NO: 5811 - DNA, 3270 bp, Homo sapiens
gtgcggatgcggggaggctgcgtgtgtgcgcagggagagaacgccggccaccttcccgcttccgagctgggtgcgcgccgagcacaggagattgcctgcgtttaggaggtggctgcgttgtgggaaaagctatcaaggaagaaattgccaaaccatgtctttttttctgttttcagagtagttcacaacagatctgagtgttttaattaagcatggaatacagaaaacaacaaaaaacttaagctttaatttcatctggaattccacagttttcttagctccctggacccggttgacctgttggctcttcccgctggctgctctatcacgtggtgctctccgactactcaccccgagtgtaaagaaccttcggctcgcgtgcttctgagctgctgtggatggcctcggctctctggactgtccttccgagtaggatgtcactgagatccctcaaatggagcctcctgctgctgtcactcctgagtttctttgtgatgtggtacctcagccttccccactacaatgtgatagaacgcgtgaactggatgtacttctatgagtatgagccgatttacagacaagactttcacttcacacttcgagagcattcaaactgctctcatcaaaatccatttctggtcattctggtgacctcccacccttcagatgtgaaagccaggcaggccattagagttacttggggtgaaaaaaagtcttggtggggatatgaggttcttacatttttcttattaggccaagaggctgaaaaggaagacaaaatgttggcattgtccttagaggatgaacaccttctttatggtgacataatccgacaagattttttagacacatataataacctgaccttgaaaaccattatggcattcaggtgggtaactgagttttgccccaatgccaagtacgtaatgaagacagacactgatgttttcatcaatactggcaatttagtgaagtatcttttaaacctaaaccactcagagaagtttttcacaggttatcctctaattgataattattcctatagaggattttaccaaaaaacccatatttcttaccaggagtatcctttcaaggtgttccctccatactgcagtgggttgggttatataatgtccagagatttggtgccaaggatctatgaaatgatgggtcacgtaaaacccatcaagtttgaagatgtttatgtcgggatctgtttgaatttattaaaagtgaacattcatattccagaagacacaaatcttttctttctatatagaatccatttggatgtctgtcaactgagacgtgtgattgcagcccatggcttttcttccaaggagatcatcactttttggcaggtcatgctaaggaacaccacatgccattattaacttcacattctacaaaaagcctagaaggacaggatactttgtggaaagtgttaaataaagtaggtactgtggaaaattcatggggaggtcagtgtgctggcttacactgaactgaaactcatgaaaaacccagactggagactggagggttacacttgtgatttattagtcaggcccttcaaagatgatatgtggaggaattaaatataaaggaattggaggtttttgctaaagaaattaataggaccaaacaatttggacatgtcattctgtagactagaatttcttaaaagggtgttactgagttataagctcactaggctgtaaaaacaaaacaatgtagagttttatttattgaacaatgtagtcacttgaaggttttgtgtatatcttatgtggattaccaatttaaaaatatatgtagttctgtgtcaaaaaacttcttcactgaagttatactgaacaaaattttacctgtttttggtcatttataaagtacttcaagatgttgcagtatttcacagttattattatttaaaattacttcaactttgtgtttttaaatgttttgacgatttcaatacaagataaaaaggatagtgaatcattctttacatgcaaacattttccagttacttaactgatcagtttattattgatacatcactccattaatgtaaagtcataggtcattattgcatatcagtaatctcttggactttgttaaatattttactgtggtaatatagagaagaattaaagcaagaaaatctgaagtattgtcttgtttttaaaaaatacagttcctagtgtttttagaagtcacttaatttgtctcatttttccacctggaaattaggaataatgtagaatgcaaggcagtaatttccttttggaaaggactctgaaggcagaaaagaagggagagaacctcatgggcagaatattataaaaagagtgtcatattccagcatttgaattggaaagagaagagtgaagatccaagttgcattattaatctgccctgtgttttttccttttaacaatcagtttgagctgctgctgttatgagtttctcatcaagatgaaagccctaatatgtaaagtcaaatccgatttaaattttgtgcttttatagaaagaaatttcttcatagacgtggtgatatatcatttgttggacctgctaatagtaggtcaaaggggagcactccttgccccctgttcctgggtttatgcagttttctttttagagtttatatagggcaagtggttctttttctctgaattacaggatggaaaaaggtcatatcctttgtcaggaaatataaacttgaaagtatgtagtcagctcttgtaatactcatatttatgattgtcctatatgaaaaacaacttcagttaaaactataatgtgtgattctgtataacaaggtgatgtctgtttcccagggctcagacctaatccagttataataaaatcaattaaatgaaatattctatagaatcgatctatgcccttgttaatctccatccatataggagtcacgttctttaagacagatggtggtagttatttttgtggcatggttagatttgactggttttgcagaagattacagttatgtactgcataatgacatatacaatagtggtcccataaaattataatggagcagaaaatctattgcctcatgatgttttagccgttttaatgtcatagcctagtgcattactcacgtgtctgtggagatgctggtgtaaacaaacctactacactgccagttgtataaaagtacagcacattcagttatgtacagtatgtaatactgataatgacaataaatgacaccggtttgtgtatttactttttataa

SEQ ID NO: 5812 - DNA, 7751 bp, Homo sapiens; identical to SEQ ID NO: 2229

SEQ ID NO: 5813 - DNA, 3768 bp, Homo sapiens; identical to SEQ ID NO: 421

SEQ ID NO: 5814 - DNA, 1434 bp, Homo sapiens
ttcctgttgccgcgatccgggccgggagctgcgggcgcccgggcgcccgaggcttcccggtgcgctccgccaggtcagtcatcgctagagggttattattgacatttactcatcataaaatgtgatgtcagcctaccagctcggagtgcagttcctggtttccagtttacaacattgaccagttgctaacatgttatctctgaggaacttggaatgataaatacagccatacttaaatagaagattcttggccgtgtagataaggaaaataagataaggcaatatttttgaactattctataatagaaatgaggatatatacacaaaatgacccagtgctgttttcttagggtgcatcctttgtttttctggttttggtcttttcatcacaggatggcattagctctgtgtctgcaggtgctgtgcagcctgtgtggctggctctcgctctatatttctttctgccacctgaataagcaccgaagctatgagtggagctgccgcctggtcaccttcacccatggagtcctctctataggcctctccgcttatattggcttcattgatggcccatggccttttacccacccaggctcacccaatacacctctccaagttcatgtcctgtgtctcaccttgggctacttcatcttcgacttgggctggtgcgtctactttcagtctgagggtgccttgatgctggctcatcacacattgagtatcttgggcattatcatggcccttgtgcttggggagtctggcacagaggtcaatgcagtcctctttggaagtgagcttaccaaccccttgctacagatgcgctggtttctccgggaaacagggcactatcacagtttcactggagatgtagtggacttcctctttgtggctctgttcacaggagtgaggattggtgtgggagcttgcctccttttctgtgaaatggtctcccccacgcctaagtggtttgtgaaggctgggggagtagcgatgtatgctgtgtcttggtgtttcatgtttagcatctggcgctttgcatggaggaagagcatcaagaagtaccatgcttggagaagcaggcggagtgaggaacggcagctgaaacacaacggacatctcaaaatacactagccaaggcttgctccagattatggattgggttaagtcagccatgggaaccaggttggaaatatgactgttacataattacacttataacaaacttaggtttcaataaagggctaaatgtattgatcaatttggtcagtcttcaagccgagcatataccagtattaaaacactaacttctacagtagcacagttgtagaaagtgagaatactccatggtagttgggaataagtgagaactgtgaagtgagtacaactggcatttgttttcatttgtggtgaccctgggtcctcctgtccctggga

SEQ ID NO: 5815 - DNA, 2313 bp, Homo sapiens
gggtgtgcgggcggcgcgctcgccctccagctgcagcccgcgccgagcgcgcagggccagcgagcgccggcgcctccagcatggagtgggaactcaacttgctgctctacctggcgctcttcttcttcctgctcttcttacttttcctcctgctcttcgtggtcatcaagcagctgaagaactccgtggccaacacggccggggcgctccagcccgggcgcctctcggtgcaccgcgagccttggggcttctcccgagagcaagcggtgtgacccgagtgcgggcactggcgggagggcaccgagctgcgcgggcgctgggctgggtctccgcctcgattctccgtcctcgcggcctcccagcttccagagccgagctgctgcccttgactggtgctcaggggaccacagctgcaatgacagtttgggcctgcaaaaagaaggctggaacaacgggagatggaagctttctgcaaatgcagcaccactggtatccatgaatttaacctgcccatcattcttcctaaacaagagactattgaaaagtcagggtgttcaaaatggcttcagatcttatcaggacaatcttggctgttgcactaatttccaaacttggcacagctgtagatgcagaactgatgccatctggtgcgattctacagaataagagagaaaatttacccagagtgtgccatgcactggcttttctgggaatggcaaggtgccaggatttgtttttggttcgcttgcaggggtggaaacttggaactaggttccaagatggtccccgcagcaccccacaagaagaaggaggaagcccacagagaaaacggggcatgccagttcaaatccacttccttttaaagagcttcctcagcagcccaataacttttgccttcatctcattggccagaactgtgtcattggctactgctatctgcaagattgtctgagaaatgtagtttttgtagctggatatataactgcctttgacaaaaatccagtttctcttgatgaagaagaagatgatggtggatcttgggaggacaactaacattttatgccctggctacagaatacagttgcagaggagcataaagttcaaaaagatcaaaactctagttccttcacaactgtcaaagctccaagcagcactgctcccctctgacagagtgagcagagtgaaggcatgtcaggtgttctcacaaaactcttgacagggctgacctctctcagtcaatatccttgtcccacatcaggattttctagagggccctgggtacctgtgcacttccttggtggccgtaacctctttgtggagggttggtgtaggataaagaatgttctattacgctgctccctcatctgtatcatttctctcctctctaattttcctgtcagttatattttggtggagtctgggtttgtgtatttgattcctatagaaagaccatcgctttcatgcatggaggaggggaatctacgcaaagaaaggctaccttactcctttctgtgactccaccaccagtctaggaatatcctgggagaagaattgcctctcaaagctgcttctataagcagcctacatcctagctaagcaaagaagaaacacttcccacatctagggctgtctaaaagaactttctgtgatgacagaaatgttctatatctgcagtgtccaatatggtaaccatataggcacatgtggctagtgaacacttgaaatgtggctagtgtgactgaggaaggaaaatttaaattttgtttaattgtaattaatttaaattcagatagccaaatggggctactagctattgtgttagatagcacggtatactttattctctttcttgtgttgtagaaccagctgggagaggtgtgggtcagtcatgggcttggtatcccctggtcttcactattctagcttgccattgaatttgtctcccagaggaaaagaaagaatggtatttggaattaaattcaagatgttaacttgacatctatatattgcacatattcctgtatagtgaatggatgacctcctgggaatagttcctgtgactgattttagtgataattgatcatgaagaaatggcagtactgctccacttcaccttcctagtgactattatgtgttcctagtcagagtgactcagcagagattattttgttctcttgtgcaatttattctgtgtcattttatttttgtaatattgtggcagctaaatgattattctgtgtatgtttttcaaaatattaggtggcttatattttttaaaaggctatgaaataaaaataaactatacgtaacaca

SEQ ID NO: 5816 - DNA, 2869 bp, Homo sapiens
tttctaccagacagatacaacagacagaaataacctcaagagcacagacactagtgaataattaggaagtggtgaagtttatttgcctttgtctttaatataatctatttaactatgtttatataacttaattgttaataatgtctgtaataaccggcccacaaatttcctgaaagtgtgacaatctgctctcatacgctgctggaccagttccagcacgccactgttcctgccccagttgtgggatctgctctaacctccagctgccccacgcctcagcatacagtcacagcgaaggcatggtgggcaaacttctgagttacatggccacagcggttttttgtttgcttgtttgtttttgtatgtttgtttgtttagagacagtttgctctgtcccccaggctggagtgcagtggcgtaatcgtggctcactgcagcctcaaactcctgggatcaagagatcttcccacctcagcttcccaaggggctgggactacaggcacataccaacacacccagttaatgtttttaatttttttttaagacagagtctcactctgtcgcccaggctggagtgcagtggcacgatctctgctcactgcaagctccgcctcccaggttcatgccattctcctgcctcagcctcccagctagctgggactacaggtgcccatcaccacgcctggctaattttttgtatttttagtagagacggggattcaccatgttagctagaatagtcacgatctcctgacctcatgatccgcccgcctcggcctcccaaagtgctgggattacaggcgtgagccaccgtgcccagccaattttttaaaattttttgaggccaggaacagcagctcctgcctgtaatcccagcactttgggaggccgaagcaggaggatctcctgagcctaggagttcaagacctgcctgggcgatatagggagaccccatttctacaaaaaatttaaaaattagcagggtgtggtggtgcgtgcctgtagtcccagctactcgggaggctggggtgggaggattacctgaactgggaggtgaaggtttcagtgagctgagatcacaccactgcactccaatctaggtgagagaccttgcttcaaaaaaaaaattgagctcctgggctcaagcaatcctcctgccttggcctcccaaagcactgggacttttacaggcaccaccagttattacagaactcaaaagcaactgtgcactggaccactctgtattgtgttcggtgaggccatgcccgcgtatagatacaggaatgctgaggaacagcactgaagagtgacctaaacagcaatcaccaactgctggtgtttggctttgttcctcatatgaaaggatttgaagcccagggagtaggctggttgaatgaaaaatatttgcttgacacgatagttgctatttctagatgaattcagggaactatgggagcctctcacaagcatgaaaaatccaagtattcagatggaagttggggctcttattttccagcttgggcctgtaccagggctacaaggacatacaatgctaaatcaattaaaaaccaaaatctactcaaaaccatttatttcaaaaaagttctggagatggatggtggcgatggttacacagcaatgtgaatgtgcttaatgtcactgaactgtacgcttaaaaatggttaggatggtaaagttttttttttttttccttagggggatcctttatttcattcacttcctccttacaaggtgaaatttcaatctgtacaggttgtgtctgccagttcagtccacagctcagagtatcaccttgtcctcattccatggtataagctgttgtggggggacaggtctgagggtcgtggattcactggactggatgggacatgatccagaactccactccgtttggcttcccaaggatcccaccacctcattctaatcagtgatcattgaggaaatgcattgtattcctattcactatttcaaagatcaggcctacctcattggcatattaagaaagttttctcaagtatatttagtgtttatcattttactatagttcttcaaatgtctgacattcatcctttccctacctctacattcctttctttttcacattatctttcttgattgctttttaatagaaaaacaaacaaagacatggatttactgtgcatattagcagatccatactggaaaatgcatggaggtttcatatacaccacttacaggtttccaaagccacaatttccttcatatgttcaaactcttcaggatgcagaaaggcagtgaactcctccggagtagctgtcaggtcaccattgaggtctgcagctttgaatcttctctcatcacgtggcagcatctttttaaaggtgtgatgatctgaagaatcatgaaactctgcggggtttcctaggttttcagctcctcagtagtgacaaagccatacccatcattgtcgattcgatcaacaatcttccctagcctctccttgctctcgtccggggtgagctcgtcgaagttcttggagtcctccttgcccaggaaggcctcgtggtcgtactggaagctctggttgtcctcagggggccgctcgcccagctccgagtcgggccgcaccacgcgctctttgcgcaccgtgggcttggcccgcagaacccgcggcgccagcaccagcgccagcagcagccccagggctaaccccaggcggccaccgcgcgccatcgtcccgaggagagggcggccgggagggagacgctgagcgagcgacaacagcggcagctcgggaatgggggctcggagcgcggcggccaagttttatgttatgtatattttacaagtaaaaaaattttttcacctc
